United States Patent Application Publication US 2023/0026259 A1 - sequence listing, part 12

SEQ ID NO: 53496 - protein, 324 aa, Homo sapiens
  Payload ID: 10626
  Gene Symbol: MSI2
  Gene Name: musashi RNA-binding protein 2
  ENSP ID: ENSP00000414671
MFIGGLSWQTSPDSLRDYFSKFGEIRECMVMRDPTTKRSRGFGFVTFADPASVDKVLGQPHHELDSKTIDPKVAFPRRAQPKMVTRTKKIFVGGLSANTVVEDVKQYFEQFGKVEDAMLMFDKTTNRHRGFGFVTFENEDVVEKVCEIHFHEINNKMVECKKAQPKEVMFPPGTRGRARGLPYTMDAFMLGMGMLGYPNFVATYGRGYPGFAPSYGYQFPGFPAAAYGPVAAAAVAAARGSVLNSYSAQPNFGAPASPAGSNPARPGGFPGANSPGPVADLYGPASQDSGVGNYISAASPQPGSGFGHGIAGPLIATAFTNGYH

SEQ ID NO: 53497 - protein, 151 aa, Homo sapiens
  Payload ID: 10626
  Gene Symbol: MSI2
  Gene Name: musashi RNA-binding protein 2
  Uniprot ID: Q96DH6
  ENSP ID: ENSP00000462264
MVTRTKKIFVGGLSANTVVEDVKQYFEQFGKVEDAMLMFDKTTNRHRGFGFVTFENEDVVEKVCEIHFHEINNKMVECKKAQPKEVMFPPGTRGRARGLPYTMDAFMLGMGMLGYPNFVATYGRGYPGFAPSYGYQFPDYLPVSQDIIFIN

SEQ ID NO: 53498 - protein, 140 aa, Homo sapiens
  Payload ID: 10626
  Gene Symbol: MSI2
  Gene Name: musashi RNA-binding protein 2
  ENSP ID: ENSP00000462914
MADLTSVLTSVMFSPSSKMFIGGLSWQTSPDSLRDYFSKFGEIRECMVMRDPTTKRSRGFGFVTFADPASVDKVLGQPHHELDSKTIDPKVAFPRRAQPKMVTRTKKIFVGGLSANTVVEDVKQYFEQFGKVSAGSPGLS

SEQ ID NO: 53499 - protein, 99 aa, Homo sapiens
  Payload ID: 10626
  Gene Symbol: MSI2
  Gene Name: musashi RNA-binding protein 2
  ENSP ID: ENSP00000463227
MEANGSQGTSGSANDSQHDPGKMFIGGLSWQTSPDSLRDYFSKFGEIRECMVMRDPTTKRSRGFGFVTFADPASVDKVLGQPHHELDSKTCRRQKRLVY

SEQ ID NO: 53500 - protein, 208 aa, Homo sapiens [sequence omitted]

SEQ ID NO: 53501 - protein, 208 aa, Homo sapiens [sequence omitted]

SEQ ID NO: 53502 - protein, 23 aa, Homo sapiens
  Payload ID: 10627
  Gene Symbol: MRAS
  Gene Name: muscle RAS oncogene homolog
  ENSP ID: ENSP00000417092
MATSAVPSDNLPTYKLVVVGDGG

SEQ ID NO: 53503 - protein, 107 aa, Homo sapiens
  Payload ID: 10627
  Gene Symbol: MRAS
  Gene Name: muscle RAS oncogene homolog
  ENSP ID: ENSP00000417685
MREQYMRTGDGFLIVYSVTDKASFEHVDRFHQLILRVKDRESFPMILVANKVDLMHLRKITREQGKEMATKHNIPYIETSAKDPPLNVDKAFHDLVRVIRQQIPEKS

SEQ ID NO: 53504 - protein, 208 aa, Homo sapiens [sequence omitted]

SEQ ID NO: 53505 - protein, 132 aa, Homo sapiens
  Payload ID: 10627
  Gene Symbol: MRAS
  Gene Name: muscle RAS oncogene homolog
  Uniprot ID: O14807
  ENSP ID: ENSP00000419582
MREQYMRTGDGFLIVYSVTDKASFEHVDRFHQLILRVKDRESFPMILVANKVDLMHLRKITREQGKEMATKHNIPYIETSAKDPPLNVDKAFHDLVRVIRQQIPEKSQKKKKKTKWRGDRATGTHKLQCVIL

SEQ ID NO: 53506 - protein, 132 aa, Homo sapiens; identical to SEQ ID NO: 53505
  Payload ID: 10627
  Gene Symbol: MRAS
  Gene Name: muscle RAS oncogene homolog
  Uniprot ID: O14807
  ENSP ID: ENSP00000481637

SEQ ID NO: 53507 - protein, 132 aa, Homo sapiens; identical to SEQ ID NO: 53505
  Payload ID: 10627
  Gene Symbol: MRAS
  Gene Name: muscle RAS oncogene homolog
  Uniprot ID: O14807
  ENSP ID: ENSP00000484586

SEQ ID NO: 53508 - protein, 783 aa, Homo sapiens
  Payload ID: 10628
  Gene Symbol: MUSK
  Gene Name: muscle, skeletal, receptor tyrosine kinase
  Uniprot ID: O15146
  ENSP ID: ENSP00000189978
MRELVNIPLVHILTLVAFSGTEKLPKAPVITTPLETVDALVEEVATFMCAVESYPQPEISWTRNKILIKLFDTRYSIRENGQLLTILSVEDSDDGIYCCTANNGVGGAVESCGALQVKMKPKITRPPINVKIIEGLKAVLPCTTMGNPKPSVSWIKGDSPLRENSRIAVLESGSLRIHNVQKEDAGQYRCVAKNSLGTAYSKVVKLEVEEESEPEQDTKVFARILRAPESHNVTFGSFVTLHCTATGIPVPTITWIENGNAVSSGSIQESVKDRVIDSRLQLFITKPGLYTCIATNKHGEKFSTAKAAATISIAEWREYCLAVKELFCAKEWLVMEEKTHRGLYRSEMHLLSVPECSKLPSMHWDPTACARLPHLAFPPMTSSKPSVDIPNLPSSSSSSFSVSPTYSMTVIISIMSSFAIFVLLTITTLYCCRRRKQWKNKKRESAAVTLTTLPSELLLDRLHPNPMYQRMPLLLNPKLLSLEYPRNNIEYVRDIGEGAFGRVFQARAPGLLPYEPFTMVAVKMLKEEASADMQADFQREAALMAEFDNPNIVKLLGVCAVGKPMCLLFEYMAYGDLNEFLRSMSPHTVCSLSHSDLSMRAQVSSPGPPPLSCAEQLCIARQVAAGMAYLSERKFVHRDLATRNCLVGENMVVKIADFGLSRNIYSADYYKANENDAIPIRWMPPESIFYNRYTTESDVWAYGVVLWEIFSYGLQPYYGMAHEEVIYYVRDGNILSCPENCPVELYNLMRLCWSKLPADRPSFTSIHRILERMCERAEGTVSV

SEQ ID NO: 53509 - protein, 132 aa, Homo sapiens
  Payload ID: 10628
  Gene Symbol: MUSK
  Gene Name: muscle, skeletal, receptor tyrosine kinase
  ENSP ID: ENSP00000363562
NGVGGAVESCGALQVKMKPKITRPPINVKIIEGLKAVLPCTTMGNPKPSVSWIKGDSPLRENSRIAVLESGSLRIHNVQKEDAGQYRCVAKNSLGTAYSKVVKLEVEGAKGIHTQFVASALQLRSFLSCPQI

SEQ ID NO: 53510 - protein, 783 aa, Homo sapiens [sequence omitted]

SEQ ID NO: 53511 - protein, 869 aa, Homo sapiens
  Payload ID: 10628
  Gene Symbol: MUSK
  Gene Name: muscle, skeletal, receptor tyrosine kinase
  Uniprot ID: O15146
  ENSP ID: ENSP00000363571
MRELVNIPLVHILTLVAFSGTEKLPKAPVITTPLETVDALVEEVATFMCAVESYPQPEISWTRNKILIKLFDTRYSIRENGQLLTILSVEDSDDGIYCCTANNGVGGAVESCGALQVKMKPKITRPPINVKIIEGLKAVLPCTTMGNPKPSVSWIKGDSPLRENSRIAVLESGSLRIHNVQKEDAGQYRCVAKNSLGTAYSKVVKLEVEVFARILRAPESHNVTFGSFVTLHCTATGIPVPTITWIENGNAVSSGSIQESVKDRVIDSRLQLFITKPGLYTCIATNKHGEKFSTAKAAATISIAEWSKPQKDNKGYCAQYRGEVCNAVLAKDALVFLNTSYADPEEAQELLVHTAWNELKVVSPVCRPAAEALLCNHIFQECSPGVVPTPIPICREYCLAVKELFCAKEWLVMEEKTHRGLYRSEMHLLSVPECSKLPSMHWDPTACARLPHLDYNKENLKTFPPMTSSKPSVDIPNLPSSSSSSFSVSPTYSMTVIISIMSSFAIFVLLTITTLYCCRRRKQWKNKKRESAAVTLTTLPSELLLDRLHPNPMYQRMPLLLNPKLLSLEYPRNNIEYVRDIGEGAFGRVFQARAPGLLPYEPFTMVAVKMLKEEASADMQADFQREAALMAEFDNPNIVKLLGVCAVGKPMCLLFEYMAYGDLNEFLRSMSPHTVCSLSHSDLSMRAQVSSPGPPPLSCAEQLCIARQVAAGMAYLSERKFVHRDLATRNCLVGENMVVKIADFGLSRNIYSADYYKANENDAIPIRWMPPESIFYNRYTTESDVWAYGVVLWEIFSYGLQPYYGMAHEEVIYYVRDGNILSCPENCPVELYNLMRLCWSKLPADRPSFTSIHRILERMCERAEGTVSV

SEQ ID NO: 53512 - protein, 861 aa, Homo sapiens
  Payload ID: 10628
  Gene Symbol: MUSK
  Gene Name: muscle, skeletal, receptor tyrosine kinase
  ENSP ID: ENSP00000393608
MRELVNIPLVHILTLVAFSGTEKLPKAPVITTPLETVDALVEEVATFMCAVESYPQPEISWTRNKILIKLFDTRYSIRENGQLLTILSVEDSDDGIYCCTANNGVGGAVESCGALQVKMKPKITRPPINVKIIEGLKAVLPCTTMGNPKPSVSWIKGDSPLRENSRIAVLESGSLRIHNVQKEDAGQYRCVAKNSLGTAYSKVVKLEVEVFARILRAPESHNVTFGSFVTLHCTATGIPVPTITWIENGNAVSSGSIQESVKDRVIDSRLQLFITKPGLYTCIATNKHGEKFSTAKAAATISIAEWSKPQKDNKGYCAQYRGEVCNAVLAKDALVFLNTSYADPEEAQELLVHTAWNELKVVSPVCRPAAEALLCNHIFQECSPGVVPTPIPICREYCLAVKELFCAKEWLVMEEKTHRGLYRSEMHLLSVPECSKLPSMHWDPTACARLPHLAFPPMTSSKPSVDIPNLPSSSSSSFSVSPTYSMTVIISIMSSFAIFVLLTITTLYCCRRRKQWKNKKRESAAVTLTTLPSELLLDRLHPNPMYQRMPLLLNPKLLSLEYPRNNIEYVRDIGEGAFGRVFQARAPGLLPYEPFTMVAVKMLKEEASADMQADFQREAALMAEFDNPNIVKLLGVCAVGKPMCLLFEYMAYGDLNEFLRSMSPHTVCSLSHSDLSMRAQVSSPGPPPLSCAEQLCIARQVAAGMAYLSERKFVHRDLATRNCLVGENMVVKIADFGLSRNIYSADYYKANENDAIPIRWMPPESIFYNRYTTESDVWAYGVVLWEIFSYGLQPYYGMAHEEVIYYVRDGNILSCPENCPVELYNLMRLCWSKLPADRPSFTSIHRILERMCERAEGTVSV

SEQ ID NO: 53513 - protein, 388 aa, Homo sapiens
  Payload ID: 10629
  Gene Symbol: MBNL1
  Gene Name: muscleblind-like splicing regulator 1
  Uniprot ID: Q9NR56
  ENSP ID: ENSP00000282486
MAVSVTPIRDTKWLTLEVCREFQRGTCSRPDTECKFAHPSKSCQVENGRVIACFDSLKGRCSRENCKYLHPPPHLKTQLEINGRNNLIQQKNMAMLAQQMQLANAMMPGAPLQPVPMFSVAPSLATNASAAAFNPYLGPVSPSLVPAEILPTAPMLVTGNPGVPVPAAAAAAAQKLMRTDRLEVCREYQRGNCNRGENDCRFAHPADSTMIDTNDNTVTVCMDYIKGRCSREKCKYFHPPAHLQAKIKAAQYQVNQAAAAQAAATAAAMTQSAVKSLKRPLEATFDLGIPQAVLPPLPKRPALEKTNGATAVFNTGIFQYQQALANMQLQQHTAFLPPVPMVHGATPATVSAATTSATSVPFAATATANQIPIISAEHLTSHKYVTQM

SEQ ID NO: 53514 - protein, 400 aa, Homo sapiens
  Payload ID: 10629
  Gene Symbol: MBNL1
  Gene Name: muscleblind-like splicing regulator 1
  ENSP ID: ENSP00000282488
MAVSVTPIRDTKWLTLEVCREFQRGTCSRPDTECKFAHPSKSCQVENGRVIACFDSLKGRCSRENCKYLHPPPHLKTQLEINGRNNLIQQKNMAMLAQQMQLANAMMPGAPLQPVPMFSVAPSLATNASAAAFNPYLGPVSPSLVPAEILPTAPMLVTGNPGVPVPAAAAAAAQKLMRTDRLEVCREYQRGNCNRGENDCRFAHPADSTMIDTNDNTVTVCMDYIKGRCSREKCKYFHPPAHLQAKIKAAQYQVNQAAAAQAAATAAAMTQSAVKSLKRPLEATFDLGIPQAVLPPLPKRPALEKTNGATAVFNTGIFQYQQALANMQLQQHTAFLPPGSILCMTPATSVVPMVHGATPATVSAATTSATSVPFAATATANQIPIISAEHLTSHKYVTQM

SEQ ID NO: 53515 - protein, 340 aa, Homo sapiens
  Payload ID: 10629
  Gene Symbol: MBNL1
  Gene Name: muscleblind-like splicing regulator 1
  Uniprot ID: Q9NR56
  ENSP ID: ENSP00000319374
MAVSVTPIRDTKWLTLEVCREFQRGTCSRPDTECKFAHPSKSCQVENGRVIACFDSLKGRCSRENCKYLHPPPHLKTQLEINGRNNLIQQKNMAMLAQQMQLANAMMPGAPLQPVPMFSVAPSLATNASAAAFNPYLGPVSPSLVPAEILPTAPMLVTGNPGVPVPAAAAAAAQKLMRTDRLEVCREYQRGNCNRGENDCRFAHPADSTMIDTNDNTVTVCMDYIKGRCSREKCKYFHPPAHLQAKIKAAQYQVNQAAAAQAAATAAAMFPWCTVLRQPLCPQQQHLPQVFPSLQQPQPTSPILDASTLLGATSCPAAAGKMIPIISAEHLTSHKYVTQM

SEQ ID NO: 53516 - protein, 382 aa, Homo sapiens
  Payload ID: 10629
  Gene Symbol: MBNL1
  Gene Name: muscleblind-like splicing regulator 1
  Uniprot ID: Q9NR56
  ENSP ID: ENSP00000319429
MAVSVTPIRDTKWLTLEVCREFQRGTCSRPDTECKFAHPSKSCQVENGRVIACFDSLKGRCSRENCKYLHPPPHLKTQLEINGRNNLIQQKNMAMLAQQMQLANAMMPGAPLQPVPMFSVAPSLATNASAAAFNPYLGPVSPSLVPAEILPTAPMLVTGNPGVPVPAAAAAAAQKLMRTDRLEVCREYQRGNCNRGENDCRFAHPADSTMIDTNDNTVTVCMDYIKGRCSREKCKYFHPPAHLQAKIKAAQYQVNQAAAAQAAATAAAMGIPQAVLPPLPKRPALEKTNGATAVFNTGIFQYQQALANMQLQQHTAFLPPGSILCMTPATSVVPMVHGATPATVSAATTSATSVPFAATATANQIPIISAEHLTSHKYVTQM

SEQ ID NO: 53517 - protein, 370 aa, Homo sapiens
  Payload ID: 10629
  Gene Symbol: MBNL1
  Gene Name: muscleblind-like splicing regulator 1
  Uniprot ID: Q9NR56
  ENSP ID: ENSP00000347637
MAVSVTPIRDTKWLTLEVCREFQRGTCSRPDTECKFAHPSKSCQVENGRVIACFDSLKGRCSRENCKYLHPPPHLKTQLEINGRNNLIQQKNMAMLAQQMQLANAMMPGAPLQPVPMFSVAPSLATNASAAAFNPYLGPVSPSLVPAEILPTAPMLVTGNPGVPVPAAAAAAAQKLMRTDRLEVCREYQRGNCNRGENDCRFAHPADSTMIDTNDNTVTVCMDYIKGRCSREKCKYFHPPAHLQAKIKAAQYQVNQAAAAQAAATAAAMGIPQAVLPPLPKRPALEKTNGATAVFNTGIFQYQQALANMQLQQHTAFLPPVPMVHGATPATVSAATTSATSVPFAATATANQIPIISAEHLTSHKYVTQM

SEQ ID NO: 53518 - protein, 342 aa, Homo sapiens
  Payload ID: 10629
  Gene Symbol: MBNL1
  Gene Name: muscleblind-like splicing regulator 1
  Uniprot ID: Q9NR56
  ENSP ID: ENSP00000350064
MAVSVTPIRDTKWLTLEVCREFQRGTCSRPDTECKFAHPSKSCQVENGRVIACFDSLKGRCSRENCKYLHPPPHLKTQLEINGRNNLIQQKNMAMLAQQMQLANAMMPGAPLQPVPMFSVAPSLATNASAAAFNPYLGPVSPSLVPAEILPTAPMLVTGNPGVPVPAAAAAAAQKLMRTDRLEVCREYQRGNCNRGENDCRFAHPADSTMIDTNDNTVTVCMDYIKGRCSREKCKYFHPPAHLQAKIKAAQYQVNQAAAAQAAATAAAMGIPQAVLPPLPKRPALEKTNGATAVFNTGIFQYQQALANMQLQQHTAFLPPGSILCMTPATSVDTHNICRTSD

SEQ ID NO: 53519 - protein, 58 aa, Homo sapiens
  Payload ID: 10629
  Gene Symbol: MBNL1
  Gene Name: muscleblind-like splicing regulator 1
  ENSP ID: ENSP00000417169
MLGRCSRENCKYLHPPPHLKTQLEINGRNNLIQQKNMAMLAQQMQLANAMMPGAPLQP

SEQ ID NO: 53520 - protein, 314 aa, Homo sapiens
  Payload ID: 10629
  Gene Symbol: MBNL1
  Gene Name: muscleblind-like splicing regulator 1
  Uniprot ID: Q9NR56
  ENSP ID: ENSP00000417630
MAVSVTPIRDTKWLTLEVCREFQRGTCSRPDTECKFAHPSKSCQVENGRVIACFDSLKGRCSRENCKYLHPPPHLKTQLEINGRNNLIQQKNMAMLAQQMQLANAMMPGAPLQPVVCREYQRGNCNRGENDCRFAHPADSTMIDTNDNTVTVCMDYIKGRCSREKCKYFHPPAHLQAKIKAAQYQVNQAAAAQAAATAAAMGIPQAVLPPLPKRPALEKTNGATAVFNTGIFQYQQALANMQLQQHTAFLPPGSILCMTPATSVVPMVHGATPATVSAATTSATSVPFAATATANQIPIISAEHLTSHKYVTQM

SEQ ID NO: 53521 - protein, 90 aa, Homo sapiens
  Payload ID: 10629
  Gene Symbol: MBNL1
  Gene Name: muscleblind-like splicing regulator 1
  ENSP ID: ENSP00000417741
MAMLAQQMQLANAMMPGAPLQPVPMFSVAPSLATNASAAAFNPYLGPVSPSLVPAEILPTAPMLVTGNPGVPVPAAAAAAAQKLMRTDRL

SEQ ID NO: 53522 - protein, 388 aa, Homo sapiens; identical to SEQ ID NO: 53513
  Payload ID: 10629
  Gene Symbol: MBNL1
  Gene Name: muscleblind-like splicing regulator 1
  Uniprot ID: Q9NR56
  ENSP ID: ENSP00000418108

SEQ ID NO: 53523 - protein, 329 aa, Homo sapiens
  Payload ID: 10629
  Gene Symbol: MBNL1
  Gene Name: muscleblind-like splicing regulator 1
  ENSP ID: ENSP00000418109
  MOD_RES (1)..(1): Any amino acid
XVSVTPIRDTKWLTLEVCREFQRGTCSRPDTECKFAHPSKSCQVENGRVIACFDSLKGRCSRENCKYLHPPPHLKTQLEINGRNNLIQQKNMAMLAQQMQLANAMMPGAPLQPVPMFSVAPSLATNASAAAFNPYLGPVSPSLVPAEILPTAPMLVTGNPGVPVPAAAAAAAQKLMRTDRLEVCREYQRGNCNRGENDCRFAHPADSTMIDTNDNTVTVCMDYIKGRCSREKCKYFHPPAHLQAKIKAAQYQVNQAAAAQAAATAAAMGIPQAVLPPLPKRPALEKTNGATAVFNTGIFQYQQALANMQLQQHTAFLPPDTHNICRTSD

SEQ ID NO: 53524 - protein, 302 aa, Homo sapiens
  Payload ID: 10629
  Gene Symbol: MBNL1
  Gene Name: muscleblind-like splicing regulator 1
  Uniprot ID: Q9NR56
  ENSP ID: ENSP00000418427
MAVSVTPIRDTKWLTLEVCREFQRGTCSRPDTECKFAHPSKSCQVENGRVIACFDSLKGRCSRENCKYLHPPPHLKTQLEINGRNNLIQQKNMAMLAQQMQLANAMMPGAPLQPVVCREYQRGNCNRGENDCRFAHPADSTMIDTNDNTVTVCMDYIKGRCSREKCKYFHPPAHLQAKIKAAQYQVNQAAAAQAAATAAAMGIPQAVLPPLPKRPALEKTNGATAVFNTGIFQYQQALANMQLQQHTAFLPPVPMVHGATPATVSAATTSATSVPFAATATANQIPIISAEHLTSHKYVTQM

SEQ ID NO: 53525 - protein, 210 aa, Homo sapiens
  Payload ID: 10629
  Gene Symbol: MBNL1
  Gene Name: muscleblind-like splicing regulator 1
  ENSP ID: ENSP00000418508
QQMQLANAMMPGAPLQPVPMFSVAPSLATNASAAAFNPYLGPVSPSLVPAEILPTAPMLVTGNPGVPVPAAAAAAAQKLMRTDRLEVCREYQRGNCNRGENDCRFAHPADSTMIDTNDNTVTVCMDYIKGRCSREKCKYFHPPAHLQAKIKAAQYQVNQAAAAQAAATAAAMALANMQLQQHTAFLPPGSILCMTPATSVDTHNICRTSD

SEQ ID NO: 53526 - protein, 340 aa, Homo sapiens; identical to SEQ ID NO: 53515
  Payload ID: 10629
  Gene Symbol: MBNL1
  Gene Name: muscleblind-like splicing regulator 1
  Uniprot ID: Q9NR56
  ENSP ID: ENSP00000418876

SEQ ID NO: 53527 - protein, 343 aa, Homo sapiens
  Payload ID: 10629
  Gene Symbol: MBNL1
  Gene Name: muscleblind-like splicing regulator 1
  ENSP ID: ENSP00000419347
MGRCSRENCKYLHPPPHLKTQLEINGRNNLIQQKNMAMLAQQMQLANAMMPGAPLQPVPMFSVAPSLATNASAAAFNPYLGPVSPSLVPAEILPTAPMLVTGNPGVPVPAAAAAAAQKLMRTDRLEVCREYQRGNCNRGENDCRFAHPADSTMIDTNDNTVTVCMDYIKGRCSREKCKYFHPPAHLQAKIKAAQYQVNQAAAAQAAATAAAMTQSAVKSLKRPLEATFDLGIPQAVLPPLPKRPALEKTNGATAVFNTGIFQYQQALANMQLQQHTAFLPPGSILCMTPATSVVPMVHGATPATVSAATTSATSVPFAATATANQIPIISAEHLTSHKYVTQM

SEQ ID NO: 53528 - protein, 342 aa, Homo sapiens; identical to SEQ ID NO: 53518
  Payload ID: 10629
  Gene Symbol: MBNL1
  Gene Name: muscleblind-like splicing regulator 1
  Uniprot ID: Q9NR56
  ENSP ID: ENSP00000420103

SEQ ID NO: 53529 - protein, 348 aa, Homo sapiens
  Payload ID: 10629
  Gene Symbol: MBNL1
  Gene Name: muscleblind-like splicing regulator 1
  ENSP ID: ENSP00000420327
MAVSVTPIRDTKWLTLEVCREFQRGTCSRPDTECKFAHPSKSCQVENGRVIACFDSLKGRCSRENCKYLHPPPHLKTQLEINGRNNLIQQKNMAMLAQQMQLANAMMPGAPLQPVPMFSVAPSLATNASAAAFNPYLGPVSPSLVPAEILPTAPMLVTGNPGVPVPAAAAAAAQKLMRTDRLEVCREYQRGNCNRGENDCRFAHPADSTMIDTNDNTVTVCMDYIKGRCSREKCKYFHPPAHLQAKIKAAQYQVNQAAAAQAAATAAAMTQSAVKSLKRPLEATFDLGIPQAVLPPLPKRPALEKTNGATAVFNTGIFQYQQALANMQLQQHTAFLPPDTHNICRTSD

SEQ ID NO: 53530 - protein, 155 aa, Homo sapiens
  Payload ID: 10629
  Gene Symbol: MBNL1
  Gene Name: muscleblind-like splicing regulator 1
  ENSP ID: ENSP00000420680
MAMLAQQMQLANAMMPGAPLQPVPMFSVAPSLATNASAAAFNPYLGPVSPSLVPAEILPTAPMLVTGNPGVPVPAAAAAAAQKLMRTDRLEVCREYQRGNCNRGENDCRFAHPADSTMIDTNDNTVTVCMDYIKGRCSREKCKYFHPPAHLQAKI

SEQ ID NO: 53531 - protein, 314 aa, Homo sapiens; identical to SEQ ID NO: 53520
  Payload ID: 10629
  Gene Symbol: MBNL1
  Gene Name: muscleblind-like splicing regulator 1
  Uniprot ID: Q9NR56
  ENSP ID: ENSP00000437491

SEQ ID NO: 53532 - protein, 367 aa, Homo sapiens
  Payload ID: 10630
  Gene Symbol: MBNL2
  Gene Name: muscleblind-like splicing regulator 2
  Uniprot ID: Q5VZF2
  ENSP ID: ENSP00000267287
MALNVAPVRDTKWLTLEVCRQFQRGTCSRSDEECKFAHPPKSCQVENGRVIACFDSLKGRCSRENCKYLHPPTHLKTQLEINGRNNLIQQKTAAAMLAQQMQFMFPGTPLHPVPTFPVGPAIGTNTAISFAPYLAPVTPGVGLVPTEILPTTPVIVPGSPPVTVPGSTATQKLLRTDKLEVCREFQRGNCARGETDCRFAHPADSTMIDTSDNTVTVCMDYIKGRCMREKCKYFHPPAHLQAKIKAAQHQANQAAVAAQAAAAAATVMAFPPGALHPLPKRQALEKSNGTSAVFNPSVLHYQQALTSAQLQQHAAFIPTGSVLCMTPATSIVPMMHSATSATVSAATTPATSVPFAATATANQIILK

SEQ ID NO: 53533 - protein, 361 aa, Homo sapiens
  Payload ID: 10630
  Gene Symbol: MBNL2
  Gene Name: muscleblind-like splicing regulator 2
  Uniprot ID: Q5VZF2
  ENSP ID: ENSP00000344214
MALNVAPVRDTKWLTLEVCRQFQRGTCSRSDEECKFAHPPKSCQVENGRVIACFDSLKGRCSRENCKYLHPPTHLKTQLEINGRNNLIQQKTAAAMLAQQMQFMFPGTPLHPVPTFPVGPAIGTNTAISFAPYLAPVTPGVGLVPTEILPTTPVIVPGSPPVTVPGSTATQKLLRTDKLEVCREFQRGNCARGETDCRFAHPADSTMIDTSDNTVTVCMDYIKGRCMREKCKYFHPPAHLQAKIKAAQHQANQAAVAAQAAAAAATVMAFPPGALHPLPKRQALEKSNGTSAVFNPSVLHYQQALTSAQLQQHAAFIPTDNSEIISRNGMECQESALRITKHCYCTYYPVSSSIELPQTAC

SEQ ID NO: 53534 - protein, 373 aa, Homo sapiens
  Payload ID: 10630
  Gene Symbol: MBNL2
  Gene Name: muscleblind-like splicing regulator 2
  Uniprot ID: Q5VZF2
  ENSP ID: ENSP00000365861
MALNVAPVRDTKWLTLEVCRQFQRGTCSRSDEECKFAHPPKSCQVENGRVIACFDSLKGRCSRENCKYLHPPTHLKTQLEINGRNNLIQQKTAAAMLAQQMQFMFPGTPLHPVPTFPVGPAIGTNTAISFAPYLAPVTPGVGLVPTEILPTTPVIVPGSPPVTVPGSTATQKLLRTDKLEVCREFQRGNCARGETDCRFAHPADSTMIDTSDNTVTVCMDYIKGRCMREKCKYFHPPAHLQAKIKAAQHQANQAAVAAQAAAAAATVMAFPPGALHPLPKRQALEKSNGTSAVFNPSVLHYQQALTSAQLQQHAAFIPTGSVLCMTPATSIDNSEIISRNGMECQESALRITKHCYCTYYPVSSSIELPQTAC

SEQ ID NO: 53535 - protein, 361 aa, Homo sapiens; identical to SEQ ID NO: 53533
  Payload ID: 10630
  Gene Symbol: MBNL2
  Gene Name: muscleblind-like splicing regulator 2
  Uniprot ID: Q5VZF2
  ENSP ID: ENSP00000380726

SEQ ID NO: 53536 - protein, 105 aa, Homo sapiens
  Payload ID: 10630
  Gene Symbol: MBNL2
  Gene Name: muscleblind-like splicing regulator 2
  ENSP ID: ENSP00000404202
TQSTAKAMKRPLEATVDLAFPPGALHPLPKRQALEKSNGTSAVFNPSVLHYQQALTSAQLQQHAAFIPTVPMMHSATSATVSAATTPATSVPFAATATANQIILK

SEQ ID NO: 53537 - protein, 255 aa, Homo sapiens
  Payload ID: 10630
  Gene Symbol: MBNL2
  Gene Name: muscleblind-like splicing regulator 2
  ENSP ID: ENSP00000432422
MALNVAPVRDTKWLTLEVCRQFQRGTCSRSDEECKFAHPPKSCQVENGRVIACFDSLKGRCSRENCKYLHPPTHLKTQLEINGRNNLIQQKTAAAMLAQQMQFMFPGTPLHPVPTFPVGPAIGTNTAISFAPYLAPVTPGVGLVPTEILPTTPVIVPGSPPVTVPGSTATQKLLRTDKLEVCREFQRGNCARGETDCRFAHPADSTMIDTSDNTVTVCMDYIKGRCMREKCKYFHPPAHLQAKIKAAQPRPRPQS

SEQ ID NO: 53538 - protein, 334 aa, Homo sapiens
  Payload ID: 10631
  Gene Symbol: MBNL3
  Gene Name: muscleblind-like splicing regulator 3
  Uniprot ID: Q9NUK0
  ENSP ID: ENSP00000359876
MTAVNVALIRDTKWLTLEVCREFQRGTCSRADADCKFAHPPRVCHVENGRVVACFDSLKGRCTRENCKYLHPPPHLKTQLEINGRNNLIQQKTAAAMFAQQMQLMLQNAQMSSLGSFPMTPSIPANPPMAFNPYIPHPGMGLVPAELVPNTPVLIPGNPPLAMPGAVGPKLMRSDKLEVCREFQRGNCTRGENDCRYAHPTDASMIEASDNTVTICMDYIKGRCSREKCKYFHPPAHLQARLKAAHHQMNHSAASAMALTNLQLPQPAFIPAGPILCMAPASNIVPMMHGATPTTVSAATTPATSVPFAAPTTGNQIPQLSIDELNSSMFVSQM

SEQ ID NO: 53539 - protein, 258 aa, Homo sapiens
  Payload ID: 10631
  Gene Symbol: MBNL3
  Gene Name: muscleblind-like splicing regulator 3
  Uniprot ID: Q9NUK0
  ENSP ID: ENSP00000359881
MFAQQMQLMLQNAQMSSLGSFPMTPSIPANPPMAFNPYIPHPGMGLVPAELVPNTPVLIPGNPPLAMPGAVGPKLMRSDKLEVCREFQRGNCTRGENDCRYAHPTDASMIEASDNTVTICMDYIKGRCSREKCKYFHPPAHLQARLKAAHHQMNHSAASAMALQPGTLQLIPKRSALEKPNGATPVFNPTVFHCQQALTNLQLPQPAFIPAGPILCMAPASNIVPMMHGATPTTVSAATTPATSVPFAAPTTGNQLKF

SEQ ID NO: 53540 - protein, 304 aa, Homo sapiens
  Payload ID: 10631
  Gene Symbol: MBNL3
  Gene Name: muscleblind-like splicing regulator 3
  Uniprot ID: Q9NUK0
  ENSP ID: ENSP00000359886
MERASKNLKGRCTRENCKYLHPPPHLKTQLEINGRNNLIQQKTAAAMFAQQMQLMLQNAQMSSLGSFPMTPSIPANPPMAFNPYIPHPGMGLVPAELVPNTPVLIPGNPPLAMPGAVGPKLMRSDKLEVCREFQRGNCTRGENDCRYAHPTDASMIEASDNTVTICMDYIKGRCSREKCKYFHPPAHLQARLKAAHHQMNHSAASAMALQPGTLQLIPKRSALEKPNGATPVFNPTVFHCQQALTNLQLPQPAFIPAGPILCMAPASNIVPMMHGATPTTVSAATTPATSVPFAAPTTGNQLKF

SEQ ID NO: 53541 - protein, 354 aa, Homo sapiens
  Payload ID: 10631
  Gene Symbol: MBNL3
  Gene Name: muscleblind-like splicing regulator 3
  Uniprot ID: Q9NUK0
  ENSP ID: ENSP00000359890
MTAVNVALIRDTKWLTLEVCREFQRGTCSRADADCKFAHPPRVCHVENGRVVACFDSLKGRCTRENCKYLHPPPHLKTQLEINGRNNLIQQKTAAAMFAQQMQLMLQNAQMSSLGSFPMTPSIPANPPMAFNPYIPHPGMGLVPAELVPNTPVLIPGNPPLAMPGAVGPKLMRSDKLEVCREFQRGNCTRGENDCRYAHPTDASMIEASDNTVTICMDYIKGRCSREKCKYFHPPAHLQARLKAAHHQMNHSAASAMALQPGTLQLIPKRSALEKPNGATPVFNPTVFHCQQALTNLQLPQPAFIPAGPILCMAPASNIVPMMHGATPTTVSAATTPATSVPFAAPTTGNQLKF

SEQ ID NO: 53542 - protein, 342 aa, Homo sapiens
  Payload ID: 10631
  Gene Symbol: MBNL3
  Gene Name: muscleblind-like splicing regulator 3
  ENSP ID: ENSP00000359894
MTAVNVALIRDTKWLTLEVCREFQRGTCSRADADCKFAHPPRVCHVENGRVVACFDSLKGRCTRENCKYLHPPPHLKTQLEINGRNNLIQQKTAAAMFAQQMQLMLQNAQMSSLGSFPMTPSIPANPPMAFNPYIPHPGMGLVPAELVPNTPVLIPGNPPLAMPGAVGPKLMRSDKLEVCREFQRGNCTRGENDCRYAHPTDASMIEASDNTVTICMDYIKGRCSREKCKYFHPPAHLQARLKAAHHQMNHSAASAMALQPGTLQLIPKRSALEKPNGATPVFNPTVFHCQQALTNLQLPQPAFIPAVPMMHGATPTTVSAATTPATSVPFAAPTTGNQLKF

SEQ ID NO: 53543 - protein, 258 aa, Homo sapiens; identical to SEQ ID NO: 53539
  Payload ID: 10631
  Gene Symbol: MBNL3
  Gene Name: muscleblind-like splicing regulator 3
  Uniprot ID: Q9NUK0
  ENSP ID: ENSP00000377848

SEQ ID NO: 53544 - protein, 223 aa, Homo sapiens
  Payload ID: 10631
  Gene Symbol: MBNL3
  Gene Name: muscleblind-like splicing regulator 3
  ENSP ID: ENSP00000402128
MFAQQMQLMLQNAQMSSLGSFPMTPSIPANPPMAFNPYIPHPGMGLVPAELVPNTPVLIPGNPPLAMPGAVGPKLMRSDKLEVCREFQRGNCTRGENDCRYAHPTDASMIEASDNTVTICMDYIKGRCSREKCKYFHPPAHLQARLKAAHHQMNHSAASAMALQPGTLQLIPKRSALEKPNGATPVFNPTVFHCQQALTNLQLPQPAFIPAGPILCMAPASNI

SEQ ID NO: 53545 - protein, 242 aa, Homo sapiens
  Payload ID: 10631
  Gene Symbol: MBNL3
  Gene Name: muscleblind-like splicing regulator 3
  ENSP ID: ENSP00000406014
MFAQQMQLMLQNAQMSSLGSFPMTPSIPANPPMAFNPYIPHPGMGLVPAELVPNTPVLIPGNPPLAMPGAVGPKLMRSDKLEVCREFQRGNCTRGENDCRYAHPTDASMIEASDNTVTICMDYIKGRCSREKCKYFHPPAHLQARLKAAHHQMNHSAASAMALQPGTLQLIPKRSALEKPNGATPVFNPTVFHCQQALTNLQLPQPAFIPAGPILCMAPASNIVPMMHGATPTTVSAATTPA

SEQ ID NO: 53546 - protein, 150 aa, Homo sapiens
  Payload ID: 10631
  Gene Symbol: MBNL3
  Gene Name: muscleblind-like splicing regulator 3
  ENSP ID: ENSP00000412065
IKGRCSREKCKYFHPPAHLQARLKAAHHQMNHSAASAMALQPGTLQLIPKRSALEKPNGATPVFNPTVFHCQQALTNLQLPQPAFIPAGPILCMAPASNIVPMMHGATPTTVSAATTPATSVPFAAPTTGNQIPQLSIDELNSSMFVSQM

SEQ ID NO: 53547 - protein, 292 aa, Homo sapiens
  Payload ID: 10631
  Gene Symbol: MBNL3
  Gene Name: muscleblind-like splicing regulator 3
  Uniprot ID: Q9NUK0
  ENSP ID: ENSP00000439618
MERASKNLKGRCTRENCKYLHPPPHLKTQLEINGRNNLIQQKTAAAMFAQQMQLMLQNAQMSSLGSFPMTPSIPANPPMAFNPYIPHPGMGLVPAELVPNTPVLIPGNPPLAMPGAVGPKLMRSDKLEVCREFQRGNCTRGENDCRYAHPTDASMIEASDNTVTICMDYIKGRCSREKCKYFHPPAHLQARLKAAHHQMNHSAASAMALQPGTLQLIPKRSALEKPNGATPVFNPTVFHCQQALTNLQLPQPAFIPAVPMMHGATPTTVSAATTPATSVPFAAPTTGNQLKF

SEQ ID NO: 53548 - protein, 364 aa, Homo sapiens
  Payload ID: 10632
  Gene Symbol: MURC
  Gene Name: muscle-related coiled-coil protein
  Uniprot ID: Q5BKX8
  ENSP ID: ENSP00000418668
MEHNGSASNADKIHQNRLSSVTEDEDQDAALTIVTVLDKVASIVDSVQASQKRIEERHREMENAIKSVQIDLLKLSQSHSNTGHIINKLFEKTRKVSAHIKDVKARVEKQQIHVKKVEVKQEEIMKKNKFRVVIFQEKFRCPTSLSVVKDRNLTENQEEDDDDIFDPPVDLSSDEEYYVEESRSARLRKSGKEHIDNIKKAFSKENMQKTRQNLDKKVNRIRTRIVTPERRERLRQSGERLRQSGERLRQSGERFKKSISNAAPSKEAFKMRSLRKGKDRTVAEGEECAREMGVDIIARSESLGPISELYSDELSEPEHEAARPVYPPHEGREIPTPEPLKVTFKSQVKVEDDESLLLDLKHSS

SEQ ID NO: 53549 - protein, 458 aa, Homo sapiens
  Payload ID: 10633
  Gene Symbol: MLIP
  Gene Name: muscular LMNA-interacting protein
  Uniprot ID: Q5VWP3
  ENSP ID: ENSP00000274897
MELEKREKRSLLNKNLEEKLTVSAGGSEAKPLIFTFVPTVRRLPTHTQLADTSKFLVKIPEESSDKSPETVNRSKSNDYLTLNAGSQQERDQAKLTCPSEVSGTILQEREFEANKLQGMQQSDLFKAEYVLIVDSEGEDEAASRKVEQGPPGGIGTAAVRPKSLAISSSLVSDVVRPKTQGTDLKTSSHPEMLHGMAPQQKHGQQYKTKSSYKAFAAIPTNTLLLEQKALDEPAKTESVSKDNTLEPPVELYFPAQLRQQTEELCATIDKVLQDSLSMHSSDSPSRSPKTLLGSDTVKTPTTLPRAAGRETKYANLSSPSSTVSESQLTKPGVIRPVPVKSRILLKKEEEVYEPNPFSKYLEDNSDLFSEQDVTVPPKPVSLHPLYQTKLYPPAKSLLHPQTLSHADCLAPGPFSHLSFSLSDEQENSHTLLSHNACNKLSHPMVAIPEHEALDSKEQ

SEQ ID NO: 53550 - protein, 234 aa, Homo sapiens
  Payload ID: 10633
  Gene Symbol: MLIP
  Gene Name: muscular LMNA-interacting protein
  Uniprot ID: Q5VWP3
  ENSP ID: ENSP00000359913
MCSWYLGFECSSKSNDYLTLNAGSQQERDQAKLTCPSEVSGTILQEREFEANKLQGMQQSDLFKAEYVLIVDSEGEDEAASRKVEQGPPGGIGTAAVRPKSLAISSSLVSDVVRPKTQGTDLKTSSHPEMLHGMAPQQKHGQTPTTLPRAAGRETKYANLSSPSSTVSESQLTKPGVIRPVPVKSRILLKKEEEVYEPNPFSKYLEDNSDLFSEQLSHPMVAIPEHEALDSKEQ

SEQ ID NO: 53551 - protein, 268 aa, Homo sapiens
  Payload ID: 10633
  Gene Symbol: MLIP
  Gene Name: muscular LMNA-interacting protein
  ENSP ID: ENSP00000359914
MELEKREKRSLLNKNLEEKLTSKSNDYLTLNAGSQQERDQAKLTCPSEVSGTILQEREFEANKLQGMQQSDLFKAEYVLIVDSEGEDEAASRKVEQGPPGGIGTAAVRPKSLAISSSLVSDVVRPKTQGTDLKTSSHPEMLHGMAPQQKHGQALDEPAKTESVSKDNTLEPPVEHSSDSPSRSPKTLLGSDTVKTPTTLPRAAGRETKYANLSSPSSTVSESQLTKPGVIRPVPVKSRILLKKEEEVYEPNPFSKYLEDNSDLFSEQQ

SEQ ID NO: 53552 - protein, 196 aa, Homo sapiens
  Payload ID: 10633
  Gene Symbol: MLIP
  Gene Name: muscular LMNA-interacting protein
  ENSP ID: ENSP00000411917
MQQSDLFKAEYVLIVDSEGEDEAASRKVEQGPPGGIGTAAVRPKSLAISSSLVSDVVRPKTQGTDLKTSSHPEMLHGMAPQQKHGQQYKTKSSYKAFAAIPTNTLLLEQKALDEPAKTESVSKDNTLEPPVETPTTLPRAAGRETKYANLSSPSSTVSESQLTKPGVIRPVPVKSRILLKKEEEVYEPNPFSKYLE

SEQ ID NO: 53553 - protein, 329 aa, Homo sapiens
  Payload ID: 10633
  Gene Symbol: MLIP
  Gene Name: muscular LMNA-interacting protein
  ENSP ID: ENSP00000421444
CGNNYFQMTSCILSGSIQTTPQVSAGGSEAKPLIFTFVPTVRRLPTHTQLADTSKFLVKIPEESSDKSPETVNRSKSNDYLTLNAGSQQERDQAKLTCPSEVSGTILQEREFEANKLQGMQQSDLFKAEYVLIVDSEGEDEAASRKVEQGPPGGIGTAAVRPKSLAISSSLVSDVVRPKTQGTDLKTSSHPEMLHGMAPQQKHGQALDEPAKTESVSKDNTLEPPVETPTTLPRAAGRETKYANLSSPSSTVSESQLTKPGVIRPVPVKSRILLKKEEEVYEPNPFSKYLEDNSDLFSEQDVTVPPKPVSLHPLYQTKLYPPAKSLLHP

SEQ ID NO: 53554 - protein, 3 aa, Homo sapiens
  Payload ID: 10633
  Gene Symbol: MLIP
  Gene Name: muscular LMNA-interacting protein
  ENSP ID: ENSP00000421727
MQQ

SEQ ID NO: 53555 - protein, 110 aa, Homo sapiens
  Payload ID: 10633
  Gene Symbol: MLIP
  Gene Name: muscular LMNA-interacting protein
  ENSP ID: ENSP00000423191
MSTPSPTMAACLRLDACQQESTVLEPGSPDFADESTLKCASFWKVNHVITSKSNDYLTLNAGSQQERDQAKLTCPSEVSGTILQEREFEANKLQGMQQSDLFKAEYVLIV

SEQ ID NO: 53556 - protein, 915 aa, Homo sapiens
  Payload ID: 10633
  Gene Symbol: MLIP
  Gene Name: muscular LMNA-interacting protein
  Uniprot ID: Q5VWP3
  ENSP ID: ENSP00000425142
MELEKREKRSLLNKNLEEKLTVSAGGSEAKPLIFTFVPTVRRLPTHTQLADTSKFLVKIPEESSDKSPETVNRSKSNDYLTLNAGSQQERDQAKLTCPSEVSGTILQEREFEANKLQGMQQSDLFKAEYVLIVDSEGEDEAASRKVEQGPPGGIGTAAVRPKSLAISSSLVSDVVRPKTQGTDLKTSSHPEMLHGMAPQQKHGQLTSSPTTSEQLACKPPAFSFVSPTNPNTPPDPVNLEGASVLEEFHTRRLDVGGAVVEESATYFQTTAHSTPFSASKGTSSTLLFPHSTQLSGSNLPSSTAADPKPGLTSEVLKKTTLTSHVLSHGESPRTSSSPPSSSASLKSNSASYIPVRIVTHSLSPSPKPFTSSFHGSSSTICSQMSSSGNLSKSGVKSPVPSRLALLTAILKSNPSHQRPFSPASCPTFSLNSPASSTLTLDQKEKQTPPTPKKSLSSCSLRAGSPDQGELQVSELTQQSFHLPVFTKSTPLSQAPSLSPTKQASSSLASMNVERTPSPTLKSNTMLSLLQTSTSSSVGLPPVPPSSSLSSLKSKQDGDLRGPENPRNIHTYPSTLASSALSSLSPPINQRATFSSSEKCFHPSPALSSLINRSKRASSQLSGQELNPSALPSLPVSSADFASLPNLRSSSLPHANLPTLVPQLSPSALHPHCGSGTLPSRLGKSESTTPNHRSPVSTPSLPISLTRTEELISPCALSMSTGPENKKSKQYKTKSSYKAFAAIPTNTLLLEQKALDEPAKTESVSKDNTLEPPVELYFPAQLRQQTEELCATIDKVLQDSLSMHSSDSPSRSPKTLLGSDTVKTPTTLPRAAGRETKYANLSSPSSTVSESQLTKPGVIRPVPVKSRILLKKEEEVYEPNPFSKYLEDNSDLFSEQAAHSVDSYCNGSDTSGPWLL

SEQ ID NO: 53557 - protein, 993 aa, Homo sapiens
  Payload ID: 10633
  Gene Symbol: MLIP
  Gene Name: muscular LMNA-interacting protein
  Uniprot ID: Q5VWP3
  ENSP ID: ENSP00000426290
MLSEQGLLSDCGNNYFQMTSCILSGSIQTTPQVSAGGSEAKPLIFTFVPTVRRLPTHTQLADTSKFLVKIPEESSDKSPETVNRSKSNDYLTLNAGSQQERDQAKLTCPSEVSGTILQEREFEANKLQGMQQSDLFKAEYVLIVDSEGEDEAASRKVEQGPPGGIGTAAVRPKSLAISSSLVSDVVRPKTQGTDLKTSSHPEMLHGMAPQQKHGQLTSSPTTSEQLACKPPAFSFVSPTNPNTPPDPVNLEGASVLEEFHTRRLDVGGAVVEESATYFQTTAHSTPFSASKGTSSTLLFPHSTQLSGSNLPSSTAADPKPGLTSEVLKKTTLTSHVLSHGESPRTSSSPPSSSASLKSNSASYIPVRIVTHSLSPSPKPFTSSFHGSSSTICSQMSSSGNLSKSGVKSPVPSRLALLTAILKSNPSHQRPFSPASCPTFSLNSPASSTLTLDQKEKQTPPTPKKSLSSCSLRAGSPDQGELQVSELTQQSFHLPVFTKSTPLSQAPSLSPTKQASSSLASMNVERTPSPTLKSNTMLSLLQTSTSSSVGLPPVPPSSSLSSLKSKQDGDLRGPENPRNIHTYPSTLASSALSSLSPPINQRATFSSSEKCFHPSPALSSLINRSKRASSQLSGQELNPSALPSLPVSSADFASLPNLRSSSLPHANLPTLVPQLSPSALHPHCGSGTLPSRLGKSESTTPNHRSPVSTPSLPISLTRTEELISPCALSMSTGPENKKSKQYKTKSSYKAFAAIPTNTLLLEQKALDEPAKTESVSKDNTLEPPVELYFPAQLRQQTEELCATIDKVLQDSLSMHSSDSPSRSPKTLLGSDTVKTPTTLPRAAGRETKYANLSSPSSTVSESQLTKPGVIRPVPVKSRILLKKEEEVYEPNPFSKYLEDNSDLFSEQDVTVPPKPVSLHPLYQTKLYPPAKSLLHPQTLSHADCLAPGPFSHLSFSLSDEQENSHTLLSHNACNKLSHPMVAIPEHEALDSKEQ

SEQ ID NO: 53558 - protein, 561 aa, Homo sapiens
  Payload ID: 10633
  Gene Symbol: MLIP
  Gene Name: muscular LMNA-interacting protein
  ENSP ID: ENSP00000426830
MLSEQGLLSDCGNNYFQMTSCILSGSIQTTPQSKSNDYLTLNAGSQQERDQAKLTCPSEVSGTILQEREFEANKLQGMQQSDLFKAEYVLIVDSEGEDEAASRKVEQGPPGGIGTAAVRPKSLAISSSLVSDVVRPKTQGTDLKTSSHPEMLHGMAPQQKHGQLTSSPTTSEQLACKPPAFSFVSPTNPNTPPDPVNLEGASVLEEFHTRRLDVGGAVVEESATYFQTTAHSTPFSASKGTSSTLLFPHSTQLSGSNLPSSTAADPKPGLTSEVLKKTTLTSHVLSHGESPRTSSSPPSSSASLKSNSASYIPVRIVTHSLSPSPKPFTSSFHGSSSTICSQMSSSGNLSKSGVKSPVPSRLALLTAILKSNPSHQRPFSPASCPTFSLNSPASSTLTLDQKEKQTPPTPKKSLSSCSLRAGSPDQGELQVSELTQQSFHLPVFTKSTPLSQAPSLSPTKQASSSLASMNVERTPSPTLKSNTMLSLLQTSTSSSVGLPPVPPSSSLSSLKSKQDGDLRGPENPRNIHTYPSTLASSALSSLSPPINQRATFSSSEKCFHP

SEQ ID NO: 53559 - protein, 123 aa, Homo sapiens
  Payload ID: 10633
  Gene Symbol: MLIP
  Gene Name: muscular LMNA-interacting protein
  ENSP ID: ENSP00000427057
MQQSDLFKAEYVLIVDSEGEDEAASRKVEQGPPGGIGTAAVRPKSLAISSSLVSDVVRPKTQGTDLKTSSHPEMLHGMAPQQKHGQLTSSPTTSEQLACKPPAFSFVSPTNPNTPPDPVNLEG

SEQ ID NO: 53560 - protein, 226 aa, Homo sapiens
  Payload ID: 10633
  Gene Symbol: MLIP
  Gene Name: muscular LMNA-interacting protein
  ENSP ID: ENSP00000427584
MELEKREKRSLLNKNLEEKLTSKSNDYLTLNAGSQQERDQAKLTCPSEVSGTILQEREFEANKLQGMQQSDLFKAEYVLIVDSEGEDEAASRKVEQGPPGGIGTAAVRPKSLAISSSLVSDVVRPKTQGTDLKTSSHPEMLHGMAPQQKHGQTPTTLPRAAGRETKYANLSSPSSTVSESQLTKPGVIRPVPVKSRILLKKEEEVYEPNPFSKYLEDNSDLFSEQQ

SEQ ID NO: 53561 - protein, 206 aa, Homo sapiens
  Payload ID: 10634
  Gene Symbol: MSC
  Gene Name: musculin
  Uniprot ID: O60682
  ENSP ID: ENSP00000321445
MSTGSVSDPEEMELRGLQREYPVPASKRPPLRGVERSYASPSDNSSAEEEDPDGEEERCALGTAGSAEGCKRKRPRVAGGGGAGGSAGGGGKKPLPAKGSAAECKQSQRNAANARERARMRVLSKAFSRLKTSLPWVPPDTKLSKLDTLRLASSYIAHLRQLLQEDRYENGYVHPVNLTWPFVVSGRPDSDTKEVSAANRLCGTTA

SEQ ID NO: 53562 - protein, 82 aa, Homo sapiens
  Payload ID: 10635
  Gene Symbol: MUSTN1
  Gene Name: musculoskeletal, embryonic nuclear protein 1
  Uniprot ID: Q8IVN3
  ENSP ID: ENSP00000410910
MSQAGAQEAPIKKKRPPVKDEDLKGARGNLTKNQEIKSKTYQVMRECEQAGSAAPSVFSRTRTGTETVFEKPKAGPTKSVFG

SEQ ID NO: 53563 - protein, 87 aa, Homo sapiens
  Payload ID: 10635
  Gene Symbol: MUSTN1
  Gene Name: musculoskeletal, embryonic nuclear protein 1
  ENSP ID: ENSP00000419877
MWLWWYSTAGAQEAPIKKKRPPVKDEDLKGARGNLTKNQEIKSKTYQVMRECEQAGSAAPSVFSRTRTGTETVFEKPKAGPTKSVFG

SEQ ID NO: 53564 - protein, 735 aa, Homo sapiens
  Payload ID: 10636
  Gene Symbol: MKLN1
  Gene Name: muskelin 1, intracellular mediator containing kelch motifs
  Uniprot ID: Q9UL63
  ENSP ID: ENSP00000323527
MAAGGAVAAAPECRLLPYALHKWSSFSSTYLPENILVDKPNDQSSRWSSESNYPPQYLILKLERPAIVQNITFGKYEKTHVCNLKKFKVFGGMNEENMTELLSSGLKNDYNKETFTLKHKIDEQMFPCRFIKIVPLLSWGPSFNFSIWYVELSGIDDPDIVQPCLNWYSKYREQEAIRLCLKHFRQHNYTEAFESLQKKTKIALEHPMLTDIHDKLVLKGDFDACEELIEKAVNDGLFNQYISQQEYKPRWSQIIPKSTKGDGEDNRPGMRGGHQMVIDVQTETVYLFGGWDGTQDLADFWAYSVKENQWTCISRDTEKENGPSARSCHKMCIDIQRRQIYTLGRYLDSSVRNSKSLKSDFYRYDIDTNTWMLLSEDTAADGGPKLVFDHQMCMDSEKHMIYTFGGRILTCNGSVDDSRASEPQFSGLFAFNCQCQTWKLLREDSCNAGPEDIQSRIGHCMLFHSKNRCLYVFGGQRSKTYLNDFFSYDVDSDHVDIISDGTKKDSGMVPMTGFTQRATIDPELNEIHVLSGLSKDKEKREENVRNSFWIYDIVRNSWSCVYKNDQAAKDNPTKSLQEEEPCPRFAHQLVYDELHKVHYLFGGNPGKSCSPKMRLDDFWSLKLCRPSKDYLLRHCKYLIRKHRFEEKAQVDPLSALKYLQNDLYITVDHSDPEETKEFQLLASALFKSGSDFTALGFSDVDHTYAQRTQLFDTLVNFFPDSMTPPKGNLVDLITL

SEQ ID NO: 53565 - protein, 126 aa, Homo sapiens
  Payload ID: 10636
  Gene Symbol: MKLN1
  Gene Name: muskelin 1, intracellular mediator containing kelch motifs
  ENSP ID: ENSP00000387920
MNEENMTELLSSGLKNDYNKETFTLKHKIDEQMFPCRFIKIVPLLSWGPSFNFSIWYVELSGIDDPDIVQPCLNWYSKYREQEAIRLCLKHFRQHNYTEAFESLQKKTKIALEHPMLTDIHDKLVL

SEQ ID NO: 53566 - protein, 643 aa, Homo sapiens
  Payload ID: 10636
  Gene Symbol: MKLN1
  Gene Name: muskelin 1, intracellular mediator containing kelch motifs
  ENSP ID: ENSP00000398094
MNEENMTELLSSGLKNDYNKETFTLKHKIDEQMFPCRFIKIVPLLSWGPSFNFSIWYVELSGIDDPDIVQPCLNWYSKYREQEAIRLCLKHFRQHNYTEAFESLQKKTKIALEHPMLTDIHDKLVLKGDFDACEELIEKAVNDGLFNQYISQQEYKPRWSQIIPKSTKGDGEDNRPGMRGGHQMVIDVQTETVYLFGGWDGTQDLADFWAYSVKENQWTCISRDTEKENGPSARSCHKMCIDIQRRQIYTLGRYLDSSVRNSKSLKSDFYRYDIDTNTWMLLSEDTAADGGPKLVFDHQMCMDSEKHMIYTFGGRILTCNGSVDDSRASEPQFSGLFAFNCQCQTWKLLREDSCNAGPEDIQSRIGHCMLFHSKNRCLYVFGGQRSKTYLNDFFSYDVDSDHVDIISDGTKKDSGMVPMTGFTQRATIDPELNEIHVLSGLSKDKEKREENVRNSFWIYDIVRNSWSCVYKNDQAAKDNPTKSLQEEEPCPRFAHQLVYDELHKVHYLFGGNPGKSCSPKMRLDDFWSLKLCRPSKDYLLRHCKYLIRKHRFEEKAQVDPLSALKYLQNDLYITVDHSDPEETKEFQLLASALFKSGSDFTALGFSDVDHTYAQRTQLFDTLVNFFPDSMTPPKGNLVDLITL

SEQ ID NO: 53567 - protein, 78 aa, Homo sapiens
  Payload ID: 10636
  Gene Symbol: MKLN1
  Gene Name: muskelin 1, intracellular mediator containing kelch motifs
  ENSP ID: ENSP00000399954
MNEENMTELLSSGLKNDYNKETFTLKHKIDEQMFPCRFIKIVPLLSWGPSFNFSIWYVELSGIDDPDIVQPCLNWYSK

SEQ ID NO: 53568 - protein, 170 aa, Homo sapiens
  Payload ID: 10636
  Gene Symbol: MKLN1
  Gene Name: muskelin 1, intracellular mediator containing kelch motifs
  ENSP ID: ENSP00000407705
MAAGGAVAAAPECRLLPYALHKWSSFSSTYLPENILVDKPNDQSSRWSSESNYPPQYLILKLERPAIVQNITFGKYEKTHVCNLKKFKVFGGMNEENMTELLSSGLKNDYNKETFTLKHKIDEQMFPCRFIKIVPLLSWGPSFNFSIWYVELSGIDDPDIVQPCLNWYSK

SEQ ID NO: 53569 - protein, 97 aa, Homo sapiens
  Payload ID: 10636
  Gene Symbol: MKLN1
  Gene Name: muskelin 1, intracellular mediator containing kelch motifs
  ENSP ID: ENSP00000412815
MNEENMTELLSSGLKNDYNKETFTLKHKIDEQMFPCRFIKIVPLLSWGPSFNFSIWYVELSGIDDPDIVQPCLNWYSKYREQEAIRLCLKHFRQHNY

SEQ ID NO: 53570 - protein, 829 aa, Homo sapiens
  Payload ID: 10637
  Gene Symbol: MCC
  Gene Name: mutated in colorectal cancers
  Uniprot ID: P23508
  ENSP ID: ENSP00000305617
MNSGVAMKYGNDSSAELSELHSAALASLKGDIVELNKRLQQTERERDLLEKKLAKAQCEQSHLMREHEDVQERTTLRYEERITELHSVIAELNKKIDRLQGTTIREEDEYSELRSELSQSQHEVNEDSRSMDQDQTSVSIPENQSTMVTADMDNCSDLNSELQRVLTGLENVVCGRKKSSCSLSVAEVDKHIEQLTTASEHCDLAIKTVEEIEGVLGRDLYPNLAEERSRWEKELAGLREENESLTAMLCSKEEELNRTKATMNAIREERDRLRRRVRELQTRLQSVQATGPSSPGRLTSTNRPINPSTGELSTSSSSNDIPIAKIAERVKLSKTRSESSSSDRPVLGSEISSIGVSSSVAEHLAHSLQDCSNIQEIFQTLYSHGSAISESKIREFEVETERLNSRIEHLKSQNDLLTITLEECKSNAERMSMLVGKYESNATALRLALQYSEQCIEAYELLLALAESEQSLILGQFRAAGVGSSPGDQSGDENITQMLKRAHDCRKTAENAAKALLMKLDGSCGGAFAVAGCSVQPWESLSSNSHTSTTSSTASSCDTEFTKEDEQRLKDYIQQLKNDRAAVKLTMLELESIHIDPLSYDVKPRGDSQRLDLENAVLMQELMAMKEEMAELKAQLYLLEKEKKALELKLSTREAQEQAYLVHIEHLKSEVEEQKEQRMRSLSSTSSGSKDKPGKECADAASPALSLAELRTTCSENELAAEFTNAIRREKKLKARVQELVSALERLTKSSEIRHQQSAEFVNDLKRANSNLVAAYEKAKKKHQNKLKKLESQMMAMVERHETQVRMLKQRIALLEEENSRPHTNETSL

SEQ ID NO: 53571 - protein, 1019 aa, Homo sapiens
  Payload ID: 10637
  Gene Symbol: MCC
  Gene Name: mutated in colorectal cancers
  Uniprot ID: P23508
  ENSP ID: ENSP00000386227
MMAAAAAAAAGSSSSGGGGGGSGSSSSSSDTSSTGEEERMRRLFQTCDGDGDGYISRNDLLMVCRQLNMEESVAEIMNQLGADENGKISFQDFTRCRMQLVREIRKEEVDLSAKSDNSCTKKLRDRIASWPTSSDNSLGALSAARESWEYDSGARDLQSPDVQSQSALQKLLEYGGSSLHQQAALHKLLTQSPHIGNSVGGSYLELANTLHSAALASLKGDIVELNKRLQQTERERDLLEKKLAKAQCEQSHLMREHEDVQERTTLRYEERITELHSVIAELNKKIDRLQGTTIREEDEYSELRSELSQSQHEVNEDSRSMDQDQTSVSIPENQSTMVTADMDNCSDLNSELQRVLTGLENVVCGRKKSSCSLSVAEVDKHIEQLTTASEHCDLAIKTVEEIEGVLGRDLYPNLAEERSRWEKELAGLREENESLTAMLCSKEEELNRTKATMNAIREERDRLRRRVRELQTRLQSVQATGPSSPGRLTSTNRPINPSTGELSTSSSSNDIPIAKIAERVKLSKTRSESSSSDRPVLGSEISSIGVSSSVAEHLAHSLQDCSNIQEIFQTLYSHGSAISESKIREFEVETERLNSRIEHLKSQNDLLTITLEECKSNAERMSMLVGKYESNATALRLALQYSEQCIEAYELLLALAESEQSLILGQFRAAGVGSSPGDQSGDENITQMLKRAHDCRKTAENAAKALLMKLDGSCGGAFAVAGCSVQPWESLSSNSHTSTTSSTASSCDTEFTKEDEQRLKDYIQQLKNDRAAVKLTMLELESIHIDPLSYDVKPRGDSQRLDLENAVLMQELMAMKEEMAELKAQLYLLEKEKKALELKLSTREAQEQAYLVHIEHLKSEVEEQKEQRMRSLSSTSSGSKDKPGKECADAASPALSLAELRTTCSENELAAEFTNAIRREKKLKARVQELVSALERLTKSSEIRHQQSAEFVNDLKRANSNLVAAYEKAKKKHQNKLKKLESQMMAMVERHETQVRMLKQRIALLEEENSRPHTNETSL

SEQ ID NO: 53572 - protein, 766 aa, Homo sapiens
  Payload ID: 10637
  Gene Symbol: MCC
  Gene Name: mutated in colorectal cancers
  ENSP ID: ENSP00000421615
MREHEDVQERTTLRYEERITELHSVIAELNKKIDRLQGTTIREEDEYSELRSELSQSQHEVNEDSRSMDQDQTSVSIPENQSTMVTADMDNCSDLNSELQRVLTGLENVVCGRKKSSCSLSVAEVDKHIEQLTTASEHCDLAIKTVEEIEGVLGRDLYPNLAEERSRWEKELAGLREENESLTAMLCSKEEELNRTKATMNAIREERDRLRRRVRELQTRLQSVQATGPSSPGRLTSTNRPINPSTGELSTSSSSNDIPIAKIAERVKLSKTRSESSSSDRPVLGSEISSIGVSSSVAEHLAHSLQDCSNIQEIFQTLYSHGSAISESKIREFEVETERLNSRIEHLKSQNDLLTITLEECKSNAERMSMLVGKYESNATALRLALQYSEQCIEAYELLLALAESEQSLILGQFRAAGVGSSPGDQSGDENITQMLKRAHDCRKTAENAAKALLMKLDGSCGGAFAVAGCSVQPWESLSSNSHTSTTSSTASSCDTEFTKEDEQRLKDYIQQLKNDRAAVKLTMLELESIHIDPLSYDVKPRGDSQRLDLENAVLMQELMAMKEEMAELKAQLYLLEKEKKALELKLSTREAQEQAYLVHIEHLKSEVEEQKEQRMRSLSSTSSGSKDKPGKECADAASPALSLAELRTTCSENELAAEFTNAIRREKKLKARVQELVSALERLTKSSEIRHQQSAEFVNDLKRANSNLVAAYEKAKKKHQNKLKKLESQMMAMVERHETQVRMLKQRIALLEEENSRPHTNETSL

SEQ ID NO: 53573 - protein, 715 aa, Homo sapiens
  Payload ID: 10637
  Gene Symbol: MCC
  Gene Name: mutated in colorectal cancers
  ENSP ID: ENSP00000485220
MNSGVAMKYGNDSSAELSELHSAALASLKGDIVELNKRLQQTERERDLLEKKLAKAQCEQSHLMREHEDVQERTTLRYEERITELHSVIAELNKKIDRLQGTTIREEDEYSELRSELSQSQHEVNEDSRSMDQDQTSVSIPENQSTMVTADMDNCSDLNSELQRVLTGLENVVCGRKKSSCSLSVAEVDKHIEQLTTASEHCDLAIKTVEEIEGVLGRDLYPNLAEERSRWEKELAGLREENESLTAMLCSKEEELNRTKATMNAIREERDRLRRRVRELQTRLQSVQATGPSSPGRLTSTNRPINPSTGELSTSSSSNDIPIAKIAERVKLSKTRSESSSSDRPVLGSEISSIGVSSSVAEHLAHSLQDCSNIQEIFQTLYSHGSAISESKIREFEVETERLNSRIEHLKSQNDLLTITLEECKSNAERMSMLVGKYESNATALRLALQYSEQCIEAYELLLALAESEQSLILGQFRAAGVGSSPGDQSGDENITQMLKRAHDCRKTAENAAKALLMKLDGSCGGAFAVAGCSVQPWESLSSNSHTSTTSSTASSCDTEFTKEDEQRLKDYIQQLKNDRAAVKLTMLELESIHIDPLSYDVKPRGDSQRLDLENAVLMQELMAMKEEMAELKAQLYLLEKEKKALELKLSTREAQEQAYLVHIEHLKSEVEEQKEQRMRSLSSTSSGSKDKPGKVGPEWLGDTLRLSDCPVTAQ

SEQ ID NO: 53574 - protein, 169 aa, Homo sapiens
  Payload ID: 10637
  Gene Symbol: MCC
  Gene Name: mutated in colorectal cancers
  ENSP ID: ENSP00000485492
  MOD_RES (1)..(1): Any amino acid
XVAGCSVQPWESLSSNSHTSTTSSTASSCDTEFTKEDEQRLKDYIQQLKNDRAAVKLTMLELESIHIDPLSYDVKPRGDSQRLDLENAVLMQELMAMKEEMAELKAQLYLLEKEKKALELKLSTREAQEQAYLVHIEHLKSEVEEQKEQRMRSLSSTSSGSKDKPGKVI

SEQ ID NO: 53575 - protein, 756 aa, Homo sapiens
  Payload ID: 10638
  Gene Symbol: MLH1
  Gene Name: mutL homolog 1
  Uniprot ID: P40692
  ENSP ID: ENSP00000231790
MSFVAGVIRRLDETVVNRIAAGEVIQRPANAIKEMIENCLDAKSTSIQVIVKEGGLKLIQIQDNGTGIRKEDLDIVCERFTTSKLQSFEDLASISTYGFRGEALASISHVAHVTITTKTADGKCAYRASYSDGKLKAPPKPCAGNQGTQITVEDLFYNIATRRKALKNPSEEYGKILEVVGRYSVHNAGISFSVKKQGETVADVRTLPNASTVDNIRSIFGNAVSRELIEIGCEDKTLAFKMNGYISNANYSVKKCIFLLFINHRLVESTSLRKAIETVYAAYLPKNTHPFLYLSLEISPQNVDVNVHPTKHEVHFLHEESILERVQQHIESKLLGSNSSRMYFTQTLLPGLAGPSGEMVKSTTSLTSSSTSGSSDKVYAHQMVRTDSREQKLDAFLQPLSKPLSSQPQAIVTEDKTDISSGRARQQDEEMLELPAPAEVAAKNQSLEGDTTKGTSEMSEKRGPTSSNPRKRHREDSDVEMVEDDSRKEMTAACTPRRRIINLTSVLSLQEEINEQGHEVLREMLHNHSFVGCVNPQWALAQHQTKLYLLNTTKLSEELFYQILIYDFANFGVLRLSEPAPLFDLAMLALDSPESGWTEEDGPKEGLAEYIVEFLKKKAEMLADYFSLEIDEEGNLIGLPLLIDNYVPPLEGLPIFILRLATEVNWDEEKECFESLSKECAMFYSIRKQYISEESTLSGQQSEVPGSIPNSWKWTVEHIVYKALRSHILPPKHFTEDGNILQLANLPDLYKVFERC

SEQ ID NO: 53576 - protein, 38 aa, Homo sapiens
  Payload ID: 10638
  Gene Symbol: MLH1
  Gene Name: mutL homolog 1
  ENSP ID: ENSP00000387511
MSFVAGVIRRLDETVVNRIAAGEVIQRPANAIKEMIEN

SEQ ID NO: 53577 - protein, 38 aa, Homo sapiens; identical to SEQ ID NO: 53576
  Payload ID: 10638
  Gene Symbol: MLH1
  Gene Name: mutL homolog 1
  ENSP ID: ENSP00000392649

SEQ ID NO: 53578 - protein, 61 aa, Homo sapiens
  Payload ID: 10638
  Gene Symbol: MLH1
  Gene Name: mutL homolog 1
  ENSP ID: ENSP00000393006
EKRGPTSSNPRKRHREDSDVEMVEDDSRKEMTAACTPRRRIINLTSVLSLQEEINEQGHEE

SEQ ID NO: 53579 - protein, 515 aa, Homo sapiens
  Payload ID: 10638
  Gene Symbol: MLH1
  Gene Name: mutL homolog 1
  Uniprot ID: P40692
  ENSP ID: ENSP00000398272
MNGYISNANYSVKKCIFLLFINHRLVESTSLRKAIETVYAAYLPKNTHPFLYLSLEISPQNVDVNVHPTKHEVHFLHEESILERVQQHIESKLLGSNSSRMYFTQTLLPGLAGPSGEMVKSTTSLTSSSTSGSSDKVYAHQMVRTDSREQKLDAFLQPLSKPLSSQPQAIVTEDKTDISSGRARQQDEEMLELPAPAEVAAKNQSLEGDTTKGTSEMSEKRGPTSSNPRKRHREDSDVEMVEDDSRKEMTAACTPRRRIINLTSVLSLQEEINEQGHEVLREMLHNHSFVGCVNPQWALAQHQTKLYLLNTTKLSEELFYQILIYDFANFGVLRLSEPAPLFDLAMLALDSPESGWTEEDGPKEGLAEYIVEFLKKKAEMLADYFSLEIDEEGNLIGLPLLIDNYVPPLEGLPIFILRLATEVNWDEEKECFESLSKECAMFYSIRKQYISEESTLSGQQSEVPGSIPNSWKWTVEHIVYKALRSHILPPKHFTEDGNILQLANLPDLYKVFERC

SEQ ID NO: 53580 - protein, 105 aa, Homo sapiens
  Payload ID: 10638
  Gene Symbol: MLH1
  Gene Name: mutL homolog 1
  ENSP ID: ENSP00000398392
MNGYISNANYSVKKCIFLLFINHRLVESTSLRKAIETVYAAYLPKNTHPFLYLSLEISPQNVDVNVHPTKHEVHFLHEESILERVQQHIESKLLGSNSSRMYFTQ

SEQ ID NO: 53581 - protein, 58 aa, Homo sapiens
  Payload ID: 10638
  Gene Symbol: MLH1
  Gene Name: mutL homolog 1
  ENSP ID: ENSP00000399329
  MOD_RES (1)..(1): Any amino acid
XPNASTVDNIRSIFGNAVSRELIEIGCEDKTLAFKMNGYISNANYSVKKCIFLLFINL

SEQ ID NO: 53582 - protein, 52 aa, Homo sapiens
  Payload ID: 10638
  Gene Symbol: MLH1
  Gene Name: mutL homolog 1
  ENSP ID: ENSP00000400844
  MOD_RES (1)..(1): Any amino acid
XELIEIGCEDKTLAFKMNGYISNANYSVKKCIFLLFINHFATRTCWPLWGDG

SEQ ID NO: 53583 - protein, 658 aa, Homo sapiens
  Payload ID: 10638
  Gene Symbol: MLH1
  Gene Name: mutL homolog 1
  Uniprot ID: P40692
  ENSP ID: ENSP00000402564
MAFEALASISHVAHVTITTKTADGKCAYRASYSDGKLKAPPKPCAGNQGTQITVEDLFYNIATRRKALKNPSEEYGKILEVVGRYSVHNAGISFSVKKQGETVADVRTLPNASTVDNIRSIFGNAVSRELIEIGCEDKTLAFKMNGYISNANYSVKKCIFLLFINHRLVESTSLRKAIETVYAAYLPKNTHPFLYLSLEISPQNVDVNVHPTKHEVHFLHEESILERVQQHIESKLLGSNSSRMYFTQTLLPGLAGPSGEMVKSTTSLTSSSTSGSSDKVYAHQMVRTDSREQKLDAFLQPLSKPLSSQPQAIVTEDKTDISSGRARQQDEEMLELPAPAEVAAKNQSLEGDTTKGTSEMSEKRGPTSSNPRKRHREDSDVEMVEDDSRKEMTAACTPRRRIINLTSVLSLQEEINEQGHEVLREMLHNHSFVGCVNPQWALAQHQTKLYLLNTTKLSEELFYQILIYDFANFGVLRLSEPAPLFDLAMLALDSPESGWTEEDGPKEGLAEYIVEFLKKKAEMLADYFSLEIDEEGNLIGLPLLIDNYVPPLEGLPIFILRLATEVNWDEEKECFESLSKECAMFYSIRKQYISEESTLSGQQSEVPGSIPNSWKWTVEHIVYKALRSHILPPKHFTEDGNILQLANLPDLYKVFERC

SEQ ID NO: 53584 - protein, 515 aa, Homo sapiens; identical to SEQ ID NO: 53579
  Payload ID: 10638
  Gene Symbol: MLH1
  Gene Name: mutL homolog 1
  Uniprot ID: P40692
  ENSP ID: ENSP00000402667

SEQ ID NO: 53585 - protein, 83 aa, Homo sapiens
  Payload ID: 10638
  Gene Symbol: MLH1
  Gene Name: mutL homolog 1
  ENSP ID: ENSP00000407019
MAFEALASISHVAHVTITTKTADGKCAYRASYSDGKLKAPPKPCAGNQGTQITVEDLFYNIATRRKALKNPSEEYGKILEVVG

SEQ ID NO: 53586 - protein, 38 aa, Homo sapiens; identical to SEQ ID NO: 53576
  Payload ID: 10638
  Gene Symbol: MLH1
  Gene Name: mutL homolog 1
  ENSP ID: ENSP00000407773

SEQ ID NO: 53587 - protein, 95 aa, Homo sapiens
  Payload ID: 10638
  Gene Symbol: MLH1
  Gene Name: mutL homolog 1
  ENSP ID: ENSP00000411066
  MOD_RES (1)..(1): Any amino acid
XGNAVSRELIEIGCEDKTLAFKMNGYISNANYSVKKCIFLLFINHRLVESTSLRKAIETVYAAYLPKNTHPFLYLRLCYQDLLAPLGRWLNPQQV

SEQ ID NO: 53588 - protein, 114 aa, Homo sapiens
  Payload ID: 10638
  Gene Symbol: MLH1
  Gene Name: mutL homolog 1
  ENSP ID: ENSP00000416476
EKRGPTSSNPRKRHREDSDVEMVEDDSRKEMTAACTPRRRIINLTSVLSLQEEINEQGHEVLREMLHNHSFVGCVNPQWALAQHQTKLYLLNTTKLRVKCLAPFQTPGSGLWNT

SEQ ID NO: 53589 - protein, 679 aa, Homo sapiens
  Payload ID: 10638
  Gene Symbol: MLH1
  Gene Name: mutL homolog 1
  ENSP ID: ENSP00000416687
  MOD_RES (1)..(1): Any amino acid
XRLDETVVNRIAAGEVIQRPANAIKEMIENCLDAKSTSIQVIVKEGGLKLIQIQDNGTGIRKEDLDIVCERFTTSKLQSFEDLASISTYGFRGEALASISHVAHVTITTKTADGKCAYRASYSDGKLKAPPKPCAGNQGTQITVEDLFYNIATRRKALKNPSEEYGKILEVVGRYSVHNAGISFSVKKQGETVADVRTLPNASTVDNIRSIFGNAVSRELIEIGCEDKTLAFKMNGYISNANYSVKKCIFLLFINHRLVESTSLRKAIETVYAAYLPKNTHPFLYLSLEISPQNVDVNVHPTKHEVHFLHEESILERVQQHIESKLLGSNSSRMYFTQTLLPGLAGPSGEMVKSTTSLTSSSTSGSSDKVYAHQMVRTDSREQKLDAFLQPLSKPLSSQPQAIVTEDKTDISSGRARQQDEEMLELPAPAEVAAKNQSLEGDTTKGTSEMSEKRGPTSSNPRKRHREDSDVEMVEDDSRKEMTAACTPRRRIINLTSVLSLQEEINEQGHEVLREMLHNHSFVGCVNPQWALAQHQTKLYLLNTTKLSEELFYQILIYDFANFGVLRLSEPAPLFDLAMLALDSPESGWTEEDGPKEGLAEYIVEFLKKKAEMLADYFSLEIDESEVPGSIPNSWKWTVEHIVYKALRSHILPPKHFTEDGNILQLANLPDLYKVFERC

SEQ ID NO: 53590 - protein, 48 aa, Homo sapiens
  Payload ID: 10638
  Gene Symbol: MLH1
  Gene Name: mutL homolog 1
  ENSP ID: ENSP00000416783
MSFVAGVIRRLDETVVNRIAAGEVIQRPANAIKEMIENWYGGSRAGLT

SEQ ID NO: 53591 - protein, 515 aa, Homo sapiens; identical to SEQ ID NO: 53579
  Payload ID: 10638
  Gene Symbol: MLH1
  Gene Name: mutL homolog 1
  Uniprot ID: P40692
  ENSP ID: ENSP00000443665

SEQ ID NO: 53592 - protein, 515 aa, Homo sapiens; identical to SEQ ID NO: 53579
  Payload ID: 10638
  Gene Symbol: MLH1
  Gene Name: mutL homolog 1
  Uniprot ID: P40692
  ENSP ID: ENSP00000444286

SEQ ID NO: 53593 - protein, 223 aa, Homo sapiens
  Payload ID: 10638
  Gene Symbol: MLH1
  Gene Name: mutL homolog 1
  ENSP ID: ENSP00000480669
  MOD_RES (1)..(1): Any amino acid
XVTEDKTDISSGRARQQDEEMLELPAPAEVAAKNQSLEGDTTKGTSEMSEKRGPTSSNPRKRHREDSDVEMVEDDSRKEMTAACTPRRRIINLTSVLSLQEEINEQGHEVLREMLHNHSFVGCVNPQWALAQHQTKLYLLNTTKLSEELFYQILIYDFANFGVLRLSEPAPLFDLAMLALDSPESGWTEEDGPKEGLAEYIVEFLKKKAEMLADYFSLEIDEV

SEQ ID NO: 53594 - protein, 1453 aa, Homo sapiens
  Payload ID: 10639
  Gene Symbol: MLH3
  Gene Name: mutL homolog 3
  Uniprot ID: Q9UHC1
  ENSP ID: ENSP00000348020
MIKCLSVEVQAKLRSGLAISSLGQCVEELALNSIDAEAKCVAVRVNMETFQVQVIDNGFGMGSDDVEKVGNRYFTSKCHSVQDLENPRFYGFRGEALANIADMASAVEISSKKNRTMKTFVKLFQSGKALKACEADVTRASAGTTVTVYNLFYQLPVRRKCMDPRLEFEKVRQRIEALSLMHPSISFSLRNDVSGSMVLQLPKTKDVCSRFCQIYGLGKSQKLREISFKYKEFELSGYISSEAHYNKNMQFLFVNKRLVLRTKLHKLIDFLLRKESIICKPKNGPTSRQMNSSLRHRSTPELYGIYVINVQCQFCEYDVCMEPAKTLIEFQNWDTLLFCIQEGVKMFLKQEKLFVELSGEDIKEFSEDNGFSLFDATLQKRVTSDERSNFQEACNNILDSYEMFNLQSKAVKRKTTAENVNTQSSRDSEATRKNTNDAFLYIYESGGPGHSKMTEPSLQNKDSSCSESKMLEQETIVASEAGENEKHKKSFLEHSSLENPCGTSLEMFLSPFQTPCHFEESGQDLEIWKESTTVNGMAANILKNNRIQNQPKRFKDATEVGCQPLPFATTLWGVHSAQTEKEKKKESSNCGRRNVFSYGRVKLCSTGFITHVVQNEKTKSTETEHSFKNYVRPGPTRAQETFGNRTRHSVETPDIKDLASTLSKESGQLPNKKNCRTNISYGLENEPTATYTMFSAFQEGSKKSQTDCILSDTSPSFPWYRHVSNDSRKTDKLIGFSKPIVRKKLSLSSQLGSLEKFKRQYGKVENPLDTEVEESNGVTTNLSLQVEPDILLKDKNRLENSDVCKITTMEHSDSDSSCQPASHILNSEKFPFSKDEDCLEQQMPSLRESPMTLKELSLFNRKPLDLEKSSESLASKLSRLKGSERETQTMGMMSRFNELPNSDSSRKDSKLCSVLTQDFCMLFNNKHEKTENGVIPTSDSATQDNSFNKNSKTHSNSNTTENCVISETPLVLPYNNSKVTGKDSDVLIRASEQQIGSLDSPSGMLMNPVEDATGDQNGICFQSEESKARACSETEESNTCCSDWQRHFDVALGRMVYVNKMTGLSTFIAPTEDIQAACTKDLTTVAVDVVLENGSQYRCQPFRSDLVLPFLPRARAERTVMRQDNRDTVDDTVSSESLQSLFSEWDNPVFARYPEVAVDVSSGQAESLAVKIHNILYPYRFTKGMIHSMQVLQQVDNKFIACLMSTKTEENGEAGGNLLVLVDQHAAHERIRLEQLIIDSYEKQQAQGSGRKKLLSSTLIPPLEITVTEEQRRLLWCYHKNLEDLGLEFVFPDTSDSLVLVGKVPLCFVEREANELRRGRSTVTKSIVEEFIREQLELLQTTGGIQGTLPLTVQKVLASQACHGAIKFNDGLSLQESCRLIEALSSCQLPFQCAHGRPSMLPLADIDHLEQEKQIKPNLTKLRKMAQAWRLFGKAECDTRQSLQQSMPPCEPP

SEQ ID NO: 53595 - protein, 1429 aa, Homo sapiens
  Payload ID: 10639
  Gene Symbol: MLH3
  Gene Name: mutL homolog 3
  Uniprot ID: Q9UHC1
  ENSP ID: ENSP00000370355
MIKCLSVEVQAKLRSGLAISSLGQCVEELALNSIDAEAKCVAVRVNMETFQVQVIDNGFGMGSDDVEKVGNRYFTSKCHSVQDLENPRFYGFRGEALANIADMASAVEISSKKNRTMKTFVKLFQSGKALKACEADVTRASAGTTVTVYNLFYQLPVRRKCMDPRLEFEKVRQRIEALSLMHPSISFSLRNDVSGSMVLQLPKTKDVCSRFCQIYGLGKSQKLREISFKYKEFELSGYISSEAHYNKNMQFLFVNKRLVLRTKLHKLIDFLLRKESIICKPKNGPTSRQMNSSLRHRSTPELYGIYVINVQCQFCEYDVCMEPAKTLIEFQNWDTLLFCIQEGVKMFLKQEKLFVELSGEDIKEFSEDNGFSLFDATLQKRVTSDERSNFQEACNNILDSYEMFNLQSKAVKRKTTAENVNTQSSRDSEATRKNTNDAFLYIYESGGPGHSKMTEPSLQNKDSSCSESKMLEQETIVASEAGENEKHKKSFLEHSSLENPCGTSLEMFLSPFQTPCHFEESGQDLEIWKESTTVNGMAANILKNNRIQNQPKRFKDATEVGCQPLPFATTLWGVHSAQTEKEKKKESSNCGRRNVFSYGRVKLCSTGFITHVVQNEKTKSTETEHSFKNYVRPGPTRAQETFGNRTRHSVETPDIKDLASTLSKESGQLPNKKNCRTNISYGLENEPTATYTMFSAFQEGSKKSQTDCILSDTSPSFPWYRHVSNDSRKTDKLIGFSKPIVRKKLSLSSQLGSLEKFKRQYGKVENPLDTEVEESNGVTTNLSLQVEPDILLKDKNRLENSDVCKITTMEHSDSDSSCQPASHILNSEKFPFSKDEDCLEQQMPSLRESPMTLKELSLFNRKPLDLEKSSESLASKLSRLKGSERETQTMGMMSRFNELPNSDSSRKDSKLCSVLTQDFCMLFNNKHEKTENGVIPTSDSATQDNSFNKNSKTHSNSNTTENCVISETPLVLPYNNSKVTGKDSDVLIRASEQQIGSLDSPSGMLMNPVEDATGDQNGICFQSEESKARACSETEESNTCCSDWQRHFDVALGRMVYVNKMTGLSTFIAPTEDIQAACTKDLTTVAVDVVLENGSQYRCQPFRSDLVLPFLPRARAERTVMRQDNRDTVDDTVSSESLQSLFSEWDNPVFARYPEVAVDVSSGQAESLAVKIHNILYPYRFTKGMIHSMQVLQQVDNKFIACLMSTKTEENGEADSYEKQQAQGSGRKKLLSSTLIPPLEITVTEEQRRLLWCYHKNLEDLGLEFVFPDTSDSLVLVGKVPLCFVEREANELRRGRSTVTKSIVEEFIREQLELLQTTGGIQGTLPLTVQKVLASQACHGAIKFNDGLSLQESCRLIEALSSCQLPFQCAHGRPSMLPLADIDHLEQEKQIKPNLTKLRKMAQAWRLFGKAECDTRQSLQQSMPPCEPP

SEQ ID NO: 53596 - protein, 199 aa, Homo sapiens
  Payload ID: 10639
  Gene Symbol: MLH3
  Gene Name: mutL homolog 3
  ENSP ID: ENSP00000450647
  MOD_RES (1)..(1): Any amino acid
XMNPVEDATGDQNGICFQSEESKARACSETEESNTCCSDWQRHFDVALGRMVYVNKMTGLSTFIAPTEDIQAACTKDLTTVAVDVVLENGSQYRCQPFRSDLVLPFLPRARAERTVMRQDNRDTVDDTVSSESLQSLFSEWDNPVFARYPEVLQQVDNKFIACLMSTKTEENGEAAELMMLQDPCCRQSREDENHEFSL

SEQ ID NO: 53597 - protein, 124 aa, Homo sapiens
  Payload ID: 10639
  Gene Symbol: MLH3
  Gene Name: mutL homolog 3
  ENSP ID: ENSP00000451055
EFIREQLELLQTTGGIQGTLPLTVQKVLASQACHGAIKFNDGLSLQESCRLIEALSSCQLPFQCAHGRPSMLPLADIDHLEQEKQIKPNLTKLRKMAQAWRLFGKAECDTRQSLQQSMPPCEPP

SEQ ID NO: 53598 - protein, 106 aa, Homo sapiens
  Payload ID: 10639
  Gene Symbol: MLH3
  Gene Name: mutL homolog 3
  ENSP ID: ENSP00000451095
MIKCLSVEVQAKLRSGLAISSLGQCVEELALNSIDAEAKCVAVRVNMETFQVQVIDNGFGMGSDDVEKVGNRYFTSKCHSVQDLENPRFYGFRGEALANIADMASA

SEQ ID NO: 53599 - protein, 477 aa, Homo sapiens
  Payload ID: 10639
  Gene Symbol: MLH3
  Gene Name: mutL homolog 3
  ENSP ID: ENSP00000451130
  MOD_RES (1)..(1): Any amino acid
XNSFNKNSKTHSNSNTTENCVISETPLVLPYNNSKVTGKDSDVLIRASEQQIGSLDSPSGMLMNPVEDATGDQNGICFQSEESKARACSETEESNTCCSDWQRHFDVALGRMVYVNKMTGLSTFIAPTEDIQAACTKDLTTVAVDVVLENDTVDDTVSSESLQSLFSEWDNPVFARYPEVAVDVSSGQAESLAVKIHNILYPYRFTKGMIHSMQVLQQVDNKFIACLMSTKTEENGEAGGNLLVLVDQHAAHERIRLEQLIIDSYEKQQAQGSGRKKLLSSTLIPPLEITVTEEQRRLLWCYHKNLEDLGLEFVFPDTSDSLVLVGKVPLCFVEREANELRRGRSTVTKSIVEEFIREQLELLQTTGGIQGTLPLTVQKVLASQACHGAIKFNDGLSLQESCRLIEALSSCQLPFQCAHGRPSMLPLADIDHLEQEKQIKPNLTKLRKMAQAWRLFGKAECDTRQSLQQSMPPCEPP

SEQ ID NO: 53600 - protein, 162 aa, Homo sapiens
  Payload ID: 10639
  Gene Symbol: MLH3
  Gene Name: mutL homolog 3
  ENSP ID: ENSP00000451192
MIKCLSVEVQAKLRSGLAISSLGQCVEELALNSIDAEAKCVAVRVNMETFQVQVIDNGFGMGSDDVEKVGNRYFTSKCHSVQDLENPRFYGFRGEALANIADMASAVEISSKKNRTMKTFVKLFQSGKALKACEADVTRASAGTTVTVYNLFYQLPVRRKCM

SEQ ID NO: 53601 - protein, 1275 aa, Homo sapiens
  Payload ID: 10639
  Gene Symbol: MLH3
  Gene Name: mutL homolog 3
  ENSP ID: ENSP00000451540
MIKCLSVEVQAKLRSGLAISSLGQCVEELALNSIDAEAKCVAVRVNMETFQVQVIDNGFGMGSDDVEKVGNRYFTSKCHSVQDLENPRFYGFRGEALANIADMASAVEISSKKNRTMKTFVKLFQSGKALKACEADVTRASAGTTVTVYNLFYQLPVRRKCMDPRLEFEKVRQRIEALSLMHPSISFSLRNDVSGSMVLQLPKTKDVCSRFCQIYGLGKSQKLREISFKYKEFELSGYISSEAHYNKNMQFLFVNKRLVLRTKLHKLIDFLLRKESIICKPKNGPTSRQMNSSLRHRSTPELYGIYVINVQCQFCEYDVCMEPAKTLIEFQNWDTLLFCIQEGVKMFLKQEKLFVELSGEDIKEFSEDNGFSLFDATLQKRVTSDERSNFQEACNNILDSYEMFNLQSKAVKRKTTAENVNTQSSRDSEATRKNTNDAFLYIYESGGPGHSKMTEPSLQNKDSSCSESKMLEQETIVASEAGENEKHKKSFLEHSSLENPCGTSLEMFLSPFQTPCHFEESGQDLEIWKESTTVNGMAANILKNNRIQNQPKRFKDATEVGCQPLPFATTLWGVHSAQTEKEKKKESSNCGRRNVFSYGRVKLCSTGFITHVVQNEKTKSTETEHSFKNYVRPGPTRAQETFGNRTRHSVETPDIKDLASTLSKESGQLPNKKNCRTNISYGLENEPTATYTMFSAFQEGSKKSQTDCILSDTSPSFPWYRHVSNDSRKTDKLIGFSKPIVRKKLSLSSQLGSLEKFKRQYGKVENPLDTEVEESNGVTTNLSLQVEPDILLKDKNRLENSDVCKITTMEHSDSDSSCQPASHILNSEKFPFSKDEDCLEQQMPSLRESPMTLKELSLFNRKPLDLEKSSESLASKLSRLKGSERETQTMGMMSRFNELPNSDSSRKDSKLCSVLTQDFCMLFNNKHEKTENGVIPTSDSATQDNSFNKNSKTHSNSNTTENCVISETPLVLPYNNSKVTGKDSDVLIRASEQQIGSLDSPSGMLMNPVEDATGDQNGICFQSEESKARACSETEESNTCCSDWQRHFDVALGRMVYVNKMTGLSTFIAPTEDIQAACTKDLTTVAVDVVLENGYLFRCYHKNLEDLGLEFVFPDTSDSLVLVGKVPLCFVEREANELRRGRSTVTKSIVEEFIREQLELLQTTGGIQGTLPLTVQKVLASQACHGAIKFNDGLSLQESCRLIEALSSCQLPFQCAHGRPSMLPLADIDHLEQEKQIKPNLTKLRKMAQAWRLFGKAECDTRQSLQQSMPPCEPP

SEQ ID NO: 53602 - protein, 107 aa, Homo sapiens
  Payload ID: 10639
  Gene Symbol: MLH3
  Gene Name: mutL homolog 3
  ENSP ID: ENSP00000452136
  MOD_RES (1)..(1): Any amino acid
XEDIQAACTKDLTTVAVDVVLENDTVDDTVSSESLQSLFSEWDNPVFARYPEVAVDVSSGQAESLAVKIHNILYPYRFTKGMIHSMQIPTRSNRHKALVGKNYCLLL

SEQ ID NO: 53603 - protein, 1453 aa, Homo sapiens; identical to SEQ ID NO: 53594
  Payload ID: 10639
  Gene Symbol: MLH3
  Gene Name: mutL homolog 3
  Uniprot ID: Q9UHC1
  ENSP ID: ENSP00000452316

SEQ ID NO: 53604 - protein, 934 aa, Homo sapiens [sequence omitted]

SEQ ID NO: 53605 - protein, 921 aa, Homo sapiens
  Payload ID: 10640
  Gene Symbol: MSH2
  Gene Name: mutS homolog 2
  ENSP ID: ENSP00000384199
MAVQPKETLQLESAAEVGFVRFFQGMPEKPTTTVRLFDRGDFYTAHGEDALLAAREVFKTQGVIKYMGPAGAKNLQSVVLSKMNFESFVKDLLLVRQYRVEVYKNRAGNKASKENDWYLAYKASPGNLSQFEDILFGNNDMSASIGVVGVKMSAVDGQRQVGVGYVDSIQRKLGLCEFPDNDQFSNLEALLIQIGPKECVLPGGETAGDMGKLRQIIQRGGILITERKKADFSTKDIYQDLNRLLKGKKGEQMNSAVLPEMENQVAVSSLSAVIKFLELLSDDSNFGQFELTTFDFSQYMKLDIAAVRALNLFQGSVEDTTGSQSLAALLNKCKTPQGQRLVNQWIKQPLMDKNRIEERLNLVEAFVEDAELRQTLQEDLLRRFPDLNRLAKKFQRQAANLQDCYRLYQGINQLPNVIQALEKHEGKHQKLLLAVFVTPLTDLRSDFSKFQEMIETTLDMDQVENHEFLVKPSFDPNLSELREIMNDLEKKMQSTLISAARDLGLDPGKQIKLDSSAQFGYYFRVTCKEEKVLRNNKNFSTVDIQKNGVKFTNSKLTSLNEEYTKNKTEYEEAQDAIVKEIVNISSGYVEPMQTLNDVLAQLDAVVSFAHVSNGAPVPYVRPAILEKGQGRIILKASRHACVEVQDEIAFIPNDVYFEKDKQMFHIITGPNMGGKSTYIRQTGVIVLMAQIGCFVPCESAEVSIVDCILARVGAGDSQLKGVSTFMAEMLETASILRSATKDSLIIIDELGRGTSTYDGFGLAWAISEYIATKIGAFCMFATHFHELTALANQIPTVNNLHVTALTTEETLTMLYQVKKGVCDQSFGIHVAELANFPKHVIECAKQKALELEEFQYIGESQGYDIMEPAAKKCYLERENLRVTEPKDQCLILLTWKRKLRGGKRSACSRPERQNQGSGELS

SEQ ID NO: 53606 - protein, 140 aa, Homo sapiens
  Payload ID: 10640
  Gene Symbol: MSH2
  Gene Name: mutS homolog 2
  ENSP ID: ENSP00000411482
MGPAGAKNLQSVVLSKMNFESFVKDLLLVRQYRVEVYKNRAGNKASKENDWYLAYKASPGNLSQFEDILFGNNDMSASIGVVGVKMSAVDGQRQVGVGYVDSIQRKLGLCEFPDNDQFSNLEALLIQIGPKECVLPGGET

SEQ ID NO: 53607 - protein, 868 aa, Homo sapiens
  Payload ID: 10640
  Gene Symbol: MSH2
  Gene Name: mutS homolog 2
  Uniprot ID: P43246
  ENSP ID: ENSP00000442697
MGPAGAKNLQSVVLSKMNFESFVKDLLLVRQYRVEVYKNRAGNKASKENDWYLAYKASPGNLSQFEDILFGNNDMSASIGVVGVKMSAVDGQRQVGVGYVDSIQRKLGLCEFPDNDQFSNLEALLIQIGPKECVLPGGETAGDMGKLRQIIQRGGILITERKKADFSTKDIYQDLNRLLKGKKGEQMNSAVLPEMENQVAVSSLSAVIKFLELLSDDSNFGQFELTTFDFSQYMKLDIAAVRALNLFQGSVEDTTGSQSLAALLNKCKTPQGQRLVNQWIKQPLMDKNRIEERLNLVEAFVEDAELRQTLQEDLLRRFPDLNRLAKKFQRQAANLQDCYRLYQGINQLPNVIQALEKHEGKHQKLLLAVFVTPLTDLRSDFSKFQEMIETTLDMDQVENHEFLVKPSFDPNLSELREIMNDLEKKMQSTLISAARDLGLDPGKQIKLDSSAQFGYYFRVTCKEEKVLRNNKNFSTVDIQKNGVKFTNSKLTSLNEEYTKNKTEYEEAQDAIVKEIVNISSGYVEPMQTLNDVLAQLDAVVSFAHVSNGAPVPYVRPAILEKGQGRIILKASRHACVEVQDEIAFIPNDVYFEKDKQMFHIITGPNMGGKSTYIRQTGVIVLMAQIGCFVPCESAEVSIVDCILARVGAGDSQLKGVSTFMAEMLETASILRSATKDSLIIIDELGRGTSTYDGFGLAWAISEYIATKIGAFCMFATHFHELTALANQIPTVNNLHVTALTTEETLTMLYQVKKGVCDQSFGIHVAELANFPKHVIECAKQKALELEEFQYIGESQGYDIMEPAAKKCYLEREQGEKIIQEFLSKVKQMPFTEMSEENITIKLKQLKAEVIAKNNSFVNEIISRIKVTT

SEQ ID NO: 53608 - protein, 341 aa, Homo sapiens [sequence omitted]

SEQ ID NO: 53609 - protein, 810 aa, Homo sapiens
  Payload ID: 10640
  Gene Symbol: MSH2
  Gene Name: mutS homolog 2
  ENSP ID: ENSP00000481416
MAVQPKETLQLESAAEVGFVRFFQGMPEKPTTTVRLFDRGDFYTAHGEDALLAAREVFKTQGVIKYMGPAGAKNLQSVVLSKMNFESFVKDLLLVRQYRVEVYKNRAGNKASKENDWYLAYKASPGNLSQFEDILFGNNDMSASIGVVGVKMSAVDGQRQVGVGYVDSIQRKLGLCEFPDNDQFSNLEALLIQIGPKECVLPGGETAGDMGKLRQIIQRGGILITERKKADFSTKDIYQDLNRLLKGKKGEQMNSAVLPEMENQVAVSSLSAVIKFLELLSDDSNFGQFELTTFDFSQYMKLDIAAVRALNLFQGSVEDTTGSQSLAALLNKCKTPQGQRLVNQWIKQPLMDKNRIEERLNLVEAFVEDAELRQTLQEDLLRRFPDLNRLAKKFQRQAANLQDCYRLYQGINQLPNVIQALEKHEGKHQKLLLAVFVTPLTDLRSDFSKFQEMIETTLDMDQVENHEFLVKPSFDPNLSELREIMNDLEKKMQSTLISAARDLGLDPGKQIKLDSSAQFGYYFRVTCKEEKVLRNNKNFSTVDIQKNGVKFTNSKLTSLNEEYTKNKTEYEEAQDAIVKEIVNISSGYVEPMQTLNDVLAQLDAVVSFAHVSNGAPVPYVRPAILEKGQGRIILKASRHACVEVQDEIAFIPNDVYFEKDKQMFHIITGPNMGGKSTYIRQTGVIVLMAQIGCFVPCESAEVSIVDCILARVGAGDSQLKGVSTFMAEMLETASILRSATKDSLIIIDELGRGTSTYDGFGLAWAISEYIATKIGAFCMFATIFMNLLPWPIRYQLLIIYMSQHSPLKRP

SEQ ID NO: 53610 - protein, 410 aa, Homo sapiens
  Payload ID: 10640
  Gene Symbol: MSH2
  Gene Name: mutS homolog 2
  ENSP ID: ENSP00000482468
MAVQPKETLQLESAAEVGFVRFFQGMPEKPTTTVRLFDRGDFYTAHGEDALLAAREVFKTQGVIKYMGPAGAKNLQSVVLSKMNFESFVKDLLLVRQYRVEVYKNRAGNKASKENDWYLAYKASPGNLSQFEDILFGNNDMSASIGVVGVKMSAVDGQRQVGVGYVDSIQRKLGLCEFPDNDQFSNLEALLIQIGPKECVLPGGETAGDMGKLRQIIQRGGILITERKKADFSTKDIYQDLNRLLKGKKGEQMNSAVLPEMENQVAVSSLSAVIKFLELLSDDSNFGQFELTTFDFSQYMKLDIAAVRALNLFQGSVEDTTGSQSLAALLNKCKTPQGQRLVNQWIKQPLMDKNRIEERLNLVEAFVEDAELRQTLQEDYFVDSQILTDLPRSFKDKQQTYKIVTDSIRV

SEQ ID NO: 53611 - protein, 533 aa, Homo sapiens
  Payload ID: 10640
  Gene Symbol: MSH2
  Gene Name: mutS homolog 2
  ENSP ID: ENSP00000483159
MAVQPKETLQLESAAEVGFVRFFQGMPEKPTTTVRLFDRGDFYTAHGEDALLAAREVFKTQGVIKYMGPAGAKNLQSVVLSKMNFESFVKDLLLVRQYRVEVYKNRAGNKASKENDWYLAYKASPGNLSQFEDILFGNNDMSASIGVVGVKMSAVDGQRQVGVGYVDSIQRKLGLCEFPDNDQFSNLEALLIQIGPKECVLPGGETAGDMGKLRQIIQRGGILITERKKADFSTKDIYQDLNRLLKGKKGEQMNSAVLPEMENQVAVSSLSAVIKFLELLSDDSNFGQFELTTFDFSQYMKLDIAAVRALNLFQGSVEDTTGSQSLAALLNKCKTPQGQRLVNQWIKQPLMDKNRIEERLNLVEAFVEDAELRQTLQEDLLRRFPDLNRLAKKFQRQAANLQDCYRLYQGINQLPNVIQALEKHEGKHQKLLLAVFVTPLTDLRSDFSKFQEMIETTLDMDQVENHEFLVKPSFDPNLSELREIMNDLEKKMQSTLISAARDLGLDPGKQIKLDSSAQFGYYFRVTCKEKSPS

SEQ ID NO: 53612 - protein, 485 aa, Homo sapiens
  Payload ID: 10640
  Gene Symbol: MSH2
  Gene Name: mutS homolog 2
  ENSP ID: ENSP00000484137
MAVQPKETLQLESAAEVGFVRFFQGMPEKPTTTVRLFDRGDFYTAHGEDALLAAREVFKTQGVIKYMGPAGAKNLQSVVLSKMNFESFVKDLLLVRQYRVEVYKNRAGNKASKENDWYLAYKASPGNLSQFEDILFGNNDMSASIGVVGVKMSAVDGQRQVGVGYVDSIQRKLGLCEFPDNDQFSNLEALLIQIGPKECVLPGGETAGDMGKLRQIIQRGGILITERKKADFSTKDIYQDLNRLLKGKKGEQMNSAVLPEMENQVAVSSLSAVIKFLELLSDDSNFGQFELTTFDFSQYMKLDIAAVRALNLFQGSVEDTTGSQSLAALLNKCKTPQGQRLVNQWIKQPLMDKNRIEERLNLVEAFVEDAELRQTLQEDLLRRFPDLNRLAKKFQRQAANLQDCYRLYQGINQLPNVIQALEKHEGKHQKLLLAVFVTPLTDLRSDFSKFQEMIETTLDMDQVENHEFLVKPSFDPNLSELRNNE

SEQ ID NO: 53613 - protein, 1137 aa, Homo sapiens
  Payload ID: 10641
  Gene Symbol: MSH3
  Gene Name: mutS homolog 3
  Uniprot ID: P20585
  ENSP ID: ENSP00000265081
MSRRKPASGGLAASSSAPARQAVLSRFFQSTGSLKSTSSSTGAADQVDPGAAAAAAAAAAAAPPAPPAPAFPPQLPPHIATEIDRRKKRPLENDGPVKKKVKKVQQKEGGSDLGMSGNSEPKKCLRTRNVSKSLEKLKEFCCDSALPQSRVQTESLQERFAVLPKCTDFDDISLLHAKNAVSSEDSKRQINQKDTTLFDLSQFGSSNTSHENLQKTASKSANKRSKSIYTPLELQYIEMKQQHKDAVLCVECGYKYRFFGEDAEIAARELNIYCHLDHNFMTASIPTHRLFVHVRRLVAKGYKVGVVKQTETAALKAIGDNRSSLFSRKLTALYTKSTLIGEDVNPLIKLDDAVNVDEIMTDTSTSYLLCISENKENVRDKKKGNIFIGIVGVQPATGEVVFDSFQDSASRSELETRMSSLQPVELLLPSALSEQTEALIHRATSVSVQDDRIRVERMDNIYFEYSHAFQAVTEFYAKDTVDIKGSQIISGIVNLEKPVICSLAAIIKYLKEFNLEKMLSKPENFKQLSSKMEFMTINGTTLRNLEILQNQTDMKTKGSLLWVLDHTKTSFGRRKLKKWVTQPLLKLREINARLDAVSEVLHSESSVFGQIENHLRKLPDIERGLCSIYHKKCSTQEFFLIVKTLYHLKSEFQAIIPAVNSHIQSDLLRTVILEIPELLSPVEHYLKILNEQAAKVGDKTELFKDLSDFPLIKKRKDEIQGVIDEIRMHLQEIRKILKNPSAQYVTVSGQEFMIEIKNSAVSCIPTDWVKVGSTKAVSRFHSPFIVENYRHLNQLREQLVLDCSAEWLDFLEKFSEHYHSLCKAVHHLATVDCIFSLAKVAKQGDYCRPTVQEERKIVIKNGRHPVIDVLLGEQDQYVPNNTDLSEDSERVMIITGPNMGGKSSYIKQVALITIMAQIGSYVPAEEATIGIVDGIFTRMGAADNIYKGQSTFMEELTDTAEIIRKATSQSLVILDELGRGTSTHDGIAIAYATLEYFIRDVKSLTLFVTHYPPVCELEKNYSHQVGNYHMGFLVSEDESKLDPGAAEQVPDFVTFLYQITRGIAARSYGLNVAKLADVPGEILKKAAHKSKELEGLINTKRKRLKYFAKLWTMHNAQDLQKWTEEFNMEETQTSLLH

SEQ ID NO: 53614 - protein, 936 aa, Homo sapiens
  Payload ID: 10642
  Gene Symbol: MSH4
  Gene Name: mutS homolog 4
  Uniprot ID: O15457
  ENSP ID: ENSP00000263187
MLRPEISSTSPSAPAVSPSSGETRSPQGPRYNFGLQETPQSRPSVQVVSASTCPGTSGAAGDRSSSSSSLPCPAPNSRPAQGSYFGNKRAYAENTVASNFTFGASSSSARDTNYPQTLKTPLSTGNPQRSGYKSWTPQVGYSASSSSAISAHSPSVIVAVVEGRGLARGEIGMASIDLKNPQIILSQFADNTTYAKVITKLKILSPLEIIMSNTACAVGNSTKLFTLITENFKNVNFTTIQRKYFNETKGLEYIEQLCIAEFSTVLMEVQSKYYCLAAVAALLKYVEFIQNSVYAPKSLKICFQGSEQTAMIDSSSAQNLELLINNQDYRNNHTLFGVLNYTKTPGGSRRLRSNILEPLVDIETINMRLDCVQELLQDEELFFGLQSVISRFLDTEQLLSVLVQIPKQDTVNAAESKITNLIYLKHTLELVDPLKIAMKNCNTPLLRAYYGSLEDKRFGIILEKIKTVINDDARYMKGCLNMRTQKCYAVRSNINEFLDIARRTYTEIVDDIAGMISQLGEKYSLPLRTSFSSARGFFIQMTTDCIALPSDQLPSEFIKISKVKNSYSFTSADLIKMNERCQESLREIYHMTYMIVCKLLSEIYEHIHCLYKLSDTVSMLDMLLSFAHACTLSDYVRPEFTDTLAIKQGWHPILEKISAEKPIANNTYVTEGSNFLIITGPNMSGKSTYLKQIALCQIMAQIGSYVPAEYSSFRIAKQIFTRISTDDDIETNSSTFMKEMKEIAYILHNANDKSLILIDELGRGTNTEEGIGICYAVCEYLLSLKAFTLFATHFLELCHIDALYPNVENMHFEVQHVKNTSRNKEAILYTYKLSKGLTEEKNYGLKAAEVSSLPPSIVLDAKEITTQITRQILQNQRSTPEMERQRAVYHLATRLVQTARNSQLDPDSLRIYLSNLKKKYKEDFPRTEQVPEKTEE

SEQ ID NO: 53615 - protein, 835 aa, Homo sapiens
  Payload ID: 10643
  Gene Symbol: MSH5
  Gene Name: mutS homolog 5
  Uniprot ID: O43196
  ENSP ID: ENSP00000364855
MASLGANPRRTPQGPRPGAASSGFPSPAPVPGPREAEEEEVEEEEELAEIHLCVLWNSGYLGIAYYDTSDSTIHFMPDAPDHESLKLLQRVLDEINPQSVVTSAKQDENMTRFLGKLASQEHREPKRPEIIFLPSVDFGLEISKQRLLSGNYSFIPDAMTATEKILFLSSIIPFDCLLTVRALGGLLKFLGRRRIGVELEDYNVSVPILGFKKFMLTHLVNIDQDTYSVLQIFKSESHPSVYKVASGLKEGLSLFGILNRCHCKWGEKLLRLWFTRPTHDLGELSSRLDVIQFFLLPQNLDMAQMLHRLLGHIKNVPLILKRMKLSHTKVSDWQVLYKTVYSALGLRDACRSLPQSIQLFRDIAQEFSDDLHHIASLIGKVVDFEGSLAENRFTVLPNIDPEIDEKKRRLMGLPSFLTEVARKELENLDSRIPSCSVIYIPLIGFLLSIPRLPSMVEASDFEINGLDFMFLSEEKLHYRSARTKELDALLGDLHCEIRDQETLLMYQLQCQVLARAAVLTRVLDLASRLDVLLALASAARDYGYSRPRYSPQVLGVRIQNGRHPLMELCARTFVPNSTECGGDKGRVKVITGPNSSGKSIYLKQVGLITFMALVGSFVPAEEAEIGAVDAIFTRIHSCESISLGLSTFMIDLNQQVAKAVNNATAQSLVLIDEFGKGTNTVDGLALLAAVLRHWLARGPTCPHIFVATNFLSLVQLQLLPQGPLVQYLTMETCEDGNDLVFFYQVCEGVAKASHASHTAAQAGLPDKLVARGKEVSDLIRSGKPIKPVKDLLKKNQMENCQTLVDKFMKLDLEDPNLDLNVFMSQEVLPAATSIL

SEQ ID NO: 53616 - protein, 822 aa, Homo sapiens
  Payload ID: 10643
  Gene Symbol: MSH5
  Gene Name: mutS homolog 5
  Uniprot ID: O43196
  ENSP ID: ENSP00000364892
MASLGANPRRTPQGPRPGAASSGFPSPAPVPGPREAEEEEVEEEEELAEIHLCVLWNSGYLGIAYYDTSDSTIHFMPDAPDHESLKLLQRVLDEINPQSVVTSAKQDENMTRFLGKLASQEHREPKRPEIIFLPSVDFGLEISKQRLLSGNYSFIPDAMTATEKILFLSSIIPFDCLLTPPGDLRFTPIPLLIPSQVRALGGLLKFLGRRRIGVELEDYNVSVPILGFKKFMLTHLVNIDQDTYSVLQIFKSESHPSVYKVASGLKEGLSLFGILNRCHCKWGEKLLRLWFTRPTHDLGELSSRLDVIQFFLLPQNLDMAQMLHRLLGHIKNVPLILKRMKLSHTKVSDWQVLYKTVYSALGLRDACRSLPQSIQLFRDIAQEFSDDLHHIASLIGKVVDFEGSLAENRFTVLPNIDPEIDEKKRRLMGLPSFLTEVARKELENLDSRIPSCSVIYIPLIGFLLSIPRLPSMVEASDFEINGLDFMFLSEEKLHYRSARTKELDALLGDLHCEIRDQETLLMYQLQCQVLARAAVLTRVLDLASRLDVLLALASAARDYGYSRPRYSPQVLGVRIQNGRHPLMELCARTFVPNSTECGGDKGRVKVITGPNSSGKSIYLKQVGLITFMALVGSFVPAEEAEIGAVDAIFTRIHSCESISLGLSTFMIDLNQQVAKAVNNATAQSLVLIDEFGKGTNTVDGLALLAAVLRHWLARGPTCPHIFVATNFLSLVQLQLLPQGPLVQYLTMETCEDGNDLVFFYQVSDLIRSGKPIKPVKDLLKKNQMENCQTLVDKFMKLDLEDPNLDLNVFMSQEVLPAATSIL

SEQ ID NO: 53617 - protein, 834 aa, Homo sapiens
  Payload ID: 10643
  Gene Symbol: MSH5
  Gene Name: mutS homolog 5
  Uniprot ID: O43196
  ENSP ID: ENSP00000364903
MASLGANPRRTPQGPRPGAASSGFPSPAPVPGPREAEEEEVEEEEELAEIHLCVLWNSGYLGIAYYDTSDSTIHFMPDAPDHESLKLLQRVLDEINPQSVVTSAKQDENMTRFLGKLASQEHREPKRPEIIFLPSVDFGLEISKQRLLSGNYSFIPDAMTATEKILFLSSIIPFDCLLTVRALGGLLKFLGRRRIGVELEDYNVSVPILGFKKFMLTHLVNIDQDTYSVLQIFKSESHPSVYKVASGLKEGLSLFGILNRCHCKWGEKLLRLWFTRPTHDLGELSSRLDVIQFFLLPQNLDMAQMLHRLLGHIKNVPLILKRMKLSHTKVSDWQVLYKTVYSALGLRDACRSLPQSIQLFRDIAQEFSDDLHHIASLIGKVVDFEGSLAENRFTVLPNIDPEIDEKKRRLMGLPSFLTEVARKELENLDSRIPSCSVIYIPLIGFLLSIPRLPSMVEASDFEINGLDFMFLSEEKLHYRSARTKELDALLGDLHCEIRDQETLLMYQLQCQVLARAAVLTRVLDLASRLDVLLALASAARDYGYSRPRYSPQVLGVRIQNGRHPLMELCARTFVPNSTECGGDKGRVKVITGPNSSGKSIYLKQVGLITFMALVGSFVPAEEAEIGAVDAIFTRIHSCESISLGLSTFMIDLNQVAKAVNNATAQSLVLIDEFGKGTNTVDGLALLAAVLRHWLARGPTCPHIFVATNFLSLVQLQLLPQGPLVQYLTMETCEDGNDLVFFYQVCEGVAKASHASHTAAQAGLPDKLVARGKEVSDLIRSGKPIKPVKDLLKKNQMENCQTLVDKFMKLDLEDPNLDLNVFMSQEVLPAATSIL

SEQ ID NO: 53618 - protein, 834 aa, Homo sapiens; identical to SEQ ID NO: 53617
  Payload ID: 10643
  Gene Symbol: MSH5
  Gene Name: mutS homolog 5
  Uniprot ID: O43196
  ENSP ID: ENSP00000364908

SEQ ID NO: 53619 - protein, 508 aa, Homo sapiens
  Payload ID: 10643
  Gene Symbol: MSH5
  Gene Name: mutS homolog 5
  ENSP ID: ENSP00000379194
MWPVLLFVFLSQTVYSALGLRDACRSLPQSIQLFRDIAQEFSDDLHHIASLIGKVVDFEGSLAENRFTVLPNIDPEIDEKKRRLMGLPSFLTEVARKELENLDSRIPSCSVIYIPLIGFLLSIPRLPSMVEASDFEINGLDFMFLSEEKLHYRSARTKELDALLGDLHCEIRDQETLLMYQLQCQVLARAAVLTRVLDLASRLDVLLALASAARDYGYSRPRYSPQVLGVRIQNGRHPLMELCARTFVPNSTECGGDKGRVKVITGPNSSGKSIYLKQVGLITFMALVGSFVPAEEAEIGAVDAIFTRIHSCESISLGLSTFMIDLNQVAKAVNNATAQSLVLIDEFGKGTNTVDGLALLAAVLRHWLARGPTCPHIFVATNFLSLVQLQLLPQGPLVQYLTMETCEDGNDLVFFYQVCEGVAKASHASHTAAQAGLPDKLVARGKEVSDLIRSGKPIKPVKDLLKKNQMENCQTLVDKFMKLDLEDPNLDLNVFMSQEVLPAATSIL

SEQ ID NO: 53620 - protein, 497 aa, Homo sapiens
  Payload ID: 10643
  Gene Symbol: MSH5
  Gene Name: mutS homolog 5
  ENSP ID: ENSP00000387397
TVYSALGLRDACRSLPQSIQLFRDIAQEFSDDLHHIASLIGKVVDFEGSLAENRFTVLPNIDPEIDEKKRRLMGLPSFLTEVARKELENLDSRIPSCSVIYIPLIGFLLSIPRLPSMVEASDFEINGLDFMFLSEEKLHYRSARTKELDALLGDLHCEIRDQETLLMYQLQCQVLARAAVLTRVLDLASRLDVLLALASAARDYGYSRPRYSPQVLGVRIQNGRHPLMELCARTFVPNSTECGGDKGRVKVITGPNSSGKSIYLKQVGLITFMALVGSFVPAEEAEIGAVDAIFTRIHSCESISLGLSTFMIDLNQQVAKAVNNATAQSLVLIDEFGKGTNTVDGLALLAAVLRHWLARGPTCPHIFVATNFLSLVQLQLLPQGPLVQYLTMETCEDGNDLVFFYQVCEGVAKASHASHTAAQAGLPDKLVARGKEVSDLIRSGKPIKPVKDLLKKNQMENCQTLVDKFMKLDLEDPNLDLNVFMSQEVLPAATSIL

SEQ ID NO: 53621 - protein, 156 aa, Homo sapiens
  Payload ID: 10643
  Gene Symbol: MSH5
  Gene Name: mutS homolog 5
  ENSP ID: ENSP00000387458
TAQSLVLIDEFGKGTNTVDGLALLAAVLRHWLARGPTCPHIFVATNFLSLVQLQLLPQGPLVQYLVCEGVAKASHASHTAAQAGLPDKLVARGKEVSDLIRSGKPIKPVKDLLKKNQMENCQTLVDKFMKLDLEDPNLDLNVFMSQEVLPAATSIL

SEQ ID NO: 53622 - protein, 822 aa, Homo sapiens; identical to SEQ ID NO: 53616
  Payload ID: 10643
  Gene Symbol: MSH5
  Gene Name: mutS homolog 5
  Uniprot ID: O43196
  ENSP ID: ENSP00000387609

SEQ ID NO: 53623 - protein, 194 aa, Homo sapiens
  Payload ID: 10643
  Gene Symbol: MSH5
  Gene Name: mutS homolog 5
  ENSP ID: ENSP00000387921
MASLGANPRRTPQGPRPGAASSGFPSPAPVPGPREAEEEEVEEEEELAEIHLCVLWNSGYLGIAYYDTSDSTIHFMPDAPDHESLKLLQRVLDEINPQSVVTSAKQDENMTRFLGKLASQEHREPKRPEIIFLPSVDFGLEISKQRLLSGNYSFIPDAMTATEKILFLSSIIPFDCLLTVRALGGLLKFLGRRR

SEQ ID NO: 53624 - protein, 834 aa, Homo sapiens; identical to SEQ ID NO: 53617
  Payload ID: 10643
  Gene Symbol: MSH5
  Gene Name: mutS homolog 5
  Uniprot ID: O43196
  ENSP ID: ENSP00000388037

SEQ ID NO: 53625 - protein, 467 aa, Homo sapiens
  Payload ID: 10643
  Gene Symbol: MSH5
  Gene Name: mutS homolog 5
  ENSP ID: ENSP00000389840
TVYSALGLRDACRSLPQSIQLFRDIAQEFSDDLHHIASLIGKVVDFEGSLAENRFTVLPNIDPEIDEKKRRLMGLPSFLTEVARKELENLDSRIPSCSVIYIPLIGFLLSIPRLPSMVEASDFEINGLDFMFLSEEKLHYRSARTKELDALLGDLHCEIRDQETLLMYQLQCQVLARAAVLTRVLDLASRLDVLLALASAARDYGYSRPRYSPQVLGVRIQNGRHPLMELCARTFVPNSTECGGDKGRVKVITGPNSSGKSIYLKQVGLITFMALVGSFVPAEEAEIGAVDAIFTRIHSCESISLGLSTFMIDLNQQVAKAVNNATAQSLVLIDEFGKGTNTVDGLALLAAVLRHWLARGPTCPHIFVATNFLSLVQLQLLPQGPLVQYLTMETCEDGNDLVFFYQVSDLIRSGKPIKPVKDLLKKNQMENCQTLVDKFMKLDLEDPNLDLNVFMSQEVLPAATSIL

SEQ ID NO: 53626 - protein, 115 aa, Homo sapiens
  Payload ID: 10643
  Gene Symbol: MSH5
  Gene Name: mutS homolog 5
  ENSP ID: ENSP00000391330
IAQEFSDDLHHIASLIGKVVDFEGSLAENRFTVLPNIDPEIDEKKRRLMGLPSFLTEVARKELENLDSRIPSCSVIYIPLIGFLLSIPRLPSMVEASDFEINGLDFMVRPSTSVR

SEQ ID NO: 53627 - protein, 508 aa, Homo sapiens; identical to SEQ ID NO: 53619
  Payload ID: 10643
  Gene Symbol: MSH5
  Gene Name: mutS homolog 5
  ENSP ID: ENSP00000391394

SEQ ID NO: 53628 - protein, 194 aa, Homo sapiens; identical to SEQ ID NO: 53623
  Payload ID: 10643
  Gene Symbol: MSH5
  Gene Name: mutS homolog 5
  ENSP ID: ENSP00000391401

SEQ ID NO: 53629 - protein, 135 aa, Homo sapiens
  Payload ID: 10643
  Gene Symbol: MSH5
  Gene Name: mutS homolog 5
  ENSP ID: ENSP00000393445
GYSRPRYSPQVLGVRIQNGRHPLMELCARTFVPNSTECGGDKGRVKVITGPNSSGKSIYLKQVAKAVNNATAQSLVLIDEFGKGTNTVDGLALLAAVLRHWLARGPTCPHIFVATNFLSLVQLQLLPQGPLVQYL

SEQ ID NO: 53630 - protein, 834 aa, Homo sapiens; identical to SEQ ID NO: 53617
  Payload ID: 10643
  Gene Symbol: MSH5
  Gene Name: mutS homolog 5
  Uniprot ID: O43196
  ENSP ID: ENSP00000394017

SEQ ID NO: 53631 - protein, 90 aa, Homo sapiens
  Payload ID: 10643
  Gene Symbol: MSH5
  Gene Name: mutS homolog 5
  ENSP ID: ENSP00000394254
MASLGANPRRTPQGPRPGAASSGFPSPAPVPGPREAEEEEVEEEEELAEIHLCVLWNSGYLGIAYYDTSDSTIHFMPDAPDHESLKLLQR

SEQ ID NO: 53632 - protein, 745 aa, Homo sapiens
  Payload ID: 10643
  Gene Symbol: MSH5
  Gene Name: mutS homolog 5
  ENSP ID: ENSP00000394619
MASLGANPRRTPQGPRPGAASSGFPSPAPVPGPREAEEEEVEEEEELAEIHLCVLWNSGYLGIAYYDTSDSTIHFMPDAPDHESLKLLQRVLDEINPQSVVTSAKQDENMTRFLGKLASQEHREPKRPEIIFLPSVDFGLEISKQRLLSGNYSFIPDAMTATEKILFLSSIIPFDCLLTPPGDLRFTPIPLLIPSQVRALGGLLKFLGRRRIGVELEDYNVSVPILGFKKFMLTHLVNIDQDTYSVLQIFKSESHPSVYKVASGLKEGLSLFGILNRCHCKWGEKLLRLWFTRPTHDLGELSSRLDVIQFFLLPQNLDMAQMLHRLLGHIKNVPLILKRMKLSHTKVSDWQVLYKTVYSALGLRDACRSLPQSIQLFRDIAQEFSDDLHHIASLIGKVVDFEGSLAENRFTVLPNIDPEIDEKKRRLMGLPSFLTEVARKELENLDSRIPSCSVIYIPLIGFLLSIPRLPSMVEASDFEINGLDFMFLSEEKLHYRSARTKELDALLGDLHCEIRDQETLLMYQLQCQVLARAAVLTRVLDLASRLDVLLALASAARDYGYSRPRYSPQVLGVRIQNGRHPLMELCARTFVPNSTECGGDKGRVKVITGPNSSGKSIYLKQVGLITFMALVGSFVPAEEAEIGAVDAIFTRIHSCESISLGLSTFMIDLNQQVAKAVNNATAQSLVLIDEFGKGTNTVDGLALLAAVLRHWLARGPTCPHIFVATNFLSLVQLQLLPQGPLVQYL

SEQ ID NO: 53633 - protein, 835 aa, Homo sapiens; identical to SEQ ID NO: 53615
  Payload ID: 10643
  Gene Symbol: MSH5
  Gene Name: mutS homolog 5
  Uniprot ID: O43196
  ENSP ID: ENSP00000394649

SEQ ID NO: 53634 - protein, 333 aa, Homo sapiens
  Payload ID: 10643
  Gene Symbol: MSH5
  Gene Name: mutS homolog 5
  ENSP ID: ENSP00000394971
KILFLSSIIPFDCLLTVRALGGLLKFLGRRRIGVELEDYNVSVPILGFKKFMLTHLVNIDQDTYSVLQIFKSESHPSVYKVASGLKEGLSLFGILNRCHCKWGEKLLRLWFTRPTHDLGELSSRLDVIQFFLLPQNLDMAQMLHRLLGHIKNVPLILKRMKLSHTKVSDWQVLYKTVYSALGLRDACRSLPQSIQLFRDIAQEFSDDLHHIASLIGKVYLSPQVDFEGSLAENRFTVLPNIDPEIDEKKRRLMGLPSFLTEVARKELENLDSRIPSCSVIYIPLIGFLLSIPRLPSMVEASDFEINGLDFMFLSEEKLHYRSARTKELDALLG

SEQ ID NO: 53635 - protein, 821 aa, Homo sapiens
  Payload ID: 10643
  Gene Symbol: MSH5
  Gene Name: mutS homolog 5
  ENSP ID: ENSP00000395133
MASLGANPRRTPQGPRPGAASSGFPSPAPVPGPREAEEEEVEEEEELAEIHLCVLWNSGYLGIAYYDTSDSTIHFMPDAPDHESLKLLQRVLDEINPQSVVTSAKQDENMTRFLGKLASQEHREPKRPEIIFLPSVDFGLEISKQRLLSGNYSFIPDAMTATEKILFLSSIIPFDCLLTPPGDLRFTPIPLLIPSQVRALGGLLKFLGRRRIGVELEDYNVSVPILGFKKFMLTHLVNIDQDTYSVLQIFKSESHPSVYKVASGLKEGLSLFGILNRCHCKWGEKLLRLWFTRPTHDLGELSSRLDVIQFFLLPQNLDMAQMLHRLLGHIKNVPLILKRMKLSHTKVSDWQVLYKTVYSALGLRDACRSLPQSIQLFRDIAQEFSDDLHHIASLIGKVVDFEGSLAENRFTVLPNIDPEIDEKKRRLMGLPSFLTEVARKELENLDSRIPSCSVIYIPLIGFLLSIPRLPSMVEASDFEINGLDFMFLSEEKLHYRSARTKELDALLGDLHCEIRDQETLLMYQLQCQVLARAAVLTRVLDLASRLDVLLALASAARDYGYSRPRYSPQVLGVRIQNGRHPLMELCARTFVPNSTECGGDKGRVKVITGPNSSGKSIYLKQVGLITFMALVGSFVPAEEAEIGAVDAIFTRIHSCESISLGLSTFMIDLNQVAKAVNNATAQSLVLIDEFGKGTNTVDGLALLAAVLRHWLARGPTCPHIFVATNFLSLVQLQLLPQGPLVQYLTMETCEDGNDLVFFYQVSDLIRSGKPIKPVKDLLKKNQMENCQTLVDKFMKLDLEDPNLDLNVFMSQEVLPAATSIL

SEQ ID NO: 53636 - protein, 270 aa, Homo sapiens
  Payload ID: 10643
  Gene Symbol: MSH5
  Gene Name: mutS homolog 5
  Uniprot ID: O43196
  ENSP ID: ENSP00000396509
MASLGANPRRTPQGPRPGAASSGFPSPAPVPGPREAEEEEVEEEEELAEIHLCVLWNSGYLGIAYYDTSDSTIHFMPDAPDHESLKLLQRVLDEINPQSVVTSAKQDENMTRFLGKLASQEHREPKRPEIIFLPSVDFGLEISKQRLLSGNYSFIPDAMTATEKILFLSSIIPFDCLLTVRALGGLLKFLGRRRIGVELEDYNVSVPILGFKKFMLTHLVNIDQDTYSVLQIFKSESHPSVYKVASGLKEGLSLFGILNRCHCKWGEKLL

SEQ ID NO: 53637 - protein, 333 aa, Homo sapiens; identical to SEQ ID NO: 53634
  Payload ID: 10643
  Gene Symbol: MSH5
  Gene Name: mutS homolog 5
  ENSP ID: ENSP00000396934

SEQ ID NO: 53638 - protein, 158 aa, Homo sapiens
  Payload ID: 10643
  Gene Symbol: MSH5
  Gene Name: mutS homolog 5
  ENSP ID: ENSP00000397187
TVYSALGLRDACRSLPQSIQLFRDIAQEFSDDLHHIASLIGKVYLSPQVDFEGSLAENRFTVLPNIDPEIDEKKRRLMGLPSFLTEVARKELENLDSRIPSCSVIYIPLIGFLLSIPRLPSMVEASDFEINGLDFMFLSEEKLHYRSARTKELDALLG

SEQ ID NO: 53639 - protein, 107 aa, Homo sapiens
  Payload ID: 10643
  Gene Symbol: MSH5
  Gene Name: mutS homolog 5
  ENSP ID: ENSP00000397355
KILFLSSIIPFDCLLTVRALGGLLKFLGRRRIGVELEDYNVSVPILGFKKFMLTHLVNIDQDTYSVLQIFKSESHPSVYKVASGLKEGLSLFGILNRCHCKWGEKLL

SEQ ID NO: 53640 - protein, 508 aa, Homo sapiens; identical to SEQ ID NO: 53619
  Payload ID: 10643
  Gene Symbol: MSH5
  Gene Name: mutS homolog 5
  ENSP ID: ENSP00000398373

SEQ ID NO: 53641 - protein, 508 aa, Homo sapiens; identical to SEQ ID NO: 53619
  Payload ID: 10643
  Gene Symbol: MSH5
  Gene Name: mutS homolog 5
  ENSP ID: ENSP00000398538

SEQ ID NO: 53642 - protein, 90 aa, Homo sapiens; identical to SEQ ID NO: 53631
  Payload ID: 10643
  Gene Symbol: MSH5
  Gene Name: mutS homolog 5
  ENSP ID: ENSP00000399303

SEQ ID NO: 53643 - protein, 194 aa, Homo sapiens; identical to SEQ ID NO: 53623
  Payload ID: 10643
  Gene Symbol: MSH5
  Gene Name: mutS homolog 5
  ENSP ID: ENSP00000399470

SEQ ID NO: 53644 - protein, 834 aa, Homo sapiens; identical to SEQ ID NO: 53617
  Payload ID: 10643
  Gene Symbol: MSH5
  Gene Name: mutS homolog 5
  Uniprot ID: O43196
  ENSP ID: ENSP00000399721

SEQ ID NO: 53645 - protein, 158 aa, Homo sapiens
  Payload ID: 10643
  Gene Symbol: MSH5
  Gene Name: mutS homolog 5
  ENSP ID: ENSP00000399898
HESLKLLQRVLDEINPQSVVTSAKQDENMTRFLGKLASQEHREPKRPEIIFLPSVDFGLEISKQRLLSGNYSFIPDAMTATEKILFLSSIIPFDCLLTIPSQVRALGGLLKFLGRRRIGVELEDYNVSVPILGFKKFMLTHLVNIDQDTYRNPQQMPL

SEQ ID NO: 53646 - protein, 270 aa, Homo sapiens; identical to SEQ ID NO: 53636
  Payload ID: 10643
  Gene Symbol: MSH5
  Gene Name: mutS homolog 5
  Uniprot ID: O43196
  ENSP ID: ENSP00000400187

SEQ ID NO: 53647 - protein, 508 aa, Homo sapiens; identical to SEQ ID NO: 53619
  Payload ID: 10643
  Gene Symbol: MSH5
  Gene Name: mutS homolog 5
  ENSP ID: ENSP00000400820

SEQ ID NO: 53648 - protein, 727 aa, Homo sapiens
  Payload ID: 10643
  Gene Symbol: MSH5
  Gene Name: mutS homolog 5
  ENSP ID: ENSP00000401072
MASLGANPRRTPQGPRPGAASSGFPSPAPVPGPREAEEEEVEEEEELAEIHLCVLWNSGYLGIAYYDTSDSTIHFMPDAPDHESLKLLQRVLDEINPQSVVTSAKQDENMTRFLGKLASQEHREPKRPEIIFLPSVDFGLEISKQRLLSGNYSFIPDAMTATEKILFLSSIIPFDCLLTVRALGGLLKFLGRRRIGVELEDYNVSVPILGFKKFMLTHLVNIDQDTYSVLQIFKSESHPSVYKVASGLKEGLSLFGILNRCHCKWGEKLLRLWFTRPTHDLGELSSRLDVIQFFLLPQNLDMAQMLHRLLGHIKNVPLILKRMKLSHTKVSDWQVLYKTVYSALGLRDACRSLPQSIQLFRDIAQEFSDDLHHIASLIGKVVDFEGSLAENRFTVLPNIDPEIDEKKRRLMGLPSFLTEVARKELENLDSRIPSCSVIYIPLIGFLLSIPRLPSMVEASDFEINGLDFMFLSEEKLHYRSARTKELDALLGDLHCEIRDQETLLMYQLQCQVLARAAVLTRVLDLASRLDVLLALASAARDYGYSRPRYSPQVLGVRIQNGRHPLMELCARTFVPNSTECGGDKGRVKVITGPNSSGKSIYLKQVGLITFMALVGSFVPAEEAEIGAVDAIFTRIHSCESISLGLSTFMIDLNQVAKAVNNATAQSLVLIDEFGKGTNTVDGLALLAAVLRHWLARGPTCPHIFVATNFLSLVQLQLLPQGPLVQYL

SEQ ID NO: 53649 - protein, 156 aa, Homo sapiens; identical to SEQ ID NO: 53621
  Payload ID: 10643
  Gene Symbol: MSH5
  Gene Name: mutS homolog 5
  ENSP ID: ENSP00000401120

SEQ ID NO: 53650 - protein, 496 aa, Homo sapiens; identical to SEQ ID NO: 53055
  Payload ID: 10643
  Gene Symbol: MSH5
  Gene Name: mutS homolog 5
  ENSP ID: ENSP00000402188

SEQ ID NO: 53651 - protein, 834 aa, Homo sapiens; identical to SEQ ID NO: 53617
  Payload ID: 10643
  Gene Symbol: MSH5
  Gene Name: mutS homolog 5
  Uniprot ID: O43196
  ENSP ID: ENSP00000402659

SEQ ID NO: 53652 - protein, 194 aa, Homo sapiens; identical to SEQ ID NO: 53623
  Payload ID: 10643
  Gene Symbol: MSH5
  Gene Name: mutS homolog 5
  ENSP ID: ENSP00000402842

SEQ ID NO: 53653 - protein, 194 aa, Homo sapiens; identical to SEQ ID NO: 53623
  Payload ID: 10643
  Gene Symbol: MSH5
  Gene Name: mutS homolog 5
  ENSP ID: ENSP00000403240

SEQ ID NO: 53654 - protein, 508 aa, Homo sapiens; identical to SEQ ID NO: 53619
  Payload ID: 10643
  Gene Symbol: MSH5
  Gene Name: mutS homolog 5
  ENSP ID: ENSP00000403531

SEQ ID NO: 53655 - protein, 90 aa, Homo sapiens; identical to SEQ ID NO: 53631
  Payload ID: 10643
  Gene Symbol: MSH5
  Gene Name: mutS homolog 5
  ENSP ID: ENSP00000403777

SEQ ID NO: 53656 - protein, 466 aa, Homo sapiens
  Payload ID: 10643
  Gene Symbol: MSH5
  Gene Name: mutS homolog 5
  ENSP ID: ENSP00000403809
TVYSALGLRDACRSLPQSIQLFRDIAQEFSDDLHHIASLIGKVVDFEGSLAENRFTVLPNIDPEIDEKKRRLMGLPSFLTEVARKELENLDSRIPSCSVIYIPLIGFLLSIPRLPSMVEASDFEINGLDFMFLSEEKLHYRSARTKELDALLGDLHCEIRDQETLLMYQLQCQVLARAAVLTRVLDLASRLDVLLALASAARDYGYSRPRYSPQVLGVRIQNGRHPLMELCARTFVPNSTECGGDKGRVKVITGPNSSGKSIYLKQVGLITFMALVGSFVPAEEAEIGAVDAIFTRIHSCESISLGLSTFMIDLNQVAKAVNNATAQSLVLIDEFGKGTNTVDGLALLAAVLRHWLARGPTCPHIFVATNFLSLVQLQLLPQGPLVQYLTMETCEDGNDLVFFYQVSDLIRSGKPIKPVKDLLKKNQMENCQTLVDKFMKLDLEDPNLDLNVFMSQEVLPAATSIL

SEQ ID NO: 53657 - protein, 333 aa, Homo sapiens; identical to SEQ ID NO: 53634
  Payload ID: 10643
  Gene Symbol: MSH5
  Gene Name: mutS homolog 5
  ENSP ID: ENSP00000404249

SEQ ID NO: 53658 - protein, 270 aa, Homo sapiens; identical to SEQ ID NO: 53636
  Payload ID: 10643
  Gene Symbol: MSH5
  Gene Name: mutS homolog 5
  Uniprot ID: O43196
  ENSP ID: ENSP00000404892

SEQ ID NO: 53659 - protein, 728 aa, Homo sapiens
  Payload ID: 10643
  Gene Symbol: MSH5
  Gene Name: mutS homolog 5
  ENSP ID: ENSP00000405073
MASLGANPRRTPQGPRPGAASSGFPSPAPVPGPREAEEEEVEEEEELAEIHLCVLWNSGYLGIAYYDTSDSTIHFMPDAPDHESLKLLQRVLDEINPQSVVTSAKQDENMTRFLGKLASQEHREPKRPEIIFLPSVDFGLEISKQRLLSGNYSFIPDAMTATEKILFLSSIIPFDCLLTVRALGGLLKFLGRRRIGVELEDYNVSVPILGFKKFMLTHLVNIDQDTYSVLQIFKSESHPSVYKVASGLKEGLSLFGILNRCHCKWGEKLLRLWFTRPTHDLGELSSRLDVIQFFLLPQNLDMAQMLHRLLGHIKNVPLILKRMKLSHTKVSDWQVLYKTVYSALGLRDACRSLPQSIQLFRDIAQEFSDDLHHIASLIGKVVDFEGSLAENRFTVLPNIDPEIDEKKRRLMGLPSFLTEVARKELENLDSRIPSCSVIYIPLIGFLLSIPRLPSMVEASDFEINGLDFMFLSEEKLHYRSARTKELDALLGDLHCEIRDQETLLMYQLQCQVLARAAVLTRVLDLASRLDVLLALASAARDYGYSRPRYSPQVLGVRIQNGRHPLMELCARTFVPNSTECGGDKGRVKVITGPNSSGKSIYLKQVGLITFMALVGSFVPAEEAEIGAVDAIFTRIHSCESISLGLSTFMIDLNQQVAKAVNNATAQSLVLIDEFGKGTNTVDGLALLAAVLRHWLARGPTCPHIFVATNFLSLVQLQLLPQGPLVQYL

SEQ ID NO: 53660 - protein, 496 aa, Homo sapiens; identical to SEQ ID NO: 53055
  Payload ID: 10643
  Gene Symbol: MSH5
  Gene Name: mutS homolog 5
  ENSP ID: ENSP00000405530

SEQ ID NO: 53661 - protein, 156 aa, Homo sapiens; identical to SEQ ID NO: 53621
  Payload ID: 10643
  Gene Symbol: MSH5
  Gene Name: mutS homolog 5
  ENSP ID: ENSP00000406211

SEQ ID NO: 53662 - protein, 834 aa, Homo sapiens; identical to SEQ ID NO: 53617
  Payload ID: 10643
  Gene Symbol: MSH5
  Gene Name: mutS homolog 5
  Uniprot ID: O43196
  ENSP ID: ENSP00000406269

SEQ ID NO: 53663 - protein, 156 aa, Homo sapiens; identical to SEQ ID NO: 53621
  Payload ID: 10643
  Gene Symbol: MSH5
  Gene Name: mutS homolog 5
  ENSP ID: ENSP00000406310

SEQ ID NO: 53664 - protein, 637 aa, Homo sapiens
  Payload ID: 10643
  Gene Symbol: MSH5
  Gene Name: mutS homolog 5
  ENSP ID: ENSP00000406352
MASLGANPRRTPQGPRPGAASSGFPSPAPVPGPREAEEEEVEEEEELAEIHLCVLWNSGYLGIAYYDTSDSTIHFMPDAPDHESLKLLQRVLDEINPQSVVTSAKQDENMTRFLGKLASQEHREPKRPEIIFLPSVDFGLEISKQRLLSGNYSFIPDAMTATEKILFLSSIIPFDCLLTVRALGGLLKFLGRRRIGVELEDYNVSVPILGFKKFMLTHLVNIDQDTYSVLQIFKSESHPSVYKVASGLKEGLSLFGILNRCHCKWGEKLLRLWFTRPTHDLGELSSRLDVIQFFLLPQNLDMAQMLHRLLGHIKNVPLILKRMKLSHTKVSDWQVLYKTVYSALGLRDACRSLPQSIQLFRDIAQEFSDDLHHIASLIGKVVDFEGSLAENRFTVLPNIDPEIDEKKRRLMGLPSFLTEVARKELENLDSRIPSCSVIYIPLIGFLLSIPRLPSMVEASDFEINGLDFMFLSEEKLHYRSARTKELDALLGDLHCEIRDQETLLMYQLQCQVLARAAVLTRVLDLASRLDVLLALASAARDYGYSRPRYSPQVLGVRIQNGRHPLMELCARTFVPNSTECGGDKGRVKVITGPNSSGKSIYLKQLRIHLPWPLHLHDRPQPGGESSEQCHCTVAGPY

SEQ ID NO: 53665 - protein, 156 aa, Homo sapiens; identical to SEQ ID NO: 53621
  Payload ID: 10643
  Gene Symbol: MSH5
  Gene Name: mutS homolog 5
  ENSP ID: ENSP00000406849

SEQ ID NO: 53666 - protein, 835 aa, Homo sapiens; identical to SEQ ID NO: 53615
  Payload ID: 10643
  Gene Symbol: MSH5
  Gene Name: mutS homolog 5
  Uniprot ID: O43196
  ENSP ID: ENSP00000406868

SEQ ID NO: 53667 - protein, 835 aa, Homo sapiens; identical to SEQ ID NO: 53615
  Payload ID: 10643
  Gene Symbol: MSH5
  Gene Name: mutS homolog 5
  Uniprot ID: O43196
  ENSP ID: ENSP00000407047

SEQ ID NO: 53668 - protein, 333 aa, Homo sapiens; identical to SEQ ID NO: 53634
  Payload ID: 10643
  Gene Symbol: MSH5
  Gene Name: mutS homolog 5
  ENSP ID: ENSP00000407288

SEQ ID NO: 53669 - protein, 496 aa, Homo sapiens; identical to SEQ ID NO: 53055
  Payload ID: 10643
  Gene Symbol: MSH5
  Gene Name: mutS homolog 5
  ENSP ID: ENSP00000408136

SEQ ID NO: 53670 - protein, 834 aa, Homo sapiens; identical to SEQ ID NO: 53617
  Payload ID: 10643
  Gene Symbol: MSH5
  Gene Name: mutS homolog 5
  Uniprot ID: O43196
  ENSP ID: ENSP00000409181

SEQ ID NO: 53671 - protein, 401 aa, Homo sapiens
  Payload ID: 10643
  Gene Symbol: MSH5
  Gene Name: mutS homolog 5
  ENSP ID: ENSP00000409468
MWPVLLFVFLSQTVYSALGLRDACRSLPQSIQLFRDIAQEFSDDLHHIASLIGKVVDFEGSLAENRFTVLPNIDPEIDEKKRRLMGLPSFLTEVARKELENLDSRIPSCSVIYIPLIGFLLSIPRLPSMVEASDFEINGLDFMFLSEEKLHYRSARTKELDALLGDLHCEIRDQETLLMYQLQCQVLARAAVLTRVLDLASRLDVLLALASAARDYGYSRPRYSPQVLGVRIQNGRHPLMELCARTFVPNSTECGGDKGRVKVITGPNSSGKSIYLKQVGLITFMALVGSFVPAEEAEIGAVDAIFTRIHSCESISLGLSTFMIDLNQVAKAVNNATAQSLVLIDEFGKGTNTVDGLALLAAVLRHWLARGPTCPHIFVATNFLSLVQLQLLPQGPLVQYL

SEQ ID NO: 53672 - protein, 497 aa, Homo sapiens; identical to SEQ ID NO: 53620
  Payload ID: 10643
  Gene Symbol: MSH5
  Gene Name: mutS homolog 5
  ENSP ID: ENSP00000409866

SEQ ID NO: 53673 - protein, 194 aa, Homo sapiens; identical to SEQ ID NO: 53623
  Payload ID: 10643
  Gene Symbol: MSH5
  Gene Name: mutS homolog 5
  ENSP ID: ENSP00000410698

SEQ ID NO: 53674 - protein, 333 aa, Homo sapiens; identical to SEQ ID NO: 53634
  Payload ID: 10643
  Gene Symbol: MSH5
  Gene Name: mutS homolog 5
  ENSP ID: ENSP00000411551

SEQ ID NO: 53675 - protein, 158 aa, Homo sapiens; identical to SEQ ID NO: 53638
  Payload ID: 10643
  Gene Symbol: MSH5
  Gene Name: mutS homolog 5
  ENSP ID: ENSP00000411570

SEQ ID NO: 53676 - protein, 496 aa, Homo sapiens; identical to SEQ ID NO: 53055
  Payload ID: 10643
  Gene Symbol: MSH5
  Gene Name: mutS homolog 5
  ENSP ID: ENSP00000412179

SEQ ID NO: 53677 - protein, 156 aa, Homo sapiens; identical to SEQ ID NO: 53621
  Payload ID: 10643
  Gene Symbol: MSH5
  Gene Name: mutS homolog 5
  ENSP ID: ENSP00000413269

SEQ ID NO: 53678 - protein, 727 aa, Homo sapiens; identical to SEQ ID NO: 53648
  Payload ID: 10643
  Gene Symbol: MSH5
  Gene Name: mutS homolog 5
  ENSP ID: ENSP00000413831

SEQ ID NO: 53679 - protein, 821 aa, Homo sapiens; identical to SEQ ID NO: 53635
  Payload ID: 10643
  Gene Symbol: MSH5
  Gene Name: mutS homolog 5
  ENSP ID: ENSP00000414937

SEQ ID NO: 53680 - protein, 194 aa, Homo sapiens; identical to SEQ ID NO: 53623
  Payload ID: 10643
  Gene Symbol: MSH5
  Gene Name: mutS homolog 5
  ENSP ID: ENSP00000415135

SEQ ID NO: 53681 - protein, 65 aa, Homo sapiens
  Payload ID: 10643
  Gene Symbol: MSH5
  Gene Name: mutS homolog 5
  ENSP ID: ENSP00000415294
TAQSLVLIDEFGKGTNTVDGLALLAAVLRHWLARGPTCPHIFVATNFLSLVQLQLLPQGPLVQYL

SEQ ID NO: 53682 - protein, 287 aa, Homo sapiens
  Payload ID: 10643
  Gene Symbol: MSH5
  Gene Name: mutS homolog 5
  ENSP ID: ENSP00000415811
MASLGANPRRTPQGPRPGAASSGFPSPAPVPGPREAEEEEVEEEEELAEIHLCVLWNSGYLGIAYYDTSDSTIHFMPDAPDHESLKLLQRVLDEINPQSVVTSAKQDENMTRFLGKLASQEHREPKRPEIIFLPSVDFGLEISKQRLLSGNYSFIPDAMTATEKILFLSSIIPFDCLLTPPGDLRFTPIPLLIPSQVRALGGLLKFLGRRRIGVELEDYNVSVPILGFKKFMLTHLVNIDQDTYSVLQIFKSESHPSVYKVASGLKEGLSLFGILNRCHCKWGEKLL

SEQ ID NO: 53683 - protein, 43 aa, Homo sapiens
  Payload ID: 10643
  Gene Symbol: MSH5
  Gene Name: mutS homolog 5
  ENSP ID: ENSP00000419131
  MOD_RES (1)..(1): Any amino acid
XRIGVELEDYNVSVPILGFKKFMLTHLVNIDQDTYRNPQQMPL

SEQ ID NO: 53684 - protein, 159 aa, Homo sapiens
  Payload ID: 10643
  Gene Symbol: MSH5
  Gene Name: mutS homolog 5
  ENSP ID: ENSP00000419648
  MOD_RES (1)..(1): Any amino acid
XDAPDHESLKLLQRVLDEINPQSVVTSAKQDENMTRFLGKLASQEHREPKRPEIIFLPSVDFGLEISKQRLLSGNYSFIPDAMTATEKILFLSSIIPFDCLLTVRALGGLLKFLGRRRIGVELEDYNVSVPILGFKKFMLTHLVNIDQDTYRNPQQMPL

SEQ ID NO: 53685 - protein, 166 aa, Homo sapiens
  Payload ID: 10643
  Gene Symbol: MSH5
  Gene Name: mutS homolog 5
  ENSP ID: ENSP00000420232
GYSRPRYSPQVLGVRIQNGRHPLMELCARTFVPNSTECGGDKGRVKVITGPNSSGKSIYLKQVAKAVNNATAQSLVLIDEFGKGTNTVDGLALLAAVLRHWLARGPTCPHIFVATNFLSLVQLQLLPQGPLVQYLDWPRVSGQEGGLRRCCEGQPCLPHSCPGWAS

SEQ ID NO: 53686 - protein, 166 aa, Homo sapiens; identical to SEQ ID NO: 53685
  Payload ID: 10643
  Gene Symbol: MSH5
  Gene Name: mutS homolog 5
  ENSP ID: ENSP00000431340

SEQ ID NO: 53687 - protein, 47 aa, Homo sapiens
  Payload ID: 10643
  Gene Symbol: MSH5
  Gene Name: mutS homolog 5
  ENSP ID: ENSP00000431393
TVYSALGLRDACRSLPQSIQLFRDIAQEFSDDLHHIASLIGKVKSED

SEQ ID NO: 53688 - protein, 166 aa, Homo sapiens; identical to SEQ ID NO: 53685
  Payload ID: 10643
  Gene Symbol: MSH5
  Gene Name: mutS homolog 5
  ENSP ID: ENSP00000431494

SEQ ID NO: 53689 - protein, 49 aa, Homo sapiens
  Payload ID: 10643
  Gene Symbol: MSH5
  Gene Name: mutS homolog 5
  ENSP ID: ENSP00000433922
MPLHSRWSLLMNLEREPTRWMGSRFWPLCSDTGWHVDPHAPTSLWPPTF

SEQ ID NO: 53690 - protein, 166 aa, Homo sapiens; identical to SEQ ID NO: 53685
  Payload ID: 10643
  Gene Symbol: MSH5
  Gene Name: mutS homolog 5
  ENSP ID: ENSP00000434231

SEQ ID NO: 53691 - protein, 166 aa, Homo sapiens; identical to SEQ ID NO: 53685
  Payload ID: 10643
  Gene Symbol: MSH5
  Gene Name: mutS homolog 5
  ENSP ID: ENSP00000435784

SEQ ID NO: 53692 - protein, 90 aa, Homo sapiens; identical to SEQ ID NO: 53631
  Payload ID: 10643
  Gene Symbol: MSH5
  Gene Name: mutS homolog 5
  ENSP ID: ENSP00000440697

SEQ ID NO: 53693 - protein, 90 aa, Homo sapiens; identical to SEQ ID NO: 53631
  Payload ID: 10643
  Gene Symbol: MSH5
  Gene Name: mutS homolog 5
  ENSP ID: ENSP00000443668

SEQ ID NO: 53694 - protein, 1360 aa, Homo sapiens
  Payload ID: 10644
  Gene Symbol: MSH6
  Gene Name: mutS homolog 6
  Uniprot ID: P52701
  ENSP ID: ENSP00000234420
MSRQSTLYSFFPKSPALSDANKASARASREGGRAAAAPGASPSPGGDAAWSEAGPGPRPLARSASPPKAKNLNGGLRRSVAPAAPTSCDFSPGDLVWAKMEGYPWWPCLVYNHPFDGTFIREKGKSVRVHVQFFDDSPTRGWVSKRLLKPYTGSKSKEAQKGGHFYSAKPEILRAMQRADEALNKDKIKRLELAVCDEPSEPEEEEEMEVGTTYVTDKSEEDNEIESEEEVQPKTQGSRRSSRQIKKRRVISDSESDIGGSDVEFKPDTKEEGSSDEISSGVGDSESEGLNSPVKVARKRKRMVTGNGSLKRKSSRKETPSATKQATSISSETKNTLRAFSAPQNSESQAHVSGGGDDSSRPTVWYHETLEWLKEEKRRDEHRRRPDHPDFDASTLYVPEDFLNSCTPGMRKWWQIKSQNFDLVICYKVGKFYELYHMDALIGVSELGLVFMKGNWAHSGFPEIAFGRYSDSLVQKGYKVARVEQTETPEMMEARCRKMAHISKYDRVVRREICRIITKGTQTYSVLEGDPSENYSKYLLSLKEKEEDSSGHTRAYGVCFVDTSLGKFFIGQFSDDRHCSRFRTLVAHYPPVQVLFEKGNLSKETKTILKSSLSCSLQEGLIPGSQFWDASKTLRTLLEEEYFREKLSDGIGVMLPQVLKGMTSESDSIGLTPGEKSELALSALGGCVFYLKKCLIDQELLSMANFEEYIPLDSDTVSTTRSGAIFTKAYQRMVLDAVTLNNLEIFLNGTNGSTEGTLLERVDTCHTPFGKRLLKQWLCAPLCNHYAINDRLDAIEDLMVVPDKISEVVELLKKLPDLERLLSKIHNVGSPLKSQNHPDSRAIMYEETTYSKKKIIDFLSALEGFKVMCKIIGIMEEVADGFKSKILKQVISLQTKNPEGRFPDLTVELNRWDTAFDHEKARKTGLITPKAGFDSDYDQALADIRENEQSLLEYLEKQRNRIGCRTIVYWGIGRNRYQLEIPENFTTRNLPEEYELKSTKKGCKRYWTKTIEKKLANLINAEERRDVSLKDCMRRLFYNFDKNYKDWQSAVECIAVLDVLLCLANYSRGGDGPMCRPVILLPEDTPPFLELKGSRHPCITKTFFGDDFIPNDILIGCEEEEQENGKAYCVLVTGPNMGGKSTLMRQAGLLAVMAQMGCYVPAEVCRLTPIDRVFTRLGASDRIMSGESTFFVELSETASILMHATAHSLVLVDELGRGTATFDGTAIANAVVKELAETIKCRTLFSTHYHSLVEDYSQNVAVRLGHMACMVENECEDPSQETITFLYKFIKGACPKSYGFNAARLANLPEEVIQKGHRKAREFEKMNQSLRLFREVCLASERSTVDAEAVHKLLTLIKEL

SEQ ID NO: 53695 - protein, 101 aa, Homo sapiens
  Payload ID: 10644
  Gene Symbol: MSH6
  Gene Name: mutS homolog 6
  ENSP ID: ENSP00000390382
MEGYPWWPCLVYNHPFDGTFIREKGKSVRVHVQFFDDSPTRGWVSKRLLKPYTGSKSKEAQKGGHFYSAKPEILRAMQRADEALNKDKIKRLELAVCDEPS

SEQ ID NO: 53696 - protein, 115 aa, Homo sapiens
  Payload ID: 10644
  Gene Symbol: MSH6
  Gene Name: mutS homolog 6
  ENSP ID: ENSP00000397484
MEGYPWWPCLVYNHPFDGTFIREKGKSVRVHVQFFDDSPTRGWVSKRLLKPYTGSKSKEAQKGGHFYSAKPEILRAMQRADEALNKDKIKRLELAVCDEPSEPEEEEEMEVGTTY

SEQ ID NO: 53697 - protein, 160 aa, Homo sapiens
  Payload ID: 10644
  Gene Symbol: MSH6
  Gene Name: mutS homolog 6
  ENSP ID: ENSP00000405294
MSRQSTLYSFFPKSPALSDANKASARASREGGRAAAAPGASPSPGGDAAWSEAGPGPRPLARSASPPKAKNLNGGLRRSVAPAAPTSCDFSPGDLVWAKMEGYPWWPCLVYNHPFDGTFIREKGKSVRVHVQFFDDSPTRGWVSKRLLKPYTGRHNLRNR

SEQ ID NO: 53698 - protein, 151 aa, Homo sapiens
  Payload ID: 10644
  Gene Symbol: MSH6
  Gene Name: mutS homolog 6
  ENSP ID: ENSP00000406248
MEGYPWWPCLVYNHPFDGTFIREKGKSVRVHVQFFDDSPTRGWVSKRLLKPYTGSKSKEAQKGGHFYSAKPEILRAMQRADEALNKDKIKRLELAVCDEPSEPEEEEEMEVGTTYVTDKSEEDNEIESEEEVQPKTQGSRRSSRQIKKRRV

SEQ ID NO: 53699 - protein, 104 aa, Homo sapiens
  Payload ID: 10644
  Gene Symbol: MSH6
  Gene Name: mutS homolog 6
  ENSP ID: ENSP00000410570
MSRQSTLYSFFPKSPALSDANKASARASREGGRAAAAPGASPSPGGDAAWSEAGPGPRPLARSASPPKAKNLNGGLRRSVAPAAPTRFKIKGSPEGRSFLQCKA

SEQ ID NO: 53700 - protein, 1058 aa, Homo sapiens
  Payload ID: 10644
  Gene Symbol: MSH6
  Gene Name: mutS homolog 6
  Uniprot ID: P52701
  ENSP ID: ENSP00000438580
MVTGNGSLKRKSSRKETPSATKQATSISSETKNTLRAFSAPQNSESQAHVSGGGDDSSRPTVWYHETLEWLKEEKRRDEHRRRPDHPDFDASTLYVPEDFLNSCTPGMRKWWQIKSQNFDLVICYKVGKFYELYHMDALIGVSELGLVFMKGNWAHSGFPEIAFGRYSDSLVQKGYKVARVEQTETPEMMEARCRKMAHISKYDRVVRREICRIITKGTQTYSVLEGDPSENYSKYLLSLKEKEEDSSGHTRAYGVCFVDTSLGKFFIGQFSDDRHCSRFRTLVAHYPPVQVLFEKGNLSKETKTILKSSLSCSLQEGLIPGSQFWDASKTLRTLLEEEYFREKLSDGIGVMLPQVLKGMTSESDSIGLTPGEKSELALSALGGCVFYLKKCLIDQELLSMANFEEYIPLDSDTVSTTRSGAIFTKAYQRMVLDAVTLNNLEIFLNGTNGSTEGTLLERVDTCHTPFGKRLLKQWLCAPLCNHYAINDRLDAIEDLMVVPDKISEVVELLKKLPDLERLLSKIHNVGSPLKSQNHPDSRAIMYEETTYSKKKIIDFLSALEGFKVMCKIIGIMEEVADGFKSKILKQVISLQTKNPEGRFPDLTVELNRWDTAFDHEKARKTGLITPKAGFDSDYDQALADIRENEQSLLEYLEKQRNRIGCRTIVYWGIGRNRYQLEIPENFTTRNLPEEYELKSTKKGCKRYWTKTIEKKLANLINAEERRDVSLKDCMRRLFYNFDKNYKDWQSAVECIAVLDVLLCLANYSRGGDGPMCRPVILLPEDTPPFLELKGSRHPCITKTFFGDDFIPNDILIGCEEEEQENGKAYCVLVTGPNMGGKSTLMRQAGLLAVMAQMGCYVPAEVCRLTPIDRVFTRLGASDRIMSGESTFFVELSETASILMHATAHSLVLVDELGRGTATFDGTAIANAVVKELAETIKCRTLFSTHYHSLVEDYSQNVAVRLGHMACMVENECEDPSQETITFLYKFIKGACPKSYGFNAARLANLPEEVIQKGHRKAREFEKMNQSLRLFREVCLASERSTVDAEAVHKLLTLIKEL

SEQ ID NO: 53701 - protein, 1230 aa, Homo sapiens
  Payload ID: 10644
  Gene Symbol: MSH6
  Gene Name: mutS homolog 6
  Uniprot ID: P52701
  ENSP ID: ENSP00000446475
MSRQSTLYSFFPKSPALSDANKASARASREGGRAAAAPGASPSPGGDAAWSEAGPGPRPLARSASPPKAKNLNGGLRRSVGTTYVTDKSEEDNEIESEEEVQPKTQGSRRSSRQIKKRRVISDSESDIGGSDVEFKPDTKEEGSSDEISSGVGDSESEGLNSPVKVARKRKRMVTGNGSLKRKSSRKETPSATKQATSISSETKNTLRAFSAPQNSESQAHVSGGGDDSSRPTVWYHETLEWLKEEKRRDEHRRRPDHPDFDASTLYVPEDFLNSCTPGMRKWWQIKSQNFDLVICYKVGKFYELYHMDALIGVSELGLVFMKGNWAHSGFPEIAFGRYSDSLVQKGYKVARVEQTETPEMMEARCRKMAHISKYDRVVRREICRIITKGTQTYSVLEGDPSENYSKYLLSLKEKEEDSSGHTRAYGVCFVDTSLGKFFIGQFSDDRHCSRFRTLVAHYPPVQVLFEKGNLSKETKTILKSSLSCSLQEGLIPGSQFWDASKTLRTLLEEEYFREKLSDGIGVMLPQVLKGMTSESDSIGLTPGEKSELALSALGGCVFYLKKCLIDQELLSMANFEEYIPLDSDTVSTTRSGAIFTKAYQRMVLDAVTLNNLEIFLNGTNGSTEGTLLERVDTCHTPFGKRLLKQWLCAPLCNHYAINDRLDAIEDLMVVPDKISEVVELLKKLPDLERLLSKIHNVGSPLKSQNHPDSRAIMYEETTYSKKKIIDFLSALEGFKVMCKIIGIMEEVADGFKSKILKQVISLQTKNPEGRFPDLTVELNRWDTAFDHEKARKTGLITPKAGFDSDYDQALADIRENEQSLLEYLEKQRNRIGCRTIVYWGIGRNRYQLEIPENFTTRNLPEEYELKSTKKGCKRYWTKTIEKKLANLINAEERRDVSLKDCMRRLFYNFDKNYKDWQSAVECIAVLDVLLCLANYSRGGDGPMCRPVILLPEDTPPFLELKGSRHPCITKTFFGDDFIPNDILIGCEEEEQENGKAYCVLVTGPNMGGKSTLMRQAGLLAVMAQMGCYVPAEVCRLTPIDRVFTRLGASDRIMSGESTFFVELSETASILMHATAHSLVLVDELGRGTATFDGTAIANAVVKELAETIKCRTLFSTHYHSLVEDYSQNVAVRLGHMACMVENECEDPSQETITFLYKFIKGACPKSYGFNAARLANLPEEVIQKGHRKAREFEKMNQSLRLFREVCLASERSTVDAEAVHKLLTLIKEL

SEQ ID NO: 53702 - protein, 51 aa, Homo sapiens
  Payload ID: 10644
  Gene Symbol: MSH6
  Gene Name: mutS homolog 6
  ENSP ID: ENSP00000475605
MEGYPWWPCLVYNHPFDGTFIREKGKSVRVHVQFFDDSPTRGWVSKRLLKP

SEQ ID NO: 53703 - protein, 1058 aa, Homo sapiens; identical to SEQ ID NO: 53700
  Payload ID: 10644
  Gene Symbol: MSH6
  Gene Name: mutS homolog 6
  Uniprot ID: P52701
  ENSP ID: ENSP00000477844

SEQ ID NO: 53704 - protein, 1067 aa, Homo sapiens
  Payload ID: 10644
  Gene Symbol: MSH6
  Gene Name: mutS homolog 6
  ENSP ID: ENSP00000480261
MSRQSTLYSFFPKSPALSDANKASARASREGGRARCPRGLSFPRRGCGLERGWAWARPLARSASPPKAKNLNGGLRRSVAPAAPTSCDFSPGDLVWAKMEGYPWWPCLVYNHPFDGTFIREKGKSVRVHVQFFDDSPTRGWVSKRLLKPYTGSKSKEAQKGGHFYSAKPEILRAMQRADEALNKDKIKRLELAVCDEPSEPEEEEEMEVGTTYVTDKSEEDNEIESEEEVQPKTQGSRRSSRQIKKRRVISDSESDIGGSDVEFKPDTKEEGSSDEISSGVGDSESEGLNSPVKVARKRKRMVTGNGSLKRKSSRKETPSATKQATSISSETKNTLRAFSAPQNSESQAHVSGGGDDSSRPTVWYHETLEWLKEEKRRDEHRRRPDHPDFDASTLYVPEDFLNSCTPGMRKWWQIKSQNFDLVICYKVGKFYELYHMDALIGVSELGLVFMKGNWAHSGFPEIAFGRYSDSLVQKGYKVARVEQTETPEMMEARCRKMAHISKYDRVVRREICRIITKGTQTYSVLEGDPSENYSKYLLSLKEKEEDSSGHTRAYGVCFVDTSLGKFFIGQFSDDRHCSRFRTLVAHYPPVQVLFEKGNLSKETKTILKSSLSCSLQEGLIPGSQFWDASKTLRTLLEEEYFREKLSDGIGVMLPQVLKGMTSESDSIGLTPGEKSELALSALGGCVFYLKKCLIDQELLSMANFEEYIPLDSDTVSTTRSGAIFTKAYQRMVLDAVTLNNLEIFLNGTNGSTEGTLLERVDTCHTPFGKRLLKQWLCAPLCNHYAINDRLDAIEDLMVVPDKISEVVELLKKLPDLERLLSKIHNVGSPLKSQNHPDSRAIMYEETTYSKKKIIDFLSALEGFKVMCKIIGIMEEVADGFKSKILKQVISLQTKNPEGRFPDLTVELNRWDTAFDHEKARKTGLITPKAGFDSDYDQALADIRENEQSLLEYLEKQRNRIGCRTIVYWGIGRNRYQLEIPENFTTRNLPEEYELKSTKKGCKRYWTKTIEKKLANLINAEERRDVSLKDCMRRLFYNFDKNYKDWQSAVECIAVLGKTLNKLVLRL

SEQ ID NO: 53705 - protein, 327 aa, Homo sapiens [sequence omitted]

SEQ ID NO: 53706 - protein, 522 aa, Homo sapiens
  Payload ID: 10645
  Gene Symbol: MUTYH
  Gene Name: mutY DNA glycosylase
  Uniprot ID: Q9UIF7
  ENSP ID: ENSP00000346354
MRKPRAAVGSGHRKQAASQEGRQKHAKNNSQAKPSACDAGLARQPEEVVLQASVSSYHLFRDVAEVTAFRGSLLSWYDQEKRDLPWRRRAEDEMDLDRRAYAVWVSEVMLQQTQVATVINYYTGWMQKWPTLQDLASASLEEVNQLWAGLGYYSRGRRLQEGARKVVEELGGHMPRTAETLQQLLPGVGRYTAGAIASIAFGQATGVVDGNVARVLCRVRAIGADPSSTLVSQQLWGLAQQLVDPARPGDFNQAAMELGATVCTPQRPLCSQCPVESLCRARQRVEQEQLLASGSLSGSPDVEECAPNTGQCHLCLPPSEPWDQTLGVVNFPRKASRKPPREESSATCVLEQPGALGAQILLVQRPNSGLLAGLWEFPSVTWEPSEQLQRKALLQELQRWAGPLPATHLRHLGEVVHTFSHIKLTYQVYGLALEGQTPVTTVPPGARWLTQEEFHTAAVSTAMKKVFRVYQGQQPGTCMGSKRSQVSSPCSRKKPRMGQQVLDNFFRSHISTDAHSLNSAAQ

SEQ ID NO: 53707 - protein, 521 aa, Homo sapiens
  Payload ID: 10645
  Gene Symbol: MUTYH
  Gene Name: mutY DNA glycosylase
  Uniprot ID: Q9UIF7
  ENSP ID: ENSP00000347685
MRKPRAAVGSGHRKQAASQEGRQKHAKNNSQAKPSACDGLARQPEEVVLQASVSSYHLFRDVAEVTAFRGSLLSWYDQEKRDLPWRRRAEDEMDLDRRAYAVWVSEVMLQQTQVATVINYYTGWMQKWPTLQDLASASLEEVNQLWAGLGYYSRGRRLQEGARKVVEELGGHMPRTAETLQQLLPGVGRYTAGAIASIAFGQATGVVDGNVARVLCRVRAIGADPSSTLVSQQLWGLAQQLVDPARPGDFNQAAMELGATVCTPQRPLCSQCPVESLCRARQRVEQEQLLASGSLSGSPDVEECAPNTGQCHLCLPPSEPWDQTLGVVNFPRKASRKPPREESSATCVLEQPGALGAQILLVQRPNSGLLAGLWEFPSVTWEPSEQLQRKALLQELQRWAGPLPATHLRHLGEVVHTFSHIKLTYQVYGLALEGQTPVTTVPPGARWLTQEEFHTAAVSTAMKKVFRVYQGQQPGTCMGSKRSQVSSPCSRKKPRMGQQVLDNFFRSHISTDAHSLNSAAQ

SEQ ID NO: 53708 - protein, 546 aa, Homo sapiens
  Payload ID: 10645
  Gene Symbol: MUTYH
  Gene Name: mutY DNA glycosylase
  Uniprot ID: Q9UIF7
  ENSP ID: ENSP00000361170
MTPLVSRLSRLWAIMRKPRAAVGSGHRKQAASQEGRQKHAKNNSQAKPSACDGMIAECPGAPAGLARQPEEVVLQASVSSYHLFRDVAEVTAFRGSLLSWYDQEKRDLPWRRRAEDEMDLDRRAYAVWVSEVMLQQTQVATVINYYTGWMQKWPTLQDLASASLEEVNQLWAGLGYYSRGRRLQEGARKVVEELGGHMPRTAETLQQLLPGVGRYTAGAIASIAFGQATGVVDGNVARVLCRVRAIGADPSSTLVSQQLWGLAQQLVDPARPGDFNQAAMELGATVCTPQRPLCSQCPVESLCRARQRVEQEQLLASGSLSGSPDVEECAPNTGQCHLCLPPSEPWDQTLGVVNFPRKASRKPPREESSATCVLEQPGALGAQILLVQRPNSGLLAGLWEFPSVTWEPSEQLQRKALLQELQRWAGPLPATHLRHLGEVVHTFSHIKLTYQVYGLALEGQTPVTTVPPGARWLTQEEFHTAAVSTAMKKVFRVYQGQQPGTCMGSKRSQVSSPCSRKKPRMGQQVLDNFFRSHISTDAHSLNSAAQ

SEQ ID NO: 53709 - protein, 521 aa, Homo sapiens; identical to SEQ ID NO: 53707
  Payload ID: 10645
  Gene Symbol: MUTYH
  Gene Name: mutY DNA glycosylase
  Uniprot ID: Q9UIF7
  ENSP ID: ENSP00000361176

SEQ ID NO: 53710 - protein, 536 aa, Homo sapiens
  Payload ID: 10645
  Gene Symbol: MUTYH
  Gene Name: mutY DNA glycosylase
  Uniprot ID: Q9UIF7
  ENSP ID: ENSP00000361182
MTPLVSRLSRLWAIMRKPRAAVGSGHRKQAASQEGRQKHAKNNSQAKPSACDAGLARQPEEVVLQASVSSYHLFRDVAEVTAFRGSLLSWYDQEKRDLPWRRRAEDEMDLDRRAYAVWVSEVMLQQTQVATVINYYTGWMQKWPTLQDLASASLEEVNQLWAGLGYYSRGRRLQEGARKVVEELGGHMPRTAETLQQLLPGVGRYTAGAIASIAFGQATGVVDGNVARVLCRVRAIGADPSSTLVSQQLWGLAQQLVDPARPGDFNQAAMELGATVCTPQRPLCSQCPVESLCRARQRVEQEQLLASGSLSGSPDVEECAPNTGQCHLCLPPSEPWDQTLGVVNFPRKASRKPPREESSATCVLEQPGALGAQILLVQRPNSGLLAGLWEFPSVTWEPSEQLQRKALLQELQRWAGPLPATHLRHLGEVVHTFSHIKLTYQVYGLALEGQTPVTTVPPGARWLTQEEFHTAAVSTAMKKVFRVYQGQQPGTCMGSKRSQVSSPCSRKKPRMGQQVLDNFFRSHISTDAHSLNSAAQ

SEQ ID NO: 53711 - protein, 535 aa, Homo sapiens
  Payload ID: 10645
  Gene Symbol: MUTYH
  Gene Name: mutY DNA glycosylase
  Uniprot ID: Q9UIF7
  ENSP ID: ENSP00000361187
MTPLVSRLSRLWAIMRKPRAAVGSGHRKQAASQEGRQKHAKNNSQAKPSACDGLARQPEEVVLQASVSSYHLFRDVAEVTAFRGSLLSWYDQEKRDLPWRRRAEDEMDLDRRAYAVWVSEVMLQQTQVATVINYYTGWMQKWPTLQDLASASLEEVNQLWAGLGYYSRGRRLQEGARKVVEELGGHMPRTAETLQQLLPGVGRYTAGAIASIAFGQATGVVDGNVARVLCRVRAIGADPSSTLVSQQLWGLAQQLVDPARPGDFNQAAMELGATVCTPQRPLCSQCPVESLCRARQRVEQEQLLASGSLSGSPDVEECAPNTGQCHLCLPPSEPWDQTLGVVNFPRKASRKPPREESSATCVLEQPGALGAQILLVQRPNSGLLAGLWEFPSVTWEPSEQLQRKALLQELQRWAGPLPATHLRHLGEVVHTFSHIKLTYQVYGLALEGQTPVTTVPPGARWLTQEEFHTAAVSTAMKKVFRVYQGQQPGTCMGSKRSQVSSPCSRKKPRMGQQVLDNFFRSHISTDAHSLNSAAQ

SEQ ID NO: 53712 - protein, 291 aa, Homo sapiens
  Payload ID: 10645
  Gene Symbol: MUTYH
  Gene Name: mutY DNA glycosylase
  ENSP ID: ENSP00000403655
MRKPRAAVGSGHRKQAASQEGRQKHAKNNSQAKPSACDGMIAECPGAPAGLARQPEEVVLQASVSSYHLFRDVAEVTAFRGSLLSWYDQEKRDLPWRRRAEDEMDLDRRAYAVWVSEVMLQQTQVATVINYYTGWMQKWPTLQDLASASLEEVNQLWAGLGYYSRGRRLQEGARKVVEELGGHMPRTAETLQQLLPGVGRYTAGAIASIAFGQATGVVDGNVARVLCRVRAIGADPSSTLVSQQLWGLAQQLVDPARPGDFNQAAMELGATVCTPQRPLCSQCPVESLCRA

SEQ ID NO: 53713 - protein, 521 aa, Homo sapiens; identical to SEQ ID NO: 53707
  Payload ID: 10645
  Gene Symbol: MUTYH
  Gene Name: mutY DNA glycosylase
  Uniprot ID: Q9UIF7
  ENSP ID: ENSP00000407590

SEQ ID NO: 53714 - protein, 549 aa, Homo sapiens
  Payload ID: 10645
  Gene Symbol: MUTYH
  Gene Name: mutY DNA glycosylase
  ENSP ID: ENSP00000408176
MTPLVSRLSRLWAIMRKPRAAVGSGHRKQAASQEGRQKHAKNNSQAKPSACDACAGMIAECPGAPAGLARQPEEVVLQASVSSYHLFRDVAEVTAFRGSLLSWYDQEKRDLPWRRRAEDEMDLDRRAYAVWVSEVMLQQTQVATVINYYTGWMQKWPTLQDLASASLEEVNQLWAGLGYYSRGRRLQEGARKVVEELGGHMPRTAETLQQLLPGVGRYTAGAIASIAFGQATGVVDGNVARVLCRVRAIGADPSSTLVSQQLWGLAQQLVDPARPGDFNQAAMELGATVCTPQRPLCSQCPVESLCRARQRVEQEQLLASGSLSGSPDVEECAPNTGQCHLCLPPSEPWDQTLGVVNFPRKASRKPPREESSATCVLEQPGALGAQILLVQRPNSGLLAGLWEFPSVTWEPSEQLQRKALLQELQRWAGPLPATHLRHLGEVVHTFSHIKLTYQVYGLALEGQTPVTTVPPGARWLTQEEFHTAAVSTAMKKVFRVYQGQQPGTCMGSKRSQVSSPCSRKKPRMGQQVLDNFFRSHISTDAHSLNSAAQ

SEQ ID NO: 53715 - protein, 532 aa, Homo sapiens
  Payload ID: 10645
  Gene Symbol: MUTYH
  Gene Name: mutY DNA glycosylase
  Uniprot ID: Q9UIF7
  ENSP ID: ENSP00000409718
MRKPRAAVGSGHRKQAASQEGRQKHAKNNSQAKPSACDGMIAECPGAPAGLARQPEEVVLQASVSSYHLFRDVAEVTAFRGSLLSWYDQEKRDLPWRRRAEDEMDLDRRAYAVWVSEVMLQQTQVATVINYYTGWMQKWPTLQDLASASLEEVNQLWAGLGYYSRGRRLQEGARKVVEELGGHMPRTAETLQQLLPGVGRYTAGAIASIAFGQATGVVDGNVARVLCRVRAIGADPSSTLVSQQLWGLAQQLVDPARPGDFNQAAMELGATVCTPQRPLCSQCPVESLCRARQRVEQEQLLASGSLSGSPDVEECAPNTGQCHLCLPPSEPWDQTLGVVNFPRKASRKPPREESSATCVLEQPGALGAQILLVQRPNSGLLAGLWEFPSVTWEPSEQLQRKALLQELQRWAGPLPATHLRHLGEVVHTFSHIKLTYQVYGLALEGQTPVTTVPPGARWLTQEEFHTAAVSTAMKKVFRVYQGQQPGTCMGSKRSQVSSPCSRKKPRMGQQVLDNFFRSHISTDAHSLNSAAQ

SEQ ID NO: 53716 - protein, 215 aa, Homo sapiens
  Payload ID: 10645
  Gene Symbol: MUTYH
  Gene Name: mutY DNA glycosylase
  ENSP ID: ENSP00000410263
MTPLVSRLSRLWEVNQLWAGLGYYSRGRRLQEGARKVVEELGGHMPRTAETLQQLLPGVGRYTAGAIASIAFGQATGVVDGNVARVLCRVRAIGADPSSTLVSQQLWGLAQQLVDPARPGDFNQAAMELGATVCTPQRPLCSQCPVESLCRARQRVEQEQLLASGSLSGSPDVEECAPNTGQCHLCLPPSEPWDQTLGVVNFPRKASRKPPREES

SEQ ID NO: 53717 - protein, 44 aa, Homo sapiens
  Payload ID: 10645
  Gene Symbol: MUTYH
  Gene Name: mutY DNA glycosylase
  ENSP ID: ENSP00000431264
  MOD_RES (1)..(1): Any amino acid
XTPVTTVPPGARWLTQEEFHTAAVSTAMKKVFRVYQGQQPGTCM

SEQ ID NO: 53718 - protein, 62 aa, Homo sapiens
  Payload ID: 10645
  Gene Symbol: MUTYH
  Gene Name: mutY DNA glycosylase
  ENSP ID: ENSP00000431292
MRKPRAAVGSGHRKQAASQEGRQKHAKNNSQAKPSACDGFQKVPGVLSVQSEKAPHGPASPG

SEQ ID NO: 53719 - protein, 55 aa, Homo sapiens
  Payload ID: 10645
  Gene Symbol: MUTYH
  Gene Name: mutY DNA glycosylase
  ENSP ID: ENSP00000431568
MTPLVSRLSRLWAIMRKPRAAVGSGHRKQAASQEGRQKHAKNNSQAKPSACDGRR

SEQ ID NO: 53720 - protein, 216 aa, Homo sapiens
  Payload ID: 10645
  Gene Symbol: MUTYH
  Gene Name: mutY DNA glycosylase
  ENSP ID: ENSP00000432330
MRKPRAAVGSGHRKQAASQEGRQKHAKNNSQAKPSACDGGESTLGWPGLLFSWPAAAGGSSEGLLAGLWEFPSVTWEPSEQLQRKALLQELQRWAGPLPATHLRHLGEVVHTFSHIKLTYQVYGLALEGQTPVTTVPPGARWLTQEEFHTAAVSTAMKKVFRVYQGQQPGTCMGSKRSQVSSPCSRKKPRMGQQVLDNFFRSHISTDAHSLNSAAQ

SEQ ID NO: 53721 - protein, 213 aa, Homo sapiens
  Payload ID: 10645
  Gene Symbol: MUTYH
  Gene Name: mutY DNA glycosylase
  ENSP ID: ENSP00000432528
  MOD_RES (1)..(1): Any amino acid
XPGDFNQAAMELGATVCTPQRPLCSQCPVESLCRARQRVEQEQLLASGSLSGSPDVEECGLLAGLWEFPSVTWEPSEQLQRKALLQELQRWAGPLPATHLRHLGEVVHTFSHIKLTYQVYGLALEGQTPVTTVPPGARWLTQEEFHTAAVSTAMKKVFRVYQGQQPGTCMGSKRSQVSSPCSRKKPRMGQQVLDNFFRSHISTDAHSLNSAAQ

SEQ ID NO: 53722 - protein, 535 aa, Homo sapiens
  Payload ID: 10645
  Gene Symbol: MUTYH
  Gene Name: mutY DNA glycosylase
  ENSP ID: ENSP00000433130
MRKPRAAVGSGHRKQAASQEGRQKHAKNNSQAKPSACDACAGMIAECPGAPAGLARQPEEVVLQASVSSYHLFRDVAEVTAFRGSLLSWYDQEKRDLPWRRRAEDEMDLDRRAYAVWVSEVMLQQTQVATVINYYTGWMQKWPTLQDLASASLEEVNQLWAGLGYYSRGRRLQEGARKVVEELGGHMPRTAETLQQLLPGVGRYTAGAIASIAFGQATGVVDGNVARVLCRVRAIGADPSSTLVSQQLWGLAQQLVDPARPGDFNQAAMELGATVCTPQRPLCSQCPVESLCRARQRVEQEQLLASGSLSGSPDVEECAPNTGQCHLCLPPSEPWDQTLGVVNFPRKASRKPPREESSATCVLEQPGALGAQILLVQRPNSGLLAGLWEFPSVTWEPSEQLQRKALLQELQRWAGPLPATHLRHLGEVVHTFSHIKLTYQVYGLALEGQTPVTTVPPGARWLTQEEFHTAAVSTAMKKVFRVYQGQQPGTCMGSKRSQVSSPCSRKKPRMGQQVLDNFFRSHISTDAHSLNSAAQ

SEQ ID NO: 53723 - protein, 40 aa, Homo sapiens
  Payload ID: 10645
  Gene Symbol: MUTYH
  Gene Name: mutY DNA glycosylase
  ENSP ID: ENSP00000433843
MRKPRAAVGSGHRKQAASQEGRQKHAKNNSQAKPSACDET

SEQ ID NO: 53724 - protein, 185 aa, Homo sapiens
  Payload ID: 10645
  Gene Symbol: MUTYH
  Gene Name: mutY DNA glycosylase
  ENSP ID: ENSP00000434985
MRKPRAAVGSGHRKQAASQEGRQKHAKNNSQAKPSACDAGLARQPEEVVLQASVSSYHLFRDVAEVTAFRGSLLSWYDQEKRDLPWRRRAEDEMDLDRRAYAGGESTLGWPGLLFSWPAAAGGSSEGGRGARGPHATYSRDPAAAPAWRGALHSWGHCLYRLWPGNRCGGWQRSTGAVPCPSHWC

SEQ ID NO: 53725 - protein, 184 aa, Homo sapiens
  Payload ID: 10645
  Gene Symbol: MUTYH
  Gene Name: mutY DNA glycosylase
  ENSP ID: ENSP00000435889
ATGVVDGNVARVLCRVRAIGADPSSTLVSQQLWGLAQQLVDPARPGDFNQAAMELGATVCTPQRPLCSQCPVESLCRARQRVEQEQLLASGSLSGSPDVEECGFGDLRSQLPTLDSATCACLPRSPGTRPWEWSTSPERPAASPPGRRALPPVFWNSLGPLGPKFCWCRGPTQVCWQDCGSSRP

SEQ ID NO: 53726 - protein, 99 aa, Homo sapiens
  Payload ID: 10645
  Gene Symbol: MUTYH
  Gene Name: mutY DNA glycosylase
  ENSP ID: ENSP00000436430
AIMRKPRAAVGSGHRKQAASQEGRQKHAKNNSQAKPSACDGGRGARGPHATYSRDPAAAPAWRGALHSWGHCLYRLWPGNRCGGWQRSTGAVPCPSHWC

SEQ ID NO: 53727 - protein, 94 aa, Homo sapiens
  Payload ID: 10645
  Gene Symbol: MUTYH
  Gene Name: mutY DNA glycosylase
  ENSP ID: ENSP00000436469
MAYKAIMRKPRAAVGSGHRKQAASQEGRQKHAKNNSQAKPSACDGLARQPEEVVLQASVSSYHLFRDVAEVTAFRGSLLSWYDQEKRDLPWRRR

SEQ ID NO: 53728 - protein, 45 aa, Homo sapiens
  Payload ID: 10645
  Gene Symbol: MUTYH
  Gene Name: mutY DNA glycosylase
  ENSP ID: ENSP00000436478
MTPLVSRLSRLWVRWTCGHHEEATSSRGKWSQEAGSQPGREAEAC

SEQ ID NO: 53729 - protein, 54 aa, Homo sapiens
  Payload ID: 10645
  Gene Symbol: MUTYH
  Gene Name: mutY DNA glycosylase
  ENSP ID: ENSP00000436597
MTPLVSRLSRLWAIMRKPRAAVGSGHRKQAASQEGRQKHAKNNSQAKPSACDET

SEQ ID NO: 53730 - protein, 216 aa, Homo sapiens; identical to SEQ ID NO: 53720
  Payload ID: 10645
  Gene Symbol: MUTYH
  Gene Name: mutY DNA glycosylase
  ENSP ID: ENSP00000437093

SEQ ID NO: 53731 - protein, 54 aa, Homo sapiens; identical to SEQ ID NO: 53729
  Payload ID: 10645
  Gene Symbol: MUTYH
  Gene Name: mutY DNA glycosylase
  ENSP ID: ENSP00000437166

SEQ ID NO: 53732 - protein, 639 aa, Homo sapiens
  Payload ID: 10646
  Gene Symbol: MX1
  Gene Name: MX dynamin-like GTPase 1
  ENSP ID: ENSP00000288383
MVVSEVDIAKADPAAASHPLLLNGDATVAQKNPGSVAENNLCSQYEEKVRPCIDLIDSLRALGVEQDLALPAIAVIGIVTRCPLVLKLKKLVNEDKWRGKVSYQDYEIEISDASEVEKEINKAQNAIAGEGMGISHELITLEISSRDVPDLTLIDLPGITRVAVGNQPADIGYKIKTLIKKYIQRQETISLVVVPSNVDIATTEALSMAQEVDPEGDRTIGILTKPDLVDKGTEDKVVDVVRNLVFHLKKGYMIVKCRGQQEIQDQLSLSEALQREKIFFENHPYFRDLLEEGKATVPCLAEKLTSELITHICKSLPLLENQIKETHQRITEELQKYGVDIPEDENEKMFFLIDKVNAFNQDITALMQGEETVGEEDIRLFTRLRHEFHKWSTIIENNFQEGHKILSRKIQKFENQYRGRELPGFVNYRTFETIVKQQIKALEEPAVDMLHTVTDMVRLAFTDVSIKNFEEFFNLHRTAKSKIEDIRAEQEREGEKLIRLHFQMEQIVYCQDQVYRGALQKVREKELEEEKKKKSWDFGAFQSSSATDSSMEEIFQHLMAYHQEASKRISSHIPLIIQFFMLQTYGQQLQKAMLQLLQDKDTYSWLLKERSDTSDKRKFLKERLARLTQARRRLAQFPG

SEQ ID NO: 53733 - protein, 662 aa, Homo sapiens
  Payload ID: 10646
  Gene Symbol: MX1
  Gene Name: MX dynamin-like GTPase 1
  Uniprot ID: P20591
  ENSP ID: ENSP00000381599
MVVSEVDIAKADPAAASHPLLLNGDATVAQKNPGSVAENNLCSQYEEKVRPCIDLIDSLRALGVEQDLALPAIAVIGDQSSGKSSVLEALSGVALPRGSGIVTRCPLVLKLKKLVNEDKWRGKVSYQDYEIEISDASEVEKEINKAQNAIAGEGMGISHELITLEISSRDVPDLTLIDLPGITRVAVGNQPADIGYKIKTLIKKYIQRQETISLVVVPSNVDIATTEALSMAQEVDPEGDRTIGILTKPDLVDKGTEDKVVDVVRNLVFHLKKGYMIVKCRGQQEIQDQLSLSEALQREKIFFENHPYFRDLLEEGKATVPCLAEKLTSELITHICKSLPLLENQIKETHQRITEELQKYGVDIPEDENEKMFFLIDKVNAFNQDITALMQGEETVGEEDIRLFTRLRHEFHKWSTIIENNFQEGHKILSRKIQKFENQYRGRELPGFVNYRTFETIVKQQIKALEEPAVDMLHTVTDMVRLAFTDVSIKNFEEFFNLHRTAKSKIEDIRAEQEREGEKLIRLHFQMEQIVYCQDQVYRGALQKVREKELEEEKKKKSWDFGAFQSSSATDSSMEEIFQHLMAYHQEASKRISSHIPLIIQFFMLQTYGQQLQKAMLQLLQDKDTYSWLLKERSDTSDKRKFLKERLARLTQARRRLAQFPG

SEQ ID NO: 53734 - protein, 662 aa, Homo sapiens; identical to SEQ ID NO: 53733
  Payload ID: 10646
  Gene Symbol: MX1
  Gene Name: MX dynamin-like GTPase 1
  Uniprot ID: P20591
  ENSP ID: ENSP00000381601

SEQ ID NO: 53735 - protein, 25 aa, Homo sapiens
  Payload ID: 10646
  Gene Symbol: MX1
  Gene Name: MX dynamin-like GTPase 1
  ENSP ID: ENSP00000392151
MVVSEVDIAKADPAAASHPLLLNGD

SEQ ID NO: 53736 - protein, 77 aa, Homo sapiens
  Payload ID: 10646
  Gene Symbol: MX1
  Gene Name: MX dynamin-like GTPase 1
  ENSP ID: ENSP00000393931
MVVSEVDIAKADPAAASHPLLLNGDATVAQKNPGSVAENNLCSQYEEKVRPCIDLIDSLRALGVEQDLALPAIAVIG

SEQ ID NO: 53737 - protein, 197 aa, Homo sapiens
  Payload ID: 10646
  Gene Symbol: MX1
  Gene Name: MX dynamin-like GTPase 1
  ENSP ID: ENSP00000400923
MVVSEVDIAKADPAAASHPLLLNGDATVAQKNPGSVAENNLCSQYEEKVRPCIDLIDSLRALGVEQDLALPAIAVIGDQSSGKSSVLEALSGVALPRGSGIVTRCPLVLKLKKLVNEDKWRGKVSYQDYEIEISDASEVEKEINKAQNAIAGEGMGISHELITLEISSRDVPDLTLIDLPGITRVAVGNQPADIGYK

SEQ ID NO: 53738 - protein, 201 aa, Homo sapiens
  Payload ID: 10646
  Gene Symbol: MX1
  Gene Name: MX dynamin-like GTPase 1
  ENSP ID: ENSP00000402215
MVVSEVDIAKADPAAASHPLLLNGDATVAQKNPGSVAENNLCSQYEEKVRPCIDLIDSLRALGVEQDLALPAIAVIGDQSSGKSSVLEALSGVALPRGSGIVTRCPLVLKLKKLVNEDKWRGKVSYQDYEIEISDASEVEKEINKAQNAIAGEGMGISHELITLEISSRDVPDLTLIDLPGITRVAVGNQPADIGYKIKTL

SEQ ID NO: 53739 - protein, 68 aa, Homo sapiens
  Payload ID: 10646
  Gene Symbol: MX1
  Gene Name: MX dynamin-like GTPase 1
  ENSP ID: ENSP00000408498
MVVSEVDIAKADPAAASHPLLLNGDATVAQKNPGSVAENNLCSQYEEKVRPCIDLIDSLRALGVEQDL

SEQ ID NO: 53740 - protein, 662 aa, Homo sapiens; identical to SEQ ID NO: 53733
  Payload ID: 10646
  Gene Symbol: MX1
  Gene Name: MX dynamin-like GTPase 1
  Uniprot ID: P20591
  ENSP ID: ENSP00000410523

SEQ ID NO: 53741 - protein, 35 aa, Homo sapiens
  Payload ID: 10646
  Gene Symbol: MX1
  Gene Name: MX dynamin-like GTPase 1
  ENSP ID: ENSP00000410989
MVVSEVDIAKADPAAASHPLLLNGDATVAQKNPGS

SEQ ID NO: 53742 - protein, 508 aa, Homo sapiens
  Payload ID: 10646
  Gene Symbol: MX1
  Gene Name: MX dynamin-like GTPase 1
  Uniprot ID: P20591
  ENSP ID: ENSP00000478441
MVVSEVDIAKADPAAASHPLLLNGDATVAQKNPGSVAENNLCSQYEEKVRPCIDLIDSLRALGVEQDLALPAIAVIGDQSSGKSSVLEALSGVALPRGSGIVTRCPLVLKLKKLVNEDKWRGKVSYQDYEIEISDASEVEKEINKAQNAIAGEGMGISHELITLEISSRDVPDLTLIDLPGITRVAVGNQPADIGYKIKTLIKKYIQRQETISLVVVPSNVDIATTEALSMAQEVDPEGDRTIGILTKPDLVDKGTEDKVVDVVRNLVFHLKKGYMIVKCRGQQEIQDQLSLSEALQREKIFFENHPYFRDLLEEGKATVPCLAEKLTSELITHICKSLPLLENQIKETHQRITEELQKYGVDIPEDENEKMFFLIDKVNAFNQDITALMQGEETVGEEDIRLFTRLRHEFHKWSTIIENNFQEGGQQAHLQPHPFDHPVLHAPDVRPAASEGHAAAPAGQGHLQLAPEGAERHQRQAEVPEGAACTADAGSAPACPVPRLTTLCPAP

SEQ ID NO: 53743 - protein, 715 aa, Homo sapiens
  Payload ID: 10647
  Gene Symbol: MX2
  Gene Name: MX dynamin-like GTPase 2
  Uniprot ID: P20592
  ENSP ID: ENSP00000333657
MSKAHKPWPYRRRSQFSSRKYLKKEMNSFQQQPPPFGTVPPQMMFPPNWQGAEKDAAFLAKDFNFLTLNNQPPPGNRSQPRAMGPENNLYSQYEQKVRPCIDLIDSLRALGVEQDLALPAIAVIGDQSSGKSSVLEALSGVALPRGSGIVTRCPLVLKLKKQPCEAWAGRISYRNTELELQDPGQVEKEIHKAQNVMAGNGRGISHELISLEITSPEVPDLTIIDLPGITRVAVDNQPRDIGLQIKALIKKYIQRQQTINLVVVPCNVDIATTEALSMAHEVDPEGDRTIGILTKPDLMDRGTEKSVMNVVRNLTYPLKKGYMIVKCRGQQEITNRLSLAEATKKEITFFQTHPYFRVLLEEGSATVPRLAERLTTELIMHIQKSLPLLEGQIRESHQKATEELRRCGADIPSQEADKMFFLIEKIKMFNQDIEKLVEGEEVVRENETRLYNKIREDFKNWVGILATNTQKVKNIIHEEVEKYEKQYRGKELLGFVNYKTFEIIVHQYIQQLVEPALSMLQKAMEIIQQAFINVAKKHFGEFFNLNQTVQSTIEDIKVKHTAKAENMIQLQFRMEQMVFCQDQIYSVVLKKVREEIFNPLGTPSQNMKLNSHFPSNESSVSSFTEIGIHLNAYFLETSKRLANQIPFIIQYFMLRENGDSLQKAMMQILQEKNRYSWLLQEQSETATKRRILKERIYRLTQARHALCQFSSKEIH

SEQ ID NO: 53744 - protein, 125 aa, Homo sapiens
  Payload ID: 10647
  Gene Symbol: MX2
  Gene Name: MX dynamin-like GTPase 2
  ENSP ID: ENSP00000389256
MSKAHKPWPYRRRSQFSSRKYLKKEMNSFQQQPPPFGTVPPQMMFPPNWQGAEKDAAFLAKDFNFLTLNNQPPPGNRSQPRAMGPENNLYSQYEQKVRPCIDLIDSLRALGVEQDLALPAIAVIG

SEQ ID NO: 53745 - protein, 129 aa, Homo sapiens
  Payload ID: 10647
  Gene Symbol: MX2
  Gene Name: MX dynamin-like GTPase 2
  ENSP ID: ENSP00000393975
MSKAHKPWPYRRRSQFSSRKYLKKEMNSFQQQPPPFGTVPPQMMFPPNWQGAEKDAAFLAKDFNFLTLNNQPPPGNRSQPRAMGPENNLYSQYEQKVRPCIDLIDSLRALGVEQDLALPAIAVIGDQSS

SEQ ID NO: 53746 - protein, 133 aa, Homo sapiens
  Payload ID: 10647
  Gene Symbol: MX2
  Gene Name: MX dynamin-like GTPase 2
  ENSP ID: ENSP00000410188
MSKAHKPWPYRRRSQFSSRKYLKKEMNSFQQQPPPFGTVPPQMMFPPNWQGAEKDAAFLAKDFNFLTLNNQPPPGNRSQPRAMGPENNLYSQYEQKVRPCIDLIDSLRALGVEQDLALPAIAVIGDQSSGKSS

SEQ ID NO: 53747 - protein, 14 aa, Homo sapiens
  Payload ID: 10647
  Gene Symbol: MX2
  Gene Name: MX dynamin-like GTPase 2
  ENSP ID: ENSP00000411179
MSKAHKPWPYRRRS

SEQ ID NO: 53748 - protein, 1328 aa, Homo sapiens
  Payload ID: 10648
  Gene Symbol: MYBBP1A
  Gene Name: MYB binding protein (P160) 1a
  Uniprot ID: Q9BQG0
  ENSP ID: ENSP00000254718
MESRDPAQPMSPGEATQSGARPADRYGLLKHSREFLDFFWDIAKPEQETRLAATEKLLEYLRGRPKGSEMKYALKRLITGLGVGRETARPCYSLALAQLLQSFEDLPLCSILQQIQEKYDLHQVKKAMLRPALFANLFGVLALFQSGRLVKDQEALMKSVKLLQALAQYQNHLQEQPRKALVDILSEVSKATLQEILPEVLKADLNIILSSPEQLELFLLAQQKVPSKLKKLVGSVNLFSDENVPRLVNVLKMAASSVKKDRKLPAIALDLLRLALKEDKFPRFWKEVVEQGLLKMQFWPASYLCFRLLGAALPLLTKEQLHLVMQGDVIRHYGEHVCTAKLPKQFKFAPEMDDYVGTFLEGCQDDPERQLAVLVAFSSVTNQGLPVTPTFWRVVRFLSPPALQGYVAWLRAMFLQPDLDSLVDFSTNNQKKAQDSSLHMPERAVFRLRKWIIFRLVSIVDSLHLEMEEALTEQVARFCLFHSFFVTKKPTSQIPETKHPFSFPLENQAREAVSSAFFSLLQTLSTQFKQAPGQTQGGQPWTYHLVQFADLLLNHSHNVTTVTPFTAQQRQAWDRMLQTLKELEAHSAEARAAAFQHLLLLVGIHLLKSPAESCDLLGDIQTCIRKSLGEKPRRSRTKTIDPQEPPWVEVLVEILLALLAQPSHLMRQVARSVFGHICSHLTPRALQLILDVLNPETSEDENDRVVVTDDSDERRLKGAEDKSEEGEDNRSSESEEESEGEESEEEERDGDVDQGFREQLMTVLQAGKALGGEDSENEEELGDEAMMALDQSLASLFAEQKLRIQARRDEKNKLQKEKALRRDFQIRVLDLVEVLVTKQPENALVLELLEPLLSIIRRSLRSSSSKQEQDLLHKTARIFTHHLCRARRYCHDLGERAGALHAQVERLVQQAGRQPDSPTALYHFNASLYLLRVLKGNTAEGCVHETQEKQKAGTDPSHMPTGPQAASCLDLNLVTRVYSTALSSFLTKRNSPLTVPMFLSLFSRHPVLCQSLLPILVQHITGPVRPRHQACLLLQKTLSMREVRSCFEDPEWKQLMGQVLAKVTENLRVLGEAQTKAQHQQALSSLELLNVLFRTCKHEKLTLDLTVLLGVLQGQQQSLQQGAHSTGSSRLHDLYWQAMKTLGVQRPKLEKKDAKEIPSATQSPISKKRKKKGFLPETKKRKKRKSEDGTPAEDGTPAATGGSQPPSMGRKKRNRTKAKVPAQANGTPTTKSPAPGAPTRSPSTPAKSPKLQKKNQKPSQVNGAPGSPTEPAGQKQHQKALPKKGVLGKSPLSALARKKARLSLVIRSPSLLQSGAKKKAQVRKAGKP

SEQ ID NO: 53749 - protein, 1332 aa, Homo sapiens
  Payload ID: 10648
  Gene Symbol: MYBBP1A
  Gene Name: MYB binding protein (P160) 1a
  Uniprot ID: Q9BQG0
  ENSP ID: ENSP00000370968
MESRDPAQPMSPGEATQSGARPADRYGLLKHSREFLDFFWDIAKPEQETRLAATEKLLEYLRGRPKGSEMKYALKRLITGLGVGRETARPCYSLALAQLLQSFEDLPLCSILQQIQEKYDLHQVKKAMLRPALFANLFGVLALFQSGRLVKDQEALMKSVKLLQALAQYQNHLQEQPRKALVDILSEVSKATLQEILPEVLKADLNIILSSPEQLELFLLAQQKVPSKLKKLVGSVNLFSDENVPRLVNVLKMAASSVKKDRKLPAIALDLLRLALKEDKFPRFWKEVVEQGLLKMQFWPASYLCFRLLGAALPLLTKEQLHLVMQGDVIRHYGEHVCTAKLPKQFKFAPEMDDYVGTFLEGCQDDPERQLAVLVAFSSVTNQGLPVTPTFWRVVRFLSPPALQGYVAWLRAMFLQPDLDSLVDFSTNNQKKAQDSSLHMPERAVFRLRKWIIFRLVSIVDSLHLEMEEALTEQVARFCLFHSFFVTKKPTSQIPETKHPFSFPLENQAREAVSSAFFSLLQTLSTQFKQAPGQTQGGQPWTYHLVQFADLLLNHSHNVTTVTPFTAQQRQAWDRMLQTLKELEAHSAEARAAAFQHLLLLVGIHLLKSPAESCDLLGDIQTCIRKSLGEKPRRSRTKTIDPQEPPWVEVLVEILLALLAQPSHLMRQVARSVFGHICSHLTPRALQLILDVLNPETSEDENDRVVVTDDSDERRLKGAEDKSEEGEDNRSSESEEESEGEESEEEERDGDVDQGFREQLMTVLQAGKALGGEDSENEEELGDEAMMALDQSLASLFAEQKLRIQARRDEKNKLQKEKALRRDFQIRVLDLVEVLVTKQPENALVLELLEPLLSIIRRSLRSSSSKQEQDLLHKTARIFTHHLCRARRYCHDLGERAGALHAQVERLVQQAGRQPDSPTALYHFNASLYLLRVLKGNTAEGCVHETQEKQKAGTDPSHMPTGPQAASCLDLNLVTRVYSTALSSFLTKRNSPLTVPMFLSLFSRHPVLCQSLLPILVQHITGPVRPRHQACLLLQKTLSMREVRSCFEDPEWKQLMGQVLAKVTENLRVLGEAQTKAQHQQALSSLELLNVLFRTCKHEKLTLDLTVLLGVLQGQQQSLQQGAHSTGSSRLHDLYWQAMKTLGVQRPKLEKKDAKEIPSATQSPISKKRKKKGFLPETKKRKKRKSEDGTPAEDGTPAATGGSQPPSMGRKKRNRTKAKVPAQANGTPTTKSPAPGAPTRSPSTPAKSPKLQKKNQKPSQVNGAPGSPTEPAGQKQHQKALPKKGVLGKSPLSALARKKARLSLVIRSPSLLQSGAKKKAQTLRFTISSSKK

SEQ ID NO: 53750 - protein, 1252 aa, Homo sapiens
  Payload ID: 10648
  Gene Symbol: MYBBP1A
  Gene Name: MYB binding protein (P160) 1a
  ENSP ID: ENSP00000458919
  MOD_RES (1)..(1): Any amino acid
XGVGRETARPCYSLALAQLLQSFEDLPLCSILQQIQEKYDLHQVKKAMLRPALFANLFGVLALFQSGRLVKDQEALMKSVKLLQALAQYQNHLQEQPRKALVDILSEVSKATLQEILPEVLKADLNIILSSPEQLELFLLAQQKVPSKLKKLVGSVNLFSDENVPRLVNVLKMAASSVKKDRKLPAIALDLLRLALKEDKFPRFWKEVVEQGLLKMQFWPASYLCFRLLGAALPLLTKEQLHLVMQGDVIRHYGEHVCTAKLPKQFKFAPEMDDYVGTFLEGCQDDPERQLAVLVAFSSVTNQGLPVTPTFWRVVRFLSPPALQGYVAWLRAMFLQPDLDSLVDFSTNNQKKAQDSSLHMPERAVFRLRKWIIFRLVSIVDSLHLEMEEALTEQVARFCLFHSFFVTKKPTSQIPETKHPFSFPLENQAREAVSSAFFSLLQTLSTQFKQAPGQTQGGQPWTYHLVQFADLLLNHSHNVTTVTPFTAQQRQAWDRMLQTLKELEAHSAEARAAAFQHLLLLVGIHLLKSPAESCDLLGDIQTCIRKSLGEKPRRSRTKTIDPQEPPWVEVLVEILLALLAQPSHLMRQVARSVFGHICSHLTPRALQLILDVLNPETSEDENDRVVVTDDSDERRLKGAEDKSEEGEDNRSSESEEESEGEESEEEERDGDVDQGFREQLMTVLQAGKALGGEDSENEEELGDEAMMALDQSLASLFAEQKLRIQARRDEKNKLQKEKALRRDFQIRVLDLVEVLVTKQPENALVLELLEPLLSIIRRSLRSSSSKQEQDLLHKTARIFTHHLCRARRYCHDLGERAGALHAQVERLVQQAGRQPDSPTALYHFNASLYLLRVLKGNTAEGCVHETQEKQKAGTDPSHMPTGPQAASCLDLNLVTRVYSTALSSFLTKRNSPLTVPMFLSLFSRHPVLCQSLLPILVQHITGPVRPRHQACLLLQKTLSMREVRSCFEDPEWKQLMGQVLAKVTENLRVLGEAQTKAQHQQALSSLELLNVLFRTCKHEKLTLDLTVLLGVLQGQQQSLQQGAHSTGSSRLHDLYWQAMKTLGVQRPKLEKKDAKEIPSATQSPISKKRKKKGFLPETKKRKKRKSEDGTPAEDGTPAATGGSQPPSMGRKKRNRTKAKVPAQANGTPTTKSPAPGAPTRSPSTPAKSPKLQKKNQKPSQVNGAPGSPTEPAGQKQHQKALPKKGVLGKSPLSALARKKARLSLVIRSPSLLQSGAKKKAQTLRFTISSSKK

SEQ ID NO: 53751 - protein, 204 aa, Homo sapiens
  Payload ID: 10648
  Gene Symbol: MYBBP1A
  Gene Name: MYB binding protein (P160) 1a
  ENSP ID: ENSP00000459692
  MOD_RES (1)..(1): Any amino acid
XMPERAVFRLRKWIIFRLVSIVDSLHLEMEEALTEQVARFCLFHSFFVTKKPTSQIPETKHPFSFPLENQAREAVSSAFFSLLQTLSTQFKQAPGQTQGGQPWTYHLVQFADLLLNHSHNVTTVTPFTAQQRQVNGAPGSPTEPAGQKQHQKALPKKGVLGKSPLSALARKKARLSLVIRSPSLLQSGAKKKAQTLRFTISSSK

SEQ ID NO: 53752 - protein, 69 aa, Homo sapiens
  Payload ID: 10648
  Gene Symbol: MYBBP1A
  Gene Name: MYB binding protein (P160) 1a
  ENSP ID: ENSP00000460087
  MOD_RES (1)..(1): Any amino acid
XSEGEESEEEERDGDVDQGFREQLMTVLQAGKPPARPLLAGHENPGSPAPQVGEEGCQGDPQCHPEPHQ

SEQ ID NO: 53753 - protein, 278 aa, Homo sapiens
  Payload ID: 10649
  Gene Symbol: MSANTD1
  Gene Name: Myb/SANT-like DNA-binding domain containing 1
  Uniprot ID: Q6ZTZ1
  ENSP ID: ENSP00000411584
MVRGAGPGPSLSALSHPTGASGMAAAEGPGYLVSPQAEKHRRARNWTDAEMRGLMLVWEEFFDELKQTKRNAKVYEKMASKLFEMTGERRLGEEIKIKITNMTFQYRKLKCMTDSESAPPDWPYYLAIDGILAKVPESCDGKLPDSQPPGPSTSQTEASLSPPAKSTPLYFPYNQCSYEGRFEDDRSDSSSSLLSLKFRSEERPVKKRKVQSCHLQKKQLRLLEAMVEEQRRLSRAVEETCREVRRVLDQQHILQVQSLQLQERMMSLLERIITKSSV

SEQ ID NO: 53754 - protein, 285 aa, Homo sapiens
  Payload ID: 10649
  Gene Symbol: MSANTD1
  Gene Name: Myb/SANT-like DNA-binding domain containing 1
  ENSP ID: ENSP00000420966
MVRGAGPGPSLSALSHPTGASGMAAAEGPGYLVSPQAEKHRRARNWTDAEMRGLMLVWEEFFDELKQTKRNAKVYEKMASKLFEMTGERRLGEEIKIKITNMTFQYRKLKCMTDSESAPPDWPYYLAIDGILAKVPESCDGKLPDSQPPGPSTSQTEASLSPPAKSTPLYFPYNQCSYEGRFEDDRSDSSSSLLSLKFRSEERPVKKRKVQSCHLQKKQLRLLEAMVEEQRRLSRAVEETCREVRRVLDQQHILQIQTAAQPIAHLHFLSVDVGQARLPVARAGR

SEQ ID NO: 53755 - protein, 265 aa, Homo sapiens
  Payload ID: 10649
  Gene Symbol: MSANTD1
  Gene Name: Myb/SANT-like DNA-binding domain containing 1
  ENSP ID: ENSP00000423547
MQLCQGASGMAAAEGPGYLVSPQAEKHRRARNWTDAEMRGLMLVWEEFFDELKQTKRNAKVYEKMASKLFEMTGERRLGEEIKIKITNMTFQYRKLKCMTDSESAPPDWPYYLAIDGILAKVPESCDGKLPDSQPPGPSTSQTEASLSPPAKSTPLYFPYNQCSYEGRFEDDRSDSSSSLLSLKFRSEERPVKKRKVQSCHLQKKQLRLLEAMVEEQRRLSRAVEETCREVRRVLDQQHILQVQSLQLQERMMSLLERIITKSSV

SEQ ID NO: 53756 - protein, 267 aa, Homo sapiens
  Payload ID: 10649
  Gene Symbol: MSANTD1
  Gene Name: Myb/SANT-like DNA-binding domain containing 1
  ENSP ID: ENSP00000425405
MVRGAGPGPSLSALSHPTGASGMAAAEGPGYLVSPQAEKHRRARNWTDAEMRGLMLVWEEFFDELKQTKRNAKVYEKMASKLFEMTGERRLGEEIKIKITNMTFQYRKLKCMTDSESAPPDWPYYLAIDGILAKVPESCDGKLPDSQPPGPSTSQTEASLSPPAKSTPLYFPYNQCSYEGRFEDDRSDSSSSLLSLKFRSEERPVKKRKVQSCHLQKKQLRLLEAMVEEQRRLSRAVEETCREISRCYSTVCRRGCPVAMEWLWTLS

SEQ ID NO: 53757 - protein, 507 aa, Homo sapiens
  Payload ID: 10650
  Gene Symbol: MSANTD2
  Gene Name: Myb/SANT-like DNA-binding domain containing 2
  Uniprot ID: Q6P1R3
  ENSP ID: ENSP00000239614
MAAPCGSELPANSPLKIPKMEVLSPASPGGLSDGNPSLSDPSTPRGASPLGPGSAAGSGAAASGGLGLGLGGRSAASSSVSFSPGGGGGGAAAAAAAACRGMSWTPAETNALIAVWGNERLVEARYQQLEGAGTVFGSKAPGPAMYERVSRALAELGYERTPSQCRERIKELESDGSTMEDYSQEDWGNHSQDLHGYPTDQELDEIPVTKRTLKIKQESSEEAQKRDIMQNIVQILESVQLKWELFQSWTDFSRLHLSNKLAIFGIGYNTRWKEDIRYHYAEISSQVPLGKRLREYFNSEKPEGRIIMTRVQKMNWKNVYYKFLEITISEARCLELHMEIDWIPIAHSKPTGGNVVQYLLPGGIPKSPGLYAIGYEECIERPLSPHMEQSSLDPGKEGRVDLETLSAQASLQVEIEPTRIIYCYLGIAEVRTLQQCLFLHFQANTKTFSKDWVGINGFLSQNCIVDPGVSPKSIYIKFVEVERDFLSAGSLVECLEKAIGYPLKFNN

SEQ ID NO: 53758 - protein, 559 aa, Homo sapiens
  Payload ID: 10650
  Gene Symbol: MSANTD2
  Gene Name: Myb/SANT-like DNA-binding domain containing 2
  Uniprot ID: Q6P1R3
  ENSP ID: ENSP00000364118
MAAPCGSELPANSPLKIPKMEVLSPASPGGLSDGNPSLSDPSTPRGASPLGPGSAAGSGAAASGGLGLGLGGRSAASSSVSFSPGGGGGGAAAAAAAACRGMSWTPAETNALIAVWGNERLVEARYQQLEGAGTVFGSKAPGPAMYERVSRALAELGYERTPSQCRERIKTLRRCYSRVKEHGVGKRKSSYTFEQLEQVFGQGGWDAQPCQPVLINSSGLYQELESDGSTMEDYSQEDWGNHSQDLHGYPTDQELDEIPVTKRTLKIKQESSEEAQKRDIMQNIVQILESVQLKWELFQSWTDFSRLHLSNKLAIFGIGYNTRWKEDIRYHYAEISSQVPLGKRLREYFNSEKPEGRIIMTRVQKMNWKNVYYKFLEITISEARCLELHMEIDWIPIAHSKPTGGNVVQYLLPGGIPKSPGLYAIGYEECIERPLSPHMEQSSLDPGKEGRVDLETLSAQASLQVEIEPTRIIYCYLGIAEVRTLQQCLFLHFQANTKTFSKDWVGINGFLSQNCIVDPGVSPKSIYIKFVEVERDFLSAGSLVECLEKAIGYPLKFNN

SEQ ID NO: 53759 - protein, 179 aa, Homo sapiens
  Payload ID: 10650
  Gene Symbol: MSANTD2
  Gene Name: Myb/SANT-like DNA-binding domain containing 2
  ENSP ID: ENSP00000431707
MAAPCGSELPANSPLKIPKMEVLSPASPGGLSDGNPSLSDPSTPRGASPLGPGSAAGSGAAASGGLGLGLGGRSAASSSVSFSPGGGGGGAAAAAAAACRGMSWTPAETNALIAVWGNERLVEARYQQLEGAGTVFGSKAPGPAMYERVSRALAELGYERTPSQCRERIKMKYLSQREH

SEQ ID NO: 53760 - protein, 208 aa, Homo sapiens
  Payload ID: 10650
  Gene Symbol: MSANTD2
  Gene Name: Myb/SANT-like DNA-binding domain containing 2
  ENSP ID: ENSP00000434572
MAAPCGSELPANSPLKIPKMEVLSPASPGGLSDGNPSLSDPSTPRGASPLGPGSAAGSGAAASGGLGLGLGGRSAASSSVSFSPGGGGGGAAAAAAAACRGMSWTPAETNALIAVWGNERLVEARYQQLEGAGTVFGSKAPGPAMYERVSRALAELGYERTPSQCRERIKWLVPGAGVRWQHYGGLFTGGLGKPQSGSPWLSNRSGIG

SEQ ID NO: 53761 - protein, 329 aa, Homo sapiens
  Payload ID: 10650
  Gene Symbol: MSANTD2
  Gene Name: Myb/SANT-like DNA-binding domain containing 2
  Uniprot ID: Q6P1R3
  ENSP ID: ENSP00000435705
MEDYSQEDWGNHSQDLHGYPTDQELDEIPVTKRTLKIKQESSEEAQKRDIMQNIVQILESVQLKWELFQSWTDFSRLHLSNKLAIFGIGYNTRWKEDIRYHYAEISSQVPLGKRLREYFNSEKPEGRIIMTRVQKMNWKNVYYKFLEITISEARCLELHMEIDWIPIAHSKPTGGNVVQYLLPGGIPKSPGLYAIGYEECIERPLSPHMEQSSLDPGKEGRVDLETLSAQASLQVEIEPTRIIYCYLGIAEVRTLQQCLFLHFQANTKTFSKDWVGINGFLSQNCIVDPGVSPKSIYIKFVEVERDFLSAGSLVECLEKAIGYPLKFNN

SEQ ID NO: 53762 - protein, 159 aa, Homo sapiens
  Payload ID: 10651
  Gene Symbol: MSANTD3
  Gene Name: Myb/SANT-like DNA-binding domain containing 3
  Uniprot ID: Q96H12
  ENSP ID: ENSP00000364020
MQNNEIIKPAKYFSELEKSILLALVEKYKYVLECKKSDARTIALKQRTWQALAHEYNSQPSVSLRDFKQLKKCWENIKARTKKIMAHERREKVKRSVSPLLSTHVLGKEKIASMLPEQLYFLQSPPEEEPEYHPDASAQVFFQERKRSLELSIILSGTW

SEQ ID NO: 53763 - protein, 181 aa, Homo sapiens
  Payload ID: 10651
  Gene Symbol: MSANTD3
  Gene Name: Myb/SANT-like DNA-binding domain containing 3
  ENSP ID: ENSP00000364021
MQNNEIIKPAKYFSELEKSILLALVEKYKYVLECKKSDARTIALKQRTWQALAHEYNSQPSVSLRDFKQLKKCWENIKARTKKIMAHERREKVKRSVSPLLSTHVLGKEKIASMLPEQLYFLQSPPEEEPEYHPDASAQESFAVSNRELCDDEKEFIHFPVCEGTSQPEPSCSAVRITANK

SEQ ID NO: 53764 - protein, 275 aa, Homo sapiens
  Payload ID: 10651
  Gene Symbol: MSANTD3
  Gene Name: Myb/SANT-like DNA-binding domain containing 3
  Uniprot ID: Q96H12
  ENSP ID: ENSP00000378506
MQNNEIIKPAKYFSELEKSILLALVEKYKYVLECKKSDARTIALKQRTWQALAHEYNSQPSVSLRDFKQLKKCWENIKARTKKIMAHERREKVKRSVSPLLSTHVLGKEKIASMLPEQLYFLQSPPEEEPEYHPDASAQESFAVSNRELCDDEKEFIHFPVCEGTSQPEPSCSAVRITANKNYRSKTSQEGALKKMHEEEHHQQMSILQLQLIQMNEVHVAKIQQIERECEMAEEEHRIKMEVLNKKKMYWERKLQTFTKEWPVSSFNRPFPNSP

SEQ ID NO: 53765 - protein, 134 aa, Homo sapiens
  Payload ID: 10651
  Gene Symbol: MSANTD3
  Gene Name: Myb/SANT-like DNA-binding domain containing 3
  ENSP ID: ENSP00000415830
MQNNEIIKPAKYFSELEKSILLALVEKYKYVLECKKSDARTIALKQRTWQALAHEYNSQPSVSLRDFKQLKKCWENIKARTKKIMAHERREKVKRSVSPLLSTHVLGKEKIASMLPEQLYFLQSPPEEEPEYHP

SEQ ID NO: 53766 - protein, 275 aa, Homo sapiens; identical to SEQ ID NO: 53764
  Payload ID: 10651
  Gene Symbol: MSANTD3
  Gene Name: Myb/SANT-like DNA-binding domain containing 3
  Uniprot ID: Q96H12
  ENSP ID: ENSP00000480445

SEQ ID NO: 53767 - protein, 275 aa, Homo sapiens; identical to SEQ ID NO: 53764
  Payload ID: 10651
  Gene Symbol: MSANTD3
  Gene Name: Myb/SANT-like DNA-binding domain containing 3
  Uniprot ID: Q96H12
  ENSP ID: ENSP00000480622

SEQ ID NO: 53768 - protein, 345 aa, Homo sapiens
  Payload ID: 10652
  Gene Symbol: MSANTD4
  Gene Name: Myb/SANT-like DNA-binding domain containing 4 with coiled-coils
  Uniprot ID: Q8NCY6
  ENSP ID: ENSP00000304713
MKQLKRKRKSNFSVQETQTLLKEITKRKEVIFSKQLNTTINVMKRMAWEEIAQCVNAVGEGEQRTGTEVKRRYLDWRALMKRKRMKANIKLVGSGFPLPSSDLDDSLTEEIDEKIGFRNDANFDWQNVADFRDAGGSLTEVKVEEEERDPQSPEFEIEEEEEMLSSVIPDSRRENELPDFPHIDEFFTLNSTPSRSAYDEPHLLVNIEKQKLELEKRRLDIEAERLQVEKERLQIEKERLRHLDMEHERLQLEKERLQIEREKLRLQIVNSEKPSLENELGQGEKSMLQPQDIETEKLKLERERLQLEKDRLQFLKFESEKLQIEKERLQVEKDRLRIQKEGHLQ

SEQ ID NO: 53769 - protein, 111 aa, Homo sapiens
  Payload ID: 10652
  Gene Symbol: MSANTD4
  Gene Name: Myb/SANT-like DNA-binding domain containing 4 with coiled-coils
  ENSP ID: ENSP00000432245
MKQLKRKRKSNFSVQETQTLLKEITKRKEVIFSKQLNTTINVMKRMAWEEIAQCVNAVGEGEQRTGTEVKRRYLDWRALMKRKRMKANIKLVGSGFPLPSSDLDDSLTEEI

SEQ ID NO: 53770 - protein, 196 aa, Homo sapiens
  Payload ID: 10652
  Gene Symbol: MSANTD4
  Gene Name: Myb/SANT-like DNA-binding domain containing 4 with coiled-coils
  ENSP ID: ENSP00000435125
MKQLKRKRKSNFSVQETQTLLKEITKRKEVIFSKQLNTTINVMKRMAWEEIAQCVNAVGEGEQRTGTEVKRRYLDWRALMKRKRMKANIKLVGSGFPLPSSDLDDSLTEEIDEKIGFRNDANFDWQNVADFRDAGGSLTEVKVEEEERDPQSPEFEIEEEEEMLSSVIPDSRRENELPDFPHIDEFFTLNSTPSRS

SEQ ID NO: 53771 - protein, 71 aa, Homo sapiens
  Payload ID: 10652
  Gene Symbol: MSANTD4
  Gene Name: Myb/SANT-like DNA-binding domain containing 4 with coiled-coils
  ENSP ID: ENSP00000435372
MKQLKRKRKSNFSVQETQTLLKEITKRKEVIFSKQLNTTINVMKRMAWEEIAQCVNAVGEGEQRTGTEVKR

SEQ ID NO: 53772 - protein, 134 aa, Homo sapiens
  Payload ID: 10652
  Gene Symbol: MSANTD4
  Gene Name: Myb/SANT-like DNA-binding domain containing 4 with coiled-coils
  ENSP ID: ENSP00000482795
MKRLDSEMMNFDWQNVADFRDAGGSLTEVKVEEEERDPQSPEFEIEEEEEMLSSVIPDSRRENELPDFPHIDEFFTLNSTPSRSAYDEPHLLVNIEKQKLELEKRRLDIEAERAGRKGTPTNREREAAAFRHGT

SEQ ID NO: 53773 - protein, 828 aa, Homo sapiens
  Payload ID: 10653
  Gene Symbol: MYSM1
  Gene Name: Myb-like, SWIRM and MPN domains 1
  Uniprot ID: Q5VVJ2
  ENSP ID: ENSP00000418734
MAAEEADVDIEGDVVAAAGAQPGSGENTASVLQKDHYLDSSWRTENGLIPWTLDNTISEENRAVIEKMLLEEEYYLSKKSQPEKVWLDQKEDDKKYMKSLQKTAKIMVHSPTKPASYSVKWTIEEKELFEQGLAKFGRRWTKISKLIGSRTVLQVKSYARQYFKNKVKCGLDKETPNQKTGHNLQVKNEDKGTKAWTPSCLRGRADPNLNAVKIEKLSDDEEVDITDEVDELSSQTPQKNSSSDLLLDFPNSKMHETNQGEFITSDSQEALFSKSSRGCLQNEKQDETLSSSEITLWTEKQSNGDKKSIELNDQKFNELIKNCNKHDGRGIIVDARQLPSPEPCEIQKNLNDNEMLFHSCQMVEESHEEEELKPPEQEIEIDRNIIQEEEKQAIPEFFEGRQAKTPERYLKIRNYILDQWEICKPKYLNKTSVRPGLKNCGDVNCIGRIHTYLELIGAINFGCEQAVYNRPQTVDKVRIRDRKDAVEAYQLAQRLQSMRTRRRRVRDPWGNWCDAKDLEGQTFEHLSAEELAKRREEEKGRPVKSLKVPRPTKSSFDPFQLIPCNFFSEEKQEPFQVKVASEALLIMDLHAHVSMAEVIGLLGGRYSEVDKVVEVCAAEPCNSLSTGLQCEMDPVSQTQASETLAVRGFSVIGWYHSHPAFDPNPSLRDIDTQAKYQSYFSRGGAKFIGMIVSPYNRNNPLPYSQITCLVISEEISPDGSYRLPYKFEVQQMLEEPQWGLVFEKTRWIIEKYRLSHSSVPMDKIFRRDSDLTCLQKLLECMRKTLSKVTNCFMAEEFLTEIENLFLSNYKSNQENGVTEENCTKELLM

SEQ ID NO: 53774 - protein, 234 aa, Homo sapiens
  Payload ID: 10653
  Gene Symbol: MYSM1
  Gene Name: Myb-like, SWIRM and MPN domains 1
  Uniprot ID: Q5VVJ2
  ENSP ID: ENSP00000478391
MAEVIGLLGGRYSEVDKVVEVCAAEPCNSLSTGLQCEMDPVSQTQASETLAVRGFSVIGWYHSHPAFDPNPSLRDIDTQAKYQSYFSRGGAKFIGMIVSPYNRNNPLPYSQITCLVISEEISPDGSYRLPYKFEVQQMLEEPQWGLVFEKTRWIIEKYRLSHSSVPMDKIFRRDSDLTCLQKLLECMRKTLSKVTNCFMAEEFLTEIENLFLSNYKSNQENGVTEENCTKELLM

SEQ ID NO: 53775 - protein, 399 aa, Homo sapiens
  Payload ID: 10654
  Gene Symbol: MYPOP
  Gene Name: Myb-related transcription factor, partner of profilin
  Uniprot ID: Q86VE0
  ENSP ID: ENSP00000325402
MASAAAGEAEETTRLRKPRFSFEENQILIREVRAHYPQLYGAQSRRVSVAERRRVWDGIAAKINGITSWKRTGQEVQKRWNDFKRRTKEKLARVPHSTQGAGPAAEDAFSAEEETIFAILGPGVAAPGAGAGAEEPPAAPSSQPPPPSACPQRYVLSEDRREDRRADTSAHSKAGSSSPEPWARPSCTPQEGGCPRPKERESPPPSALQPVQLPRLALSPPPPAPPLPPPPPLAQVAPSPPSPPPPPRPPPTLSASDPSLDFLRAQQETANAIRELAGTLRQGLAKLSEALSALLPLLPGTPVDSLPPPLPPPPPPPPPPRPVLPPPAPKVEITPEPVSVVAAVVDGAVVAARGVIIAPRSEEGAPRPPPAPLPPHDSPPHKRRKGFPTRKRRGRWKSP

SEQ ID NO: 53776 - protein, 96 aa, Homo sapiens
  Payload ID: 10655
  Gene Symbol: MAX
  Gene Name: MYC associated factor X
  Uniprot ID: P61244
  ENSP ID: ENSP00000246163
MSDNDDIEVESDEEQPRFQSAADKRAHHNALERKRRDHIKDSFHSLRDSVPSLQGEKLYFLFWKLCTPVLHRQSLMQKCHTFISSYQVHKKKECKI

SEQ ID NO: 53777 - protein, 134 aa, Homo sapiens
  Payload ID: 10655
  Gene Symbol: MAX
  Gene Name: MYC associated factor X
  Uniprot ID: P61244
  ENSP ID: ENSP00000284165
MSDNDDIEVESDEEQPRFQSAADKRAHHNALERKRRDHIKDSFHSLRDSVPSLQGEKASRAQILDKATEYIQYMRRKNHTHQQDIDDLKRQNALLEQQGEHPSSWGSWPCCAPARSGFGTWACRVRASHGVCAQ

SEQ ID NO: 53778 - protein, 83 aa, Homo sapiens
  Payload ID: 10655
  Gene Symbol: MAX
  Gene Name: MYC associated factor X
  Uniprot ID: P61244
  ENSP ID: ENSP00000342482
MSDNDDIEVESDEEQPRFQSAADKRAHHNALERKRRDHIKDSFHSLRDSVPSLQGEKGTKMKLTLPPVFPYEHLPFPTVFCHG

SEQ ID NO: 53779 - protein, 151 aa, Homo sapiens
  Payload ID: 10655
  Gene Symbol: MAX
  Gene Name: MYC associated factor X
  Uniprot ID: P61244
  ENSP ID: ENSP00000351175
MSDNDDIEVESDADKRAHHNALERKRRDHIKDSFHSLRDSVPSLQGEKASRAQILDKATEYIQYMRRKNHTHQQDIDDLKRQNALLEQQVRALEKARSSAQLQTNYPSSDNSLYTNAKGSTISAFDGGSDSSSESEPEEPQSRKKLRMEAS

SEQ ID NO: 53780 - protein, 160 aa, Homo sapiens
  Payload ID: 10655
  Gene Symbol: MAX
  Gene Name: MYC associated factor X
  Uniprot ID: P61244
  ENSP ID: ENSP00000351490
MSDNDDIEVESDEEQPRFQSAADKRAHHNALERKRRDHIKDSFHSLRDSVPSLQGEKASRAQILDKATEYIQYMRRKNHTHQQDIDDLKRQNALLEQQVRALEKARSSAQLQTNYPSSDNSLYTNAKGSTISAFDGGSDSSSESEPEEPQSRKKLRMEAS

SEQ ID NO: 53781 - protein, 103 aa, Homo sapiens
  Payload ID: 10655
  Gene Symbol: MAX
  Gene Name: MYC associated factor X
  Uniprot ID: P61244
  ENSP ID: ENSP00000378104
MSDNDDIEVESDEEQPRFQSAADKRAHHNALERKRRDHIKDSFHSLRDSVPSLQGEKASRAQILDKATEYIQYMRRKNHTHQQDIDDLKRQNALLEQQGESES

SEQ ID NO: 53782 - protein, 82 aa, Homo sapiens
  Payload ID: 10655
  Gene Symbol: MAX
  Gene Name: MYC associated factor X
  ENSP ID: ENSP00000450763
MSDNDDIEVESDSVHWRRRGQVPNCRPTTPPQTTASTPTPRAAPSLPSMGARTPARSLSLKSPKAGRSSGWRPAKPLGAGQQ

SEQ ID NO: 53783 - protein, 125 aa, Homo sapiens
  Payload ID: 10655
  Gene Symbol: MAX
  Gene Name: MYC associated factor X
  ENSP ID: ENSP00000450818
MSDNDDIEVESDADKRAHHNALERKRRDHIKDSFHSLRDSVPSLQGEKASRAQILDKATEYIQYMRRKNHTHQQDIDDLKRQNALLEQQGEHPSSWGSWPCCAPARSGFGTWACRVRASHGVCAQ

SEQ ID NO: 53784 - protein, 97 aa, Homo sapiens
  Payload ID: 10655
  Gene Symbol: MAX
  Gene Name: MYC associated factor X
  ENSP ID: ENSP00000450955
MLFWSSKGKARADQVLCSWGIHFSSSLMEDASKRKFRALEKARSSAQLQTNYPSSDNSLYTNAKGSTISAFDGGSDSSSESEPEEPQSRKKLRMEAS

SEQ ID NO: 53785 - protein, 103 aa, Homo sapiens; identical to SEQ ID NO: 53781
  Payload ID: 10655
  Gene Symbol: MAX
  Gene Name: MYC associated factor X
  Uniprot ID: P61244
  ENSP ID: ENSP00000451907

SEQ ID NO: 53786 - protein, 121 aa, Homo sapiens
  Payload ID: 10655
  Gene Symbol: MAX
  Gene Name: MYC associated factor X
  ENSP ID: ENSP00000452197
MSDNDDIEVESDADKRAHHNALERKRRDHIKDSFHSLRDSVPSLQGEKASRAQILDKATEYIQYMRRKNHTHQQDIDDLKRQNALLEQQGALPAVGITPGIRCLKRALRSLEWNVLWESES

SEQ ID NO: 53787 - protein, 43 aa, Homo sapiens
  Payload ID: 10655
  Gene Symbol: MAX
  Gene Name: MYC associated factor X
  ENSP ID: ENSP00000452206
MRRKNHTHQQDIDDLKRQNALLEQQVRALEKARSSAQLQTNYP

SEQ ID NO: 53788 - protein, 94 aa, Homo sapiens
  Payload ID: 10655
  Gene Symbol: MAX
  Gene Name: MYC associated factor X
  ENSP ID: ENSP00000452286
MSDNDDIEVESDADKRAHHNALERKRRDHIKDSFHSLRDSVPSLQGEKASRAQILDKATEYIQYMRRKNHTHQQDIDDLKRQNALLEQQGESES

SEQ ID NO: 53789 - protein, 103 aa, Homo sapiens; identical to SEQ ID NO: 53781
  Payload ID: 10655
  Gene Symbol: MAX
  Gene Name: MYC associated factor X
  Uniprot ID: P61244
  ENSP ID: ENSP00000452378

SEQ ID NO: 53790 - protein, 124 aa, Homo sapiens
  Payload ID: 10655
  Gene Symbol: MAX
  Gene Name: MYC associated factor X
  ENSP ID: ENSP00000452405
MSDNDDIEVESDEEQPRFQSAASRAQILDKATEYIQYMRRKNHTHQQDIDDLKRQNALLEQQVRALEKARSSAQLQTNYPSSDNSLYTNAKGSTISAFDGGSDSSSESEPEEPQSRKKLRMEAS

SEQ ID NO: 53791 - protein, 103 aa, Homo sapiens; identical to SEQ ID NO: 53781
  Payload ID: 10655
  Gene Symbol: MAX
  Gene Name: MYC associated factor X
  Uniprot ID: P61244
  ENSP ID: ENSP00000480127

SEQ ID NO: 53792 - protein, 103 aa, Homo sapiens
  Payload ID: 10656
  Gene Symbol: MYCBP
  Gene Name: MYC binding protein
  Uniprot ID: Q99417
  ENSP ID: ENSP00000380702
MAHYKAADSKREQFRRYLEKSGVLDTLTKVLVALYEEPEKPNSALDFLKHHLGAATPENPEIELLRLELAEMKEKYEAIVEENKKLKAKLAQYEPPQEEKRAE

SEQ ID NO: 53793 - protein, 56 aa, Homo sapiens
  Payload ID: 10656
  Gene Symbol: MYCBP
  Gene Name: MYC binding protein
  ENSP ID: ENSP00000485717
MAHYKAADSKREQFRRYLEKSGVLDTLTKASLRSCYSRKSRNRAASPRTGRNEREV

SEQ ID NO: 53794 - protein, 4640 aa, Homo sapiens
  Payload ID: 10657
  Gene Symbol: MYCBP2
  Gene Name: MYC binding protein 2, E3 ubiquitin protein ligase
  Uniprot ID: O75592
  ENSP ID: ENSP00000349892
MPVPDGSVAAAGLGLGLPAADSRGHYQLLLSGRALADRYRRIYTAALNDRDQGGGSAGHPASRNKKILNKKKLKRKQKSKSKVKTRSKSENLENTVIIPDIKLHSNPSAFNIYCNVRHCVLEWQKKEISLAAASKNSVQSGESDSDEEEESKEPPIKLPKIIEVGLCEVFELIKETRFSHPSLCLRSLQALLNVLQGQQPEGLQSEPPEVLESLFQLLLEITVRSTGMNDSTGQSLTALSCACLFSLVASWGETGRTLQAISAILTNNGSHACQTIQVPTILNSLQRSVQAVLVGKIQIQDWFSNGIKKAALMHKWPLKEISVDEDDQCLLQNDGFFLYLLCKDGLYKIGSGYSGTVRGHIYNSTSRIRNRKEKKSWLGYAQGYLLYRDVNNHSMTAIRISPETLEQDGTVMLPDCHTEGQNILFTDGEYINQIAASRDDGFVVRIFATSTEPVLQQELQLKLARKCLHACGISLFDLEKDLHIISTGFDEESAILGAGREFALMKTANGKIYYTGKYQSLGIKQGGPSAGKWVELPITKSPKIVHFSVGHDGSHALLVAEDGSIFFTGSASKGEDGESTKSRRQSKPYKPKKIIKMEGKIVVYTACNNGSSSVISKDGELYMFGKDAIYSDSSSLVTDLKGHFVTQVAMGKAHTCVLMKNGEVWTFGVNNKGQCGRDTGAMNQGGKGFGVENMATAMDEDLEEELDEKDEKSMMCPPGMHKWKLEQCMVCTVCGDCTGYGASCVSSGRPDRVPGGICGCGSGESGCAVCGCCKACARELDGQEARQRGILDAVKEMIPLDLLLAVPVPGVNIEEHLQLRQEEKRQRVIRRHRLEEGRGPLVFAGPIFMNHREQALARLRSHPAQLKHKRDKHKDGSGERGEKDASKITTYPPGSVRFDCELRAVQVSCGFHHSVVLMENGDVYTFGYGQHGQLGHGDVNSRGCPTLVQALPGPSTQVTAGSNHTAVLLMDGQVFTFGSFSKGQLGRPILDVPYWNAKPAPMPNIGSKYGRKATWIGASGDQTFLRIDEALINSHVLATSEIFASKHIIGLVPASISEPPPFKCLLINKVDGSCKTFNDSEQEDLQGFGVCLDPVYDVIWRFRPNTRELWCYNAVVADARLPSAADMQSRCSILSPELALPTGSRALTTRSHAALHILGCLDTLAAMQDLKMGVASTEEETQAVMKVYSKEDYSVVNRFESHGGGWGYSAHSVEAIRFSADTDILLGGLGLFGGRGEYTAKIKLFELGPDGGDHETDGDLLAETDVLAYDCAAREKYAMMFDEPVLLQAGWWYVAWARVSGPSSDCGSHGQASITTDDGVVFQFKSSKKSNNGTDVNAGQIPQLLYRLPTSDGSASKGKQQTSEPVHILKRSFARTVSVECFESLLSILHWSWTTLVLGVEELRGLKGFQFTATLLDLERLRFVGTCCLRLLRVYTCEIYPVSATGKAVVEETSKLAECIGKTRTLLRKILSEGVDHCMVKLDNDPQGYLSQPLSLLEAVLQECHNTFTACFHSFYPTPALQWACLCDLLNCLDQDIQEANFKTSSSRLLAAVMSALCHTSVKLTSIFPIAYDGEVLLRSIVKQVSTENDSTLVHRFPLLVAHMEKLSQSEENISGMTSFREVLEKMLVIVVLPVRNSLRRENELFSSHLVSNTCGLLASIVSELTASALGSEVDGLNSLHSVKASANRFTKTSQGRSWNTGNGSPDAICFSVDKPGIVVVGFSVYGGGGIHEYELEVLVDDSEHAGDSTHSHRWTSLELVKGTYTTDDSPSDIAEIRLDKVVPLKENVKYAVRLRNYGSRTANGDGGMTTVQCPDGVTFTFSTCSLSSNGTNQTRGQIPQILYYRSEFDGDLQSQLLSKANEEDKNCSRALSVVSTVVRASKDLLHRALAVDADDIPELLSSSSLFSMLLPLIIAYIGPVAAAIPKVAVEVFGLVQQLLPSVAILNQKYAPPAFNPNQSTDSTTGNQPEQGLSACTTSSHYAVIESEHPYKPACVMHYKVTFPECVRWMTIEFDPQCGTAQSEDVLRLLIPVRTVQNSGYGPKLTSVHENLNSWIELKKFSGSSGWPTMVLVLPGNEALFSLETASDYVKDDKASFYGFKCFAIGYEFSPGPDEGVIQLEKELANLGGVCAAALMKKDLALPIGNELEEDLEILEEAALQVCKTHSGILGKGLALSHSPTILEALEGNLPLQIQSNEQSFLDDFIACVPGSSGGRLARWLQPDSYADPQKTSLILNKDDIRCGWPTTITVQTKDQYGDVVHVPNMKVEVKAVPVSQKKMSLQQDQAKKPQRIPGSPAVTAASSNTDMTYGGLASPKLDVSYEPMIVKEARYIAITMMKVYENYSFEELRFASPTPKRPSENMLIRVNNDGTYCANWTPGAIGLYTLHVTIDGIEIDAGLEVKVKDPPKGMIPPGTQLVKPKSEPQPNKVRKFVAKDSAGLRIRSHPSLQSEQIGIVKVNGTITFIDEIHNDDGVWLRLNDETIKKYVPNMNGYTEAWCLSFNQHLGKSLLVPVDESKTNTDDFFKDINSCCPQEATMQEQDMPFLRGGPGMYKVVKTGPSGHNIRSCPNLRGIPIGMLVLGNKVKAVGEVTNSEGTWVQLDQNSMVEFCESDEGEAWSLARDRGGNQYLRHEDEQALLDQNSQTPPPSPFSVQAFNKGASCSAQGFDYGLGNSKGDRGNISTSSKPASTSGKSELSSKHSRSLKPDGRMSRTTADQKKPRGTESLSASESLILKSDAAKLRSDSHSRSLSPNHNTLQTLKSDGRMPSSSRAESPGPGSRLSSPKPKTLPANRSSPSGASSPRSSSPHDKNLPQKSTAPVKTKLDPPRERSKSDSYTLDPDTLRKKKMPLTEPLRGRSTSPKPKSVPKDSTDSPGSENRAPSPHVVQENLHSEVVEVCTSSTLKTNSLTDSTCDDSSEFKSVDEGSNKVHFSIGKAPLKDEQEMRASPKISRKCANRHTRPKKEKSSFLFKGDGSKPLEPAKQAMSPSVAECARAVFASFLWHEGIVHDAMACSSFLKFHPELSKEHAPIRSSLNSQQPTEEKETKLKNRHSLEISSALNMFNIAPHGPDISKMGSINKNKVLSMLKEPPLHEKCEDGKTETTFEMSMHNTMKSKSPLPLTLQHLVAFWEDISLATIKAASQNMIFPSPGSCAVLKKKECEKENKKSKKEKKKKEKAEVRPRGNLFGEMAQLAVGGPEKDTICELCGESHPYPVTYHMRQAHPGCGRYAGGQGYNSIGHFCGGWAGNCGDGGIGGSTWYLVCDRCREKYLREKQAAAREKVKQSRRKPMQVKTPRALPTMEAHQVIKANALFLLSLSSAAEPSILCYHPAKPFQSQLPSVKEGISEDLPVKMPCLYLQTLARHHHENFVGYQDDNLFQDEMRYLRSTSVPAPYISVTPDASPNVFEEPESNMKSMPPSLETSPITDTDLAKRTVFQRSYSVVASEYDKQHSILPARVKAIPRRRVNSGDTEVGSSLLRHPSPELSRLISAHSSLSKGERNFQWPVLAFVIQHHDLEGLEIAMKQALRKSACRVFAMEAFNWLLCNVIQTTSLHDILWHFVASLTPAPVEPEEEEDEENKTSKENSEQEKDTRVCEHPLSDIVIAGEAAHPLPHTFHRLLQTISDLMMSLPSGSSLQQMALRCWSLKFKQSDHQFLHQSNVFHHINNILSKSDDGDSEESFSISIQSGFEAMSQELCIVMCLKDLTSIVDIKTSSRPAMIGSLTDGSTETFWESGDEDKNKTKNITINCVKGINARYVSVHVDNSRDLGNKVTSMTFLTGKAVEDLCRIKQVDLDSRHIGWVTSELPGGDNHIIKIELKGPENTLRVRQVKVLGWKDGESTKIAGQISASVAQQRNCEAETLRVFRLITSQVFGKLISGDAEPTPEQEEKALLSSPEGEEKVYNATSDADLKEHMVGIIFSRSKLTNLQKQVCAHIVQAIRMEATRVREEWEHAISSKENANSQPNDEDASSDAYCFELLSMVLALSGSNVGRQYLAQQLTLLQDLFSLLHTASPRVQRQVTSLLRRVLPEVTPSRLASIIGVKSLPPADISDIIHSTEKGDWNKLGILDMFLGCIAKALTVQLKAKGTTITGTAGTTVGKGVTTVTLPMIFNSSYLRRGESHWWMKGSTPTQISEIIIKLIKDMAAGHLSEAWSRVTKNAIAETIIALTKMEEEFRSPVRCIATTRLWLALASLCVLDQDHVDRLSSGRWMGKDGQQKQMPMCDNHDDGETAAIILCNVCGNLCTDCDRFLHLHRRTKTHQRQVFKEEEEAIKVDLHEGCGRTKLFWLMALADSKTMKAMVEFREHTGKPTTSSSEACRFCGSRSGTELSAVGSVCSDADCQEYAKIACSKTHPCGHPCGGVKNEEHCLPCLHGCDKSATSLKQDADDMCMICFTEALSAAPAIQLDCSHIFHLQCCRRVLENRWLGPRITFGFISCPICKNKINHIVLKDLLDPIKELYEDVRRKALMRLEYEGLHKSEAITTPGVRFYNDPAGYAMNRYAYYVCYKCRKAYFGGEARCDAEAGRGDDYDPRELICGACSDVSRAQMCPKHGTDFLEYKCRYCCSVAVFFCFGTTHFCNACHDDFQRMTSIPKEELPHCPAGPKGKQLEGTECPLHVVHPPTGEEFALGCGVCRNAHTF

SEQ ID NO: 53795 - protein, 1061 aa, Homo sapiens
  Payload ID: 10657
  Gene Symbol: MYCBP2
  Gene Name: MYC binding protein 2, E3 ubiquitin protein ligase
  ENSP ID: ENSP00000413907
  MOD_RES (1)..(1): Any amino acid
XNKTSKENSEQEKDTRVCEHPLSDIVIAGEAAHPLPHTFHRLLQTISDLMMSLPSGSSLQQMALRCWSLKFKQSDHQFLHQSNVFHHINNILSKSDDGDSEESFSISIQSGFEAMSQELCIVMCLKDLTSIVDIKTSSRPAMIGSLTDGSTETFWESGDEDKNKTKNITINCVKGINARYVSVHVDNSRDLGNKVTSMTFLTGKAVEDLCRIKQVDLDSRHIGWVTSELPGGDNHIIKIELKGPENTLRVRQVKVLGWKDGESTKIAGQISASVAQQRNCEAETLRVFRLITSQVFGKLISGDAEPTPEQEEKALLSSPEGEEKATSDADLKEHMVGIIFSRSKLTNLQKQVCAHIVQAIRMEATRVREEWEHAISSKENANSQPNDEDASSDAYCFELLSMVLALSGSNVGRQYLAQQLTLLQDLFSLLHTASPRVQRQVTSLLRRVLPEVTPSRLASIIGVKSLPPADISDIIHSTEKGDWNKLGILDMFLGCIAKALTVQLKAKGTTITGTAGTTVGKGVTTVTLPMIFNSSYLRRGESHWWMKGSTPTQISEIIIKLIKDMAAGHLSEAWSRVTKNAIAETIIALTKMEEEFRSPVRCIATTRLWLALASLCVLDQDHVDRLSSGRWMGKDGQQKQMPMCDNHDDGETAAIILCNVCGNLCTDCDRFLHLHRRTKTHQRQVFKEEEEAIKVDLHEGCGRTKLFWLMALADSKTMKAMVEFREHTGKPTTSSSEACRFCGSRSGTELSAVGSVCSDADCQEYAKIACSKTHPCGHPCGGVKNEEHCLPCLHGCDKSATSLKQDADDMCMICFTEALSAAPAIQLDCSHIFHLQCCRRVLENRWLGPRITFGFISCPICKNKINHIVLKDLLDPIKELYEDVRRKALMRLEYEGLHKSEAITTPGVRFYNDPAGYAMNRYAYYVCYKCRKAYFGGEARCDAEAGRGDDYDPRELICGACSDVSRAQMCPKHGTDFLEYKCRYCCSVAVFFCFGTTHFCNACHDDFQRMTSIPKEELPHCPAGPKGKQLEGTECPLHVVHPPTGEEFALGCGVCRNAHTF

SEQ ID NO: 53796 - protein, 4640 aa, Homo sapiens; identical to SEQ ID NO: 53794
  Payload ID: 10657
  Gene Symbol: MYCBP2
  Gene Name: MYC binding protein 2, E3 ubiquitin protein ligase
  Uniprot ID: O75592
  ENSP ID: ENSP00000444596

SEQ ID NO: 53797 - protein, 83 aa, Homo sapiens
  Payload ID: 10657
  Gene Symbol: MYCBP2
  Gene Name: MYC binding protein 2, E3 ubiquitin protein ligase
  ENSP ID: ENSP00000481482
  MOD_RES (1)..(1): Any amino acid
XSMVEFCESDEGEAWSLARDRGGNQYLRHEDEQALLDQNSQTPPPSPFSVQAFNKGASCSAQGFDYGLGNSKGRYLKVSLLLT

SEQ ID NO: 53798 - protein, 275 aa, Homo sapiens
  Payload ID: 10657
  Gene Symbol: MYCBP2
  Gene Name: MYC binding protein 2, E3 ubiquitin protein ligase
  ENSP ID: ENSP00000483488
MCMICFTEALSAAPAIQLDCSHIFHLQCCRRVLENRWLGPRITFGFISCPICKNKINHIVLKDLLDPIKELYEDVRRKALMRLEYEGLHKSEAITTPGVRFYNDPAGYAMNRYAYYVCYKCRKAYFGGEARCDAEAGRGDDYDPRELICGACSDVSRAQMCPKHGTDFLEYKCRYCCSVAVFFCFGTTHFCNACHDDFQRMTSIPKEELPHCPAGPKGKQLEGTECPLHVVHPPTGEEFALGCGVCEMPTLFRTRRSFVYREKNCLHPPRGCGEV

SEQ ID NO: 53799 - protein, 465 aa, Homo sapiens
  Payload ID: 10658
  Gene Symbol: MINA
  Gene Name: MYC induced nuclear antigen
  Uniprot ID: Q8IUF8
  ENSP ID: ENSP00000328251
MPKKAKPTGSGKEEGPAPCKQMKLEAAGGPSALNFDSPSSLFESLISPIKTETFFKEFWEQKPLLIQRDDPALATYYGSLFKLTDLKSLCSRGMYYGRDVNVCRCVNGKKKVLNKDGKAHFLQLRKDFDQKRATIQFHQPQRFKDELWRIQEKLECYFGSLVGSNVYITPAGSQGLPPHYDDVEVFILQLEGEKHWRLYHPTVPLAREYSVEAEERIGRPVHEFMLKPGDLLYFPRGTIHQADTPAGLAHSTHVTISTYQNNSWGDFLLDTISGLVFDTAKEDVELRTGIPRQLLLQVESTTVATRRLSGFLRTLADRLEGTKELLSSDMKKDFIMHRLPPYSAGDGAELSTPGGKLPRLDSVVRLQFKDHIVLTVLPDQDQSDEAQEKMVYIYHSLKNSRETHMMGNEEETEFHGLRFPLSHLDALKQIWNSPAISVKDLKLTTDEEKESLVLSLWTECLIQVV

SEQ ID NO: 53800 - protein, 464 aa, Homo sapiens
  Payload ID: 10658
  Gene Symbol: MINA
  Gene Name: MYC induced nuclear antigen
  Uniprot ID: Q8IUF8
  ENSP ID: ENSP00000353395
MPKKAKPTGSGKEEGPAPCKQMKLEAAGGPSALNFDSPSSLFESLISPIKTETFFKEFWEQKPLLIQRDDPALATYYGSLFKLTDLKSLCSRGMYYGRDVNVCRCVNGKKKVLNKDGKAHFLQLRKDFDQKRATIQFHQPQRFKDELWRIQEKLECYFGSLVGSNVYITPAGSQGLPPHYDDVEVFILQLEGEKHWRLYHPTVPLAREYSVEAEERIGRPVHEFMLKPGDLLYFPRGTIHQADTPAGLAHSTHVTISTYQNNSWGDFLLDTISGLVFDTAKEDVELRTGIPRQLLLVESTTVATRRLSGFLRTLADRLEGTKELLSSDMKKDFIMHRLPPYSAGDGAELSTPGGKLPRLDSVVRLQFKDHIVLTVLPDQDQSDEAQEKMVYIYHSLKNSRETHMMGNEEETEFHGLRFPLSHLDALKQIWNSPAISVKDLKLTTDEEKESLVLSLWTECLIQVV

SEQ ID NO: 53801 - protein, 465 aa, Homo sapiens; identical to SEQ ID NO: 53799
  Payload ID: 10658
  Gene Symbol: MINA
  Gene Name: MYC induced nuclear antigen
  Uniprot ID: Q8IUF8
  ENSP ID: ENSP00000377748

SEQ ID NO: 53802 - protein, 27 aa, Homo sapiens
  Payload ID: 10658
  Gene Symbol: MINA
  Gene Name: MYC induced nuclear antigen
  ENSP ID: ENSP00000421347
TTLSSQYCRIKINLMKLKKRWCTSIIP

SEQ ID NO: 53803 - protein, 112 aa, Homo sapiens
  Payload ID: 10658
  Gene Symbol: MINA
  Gene Name: MYC induced nuclear antigen
  ENSP ID: ENSP00000423816
MPKKAKPTGSGKEEGPAPCKQMKLEAAGGPSALNFDSPSSLFESLISPIKTETFFKEFWEQKPLLIQRDDPALATYYGSLFKLTDLKSLCSRGMYYGRDVNVCRCVNGKKKV

SEQ ID NO: 53804 - protein, 108 aa, Homo sapiens
  Payload ID: 10658
  Gene Symbol: MINA
  Gene Name: MYC induced nuclear antigen
  ENSP ID: ENSP00000424530
ECYFGSLVGSNVYITPAGSQGLPPHYDDVEVFILQLEGEKHWRLYHPTVPLAREYSVEAEERIGRPVHEFMLKPGDLLYFPRGTIHQADTPAGLAHSTHVTISTYQNK

SEQ ID NO: 53805 - protein, 280 aa, Homo sapiens
  Payload ID: 10658
  Gene Symbol: MINA
  Gene Name: MYC induced nuclear antigen
  Uniprot ID: Q8IUF8
  ENSP ID: ENSP00000424955
MPKKAKPTGSGKEEGPAPCKQMKLEAAGGPSALNFDSPSSLFESLISPIKTETFFKEFWEQKPLLIQRDDPALATYYGSLFKLTDLKSLCSRGMYYGRDVNVCRCVNGKKKVLNKDGKAHFLQLRKDFDQKRATIQFHQPQRFKDELWRIQEKLECYFGSLVGSNVYITPAGSQGLPPHYDDVEVFILQLEGEKHWRLYHPTVPLAREYSVEAEERIGRPVHEFMLKPGDLLYFPRGTIHQADTPAGLAHSTHVTISTYQNNDAGARMRRCDLRAIAPQK

SEQ ID NO: 53806 - protein, 235 aa, Homo sapiens
  Payload ID: 10659
  Gene Symbol: MYCT1
  Gene Name: myc target 1
  Uniprot ID: Q8N699
  ENSP ID: ENSP00000356214
MRTQVYEGLCKNYFSLAVLQRDRIKLLFFDILVFLSVFLLFLLFLVDIMANNTTSLGSPWPENFWEDLIMSFTVSMAIGLVLGGFIWAVFICLSRRRRASAPISQWSSSRRSRSSYTHGLNRTGFYRHSGCERRSNLSLASLTFQRQASLEQANSFPRKSSFRASTFHPFLQCPPLPVETESQLVTLPSSNISPTISTSHSLSRPDYWSSNSLRVGLSTPPPPAYESIIKAFPDS

SEQ ID NO: 53807 - protein, 67 aa, Homo sapiens
  Payload ID: 10659
  Gene Symbol: MYCT1
  Gene Name: myc target 1
  ENSP ID: ENSP00000432612
MRTQVYEGLCKNYFSLAVLQRDRIKLLFFDILVFLSVFLLFLLFLVDIMANNTTSLGSPWPENFWGS

SEQ ID NO: 53808 - protein, 216 aa, Homo sapiens
  Payload ID: 10659
  Gene Symbol: MYCT1
  Gene Name: myc target 1
  ENSP ID: ENSP00000434396
  MOD_RES (1)..(1): Any amino acid
XRDRIKLLFFDILVFLSVFLLFLLFLVDIMANNTTSLGSPWPENFWEDLIMSFTVSMAIGLVLGGFIWAVFICLSRRRRASAPISQWSSSRRSRSSYTHGLNRTGFYRHSGCERRSNLSLASLTFQRQASLEQANSFPRKSSFRASTFHPFLQCPPLPVETESQLVTLPSSNISPTISTSHSLSRPDYWSSNSLRVGLSTPPPPAYESIIKAFPDS

SEQ ID NO: 53809 - protein, 493 aa, Homo sapiens
  Payload ID: 10660
  Gene Symbol: MAZ
  Gene Name: MYC-associated zinc finger protein (purine-binding transcription factor)
  Uniprot ID: P56270
  ENSP ID: ENSP00000219782
MFPVFPCTLLAPPFPVLGLDSRGVGGLMNSFPPPQGHAQNPLQVGAELQSRFFASQGCAQSPFQAAPAPPPTPQAPAAEPLQVDLLPVLAAAQESAAAAAAAAAAAAAVAAAPPAPAAASTVDTAALKQPPAPPPPPPPVSAPAAEAAPPASAATIAAAAATAVVAPTSTVAVAPVASALEKKTKSKGPYICALCAKEFKNGYNLRRHEAIHTGAKAGRVPSGAMKMPTMVPLSLLSVPQLSGAGGGGGEAGAGGGAAAVAAGGVVTTTASGKRIRKNHACEMCGKAFRDVYHLNRHKLSHSDEKPYQCPVCQQRFKRKDRMSYHVRSHDGAVHKPYNCSHCGKSFSRPDHLNSHVRQVHSTERPFKCEKCEAAFATKDRLRAHTVRHEEKVPCHVCGKMLSSAYISDHMKVHSQGPHHVCELCNKGFTTAAYLRIHAVKDHGLQAPRADRILCKLCSVHCKTPAQLAGHMQTHLGGAAPPVPGDAPQPQPTC

SEQ ID NO: 53810 - protein, 477 aa, Homo sapiens
  Payload ID: 10660
  Gene Symbol: MAZ
  Gene Name: MYC-associated zinc finger protein (purine-binding transcription factor)
  Uniprot ID: P56270
  ENSP ID: ENSP00000313362
MFPVFPCTLLAPPFPVLGLDSRGVGGLMNSFPPPQGHAQNPLQVGAELQSRFFASQGCAQSPFQAAPAPPPTPQAPAAEPLQVDLLPVLAAAQESAAAAAAAAAAAAAVAAAPPAPAAASTVDTAALKQPPAPPPPPPPVSAPAAEAAPPASAATIAAAAATAVVAPTSTVAVAPVASALEKKTKSKGPYICALCAKEFKNGYNLRRHEAIHTGAKAGRVPSGAMKMPTMVPLSLLSVPQLSGAGGGGGEAGAGGGAAAVAAGGVVTTTASGKRIRKNHACEMCGKAFRDVYHLNRHKLSHSDEKPYQCPVCQQRFKRKDRMSYHVRSHDGAVHKPYNCSHCGKSFSRPDHLNSHVRQVHSTERPFKCEKCEAAFATKDRLRAHTVRHEEKVPCHVCGKMLSSAYISDHMKVHSQGPHHVCELCNKGTGEVCPMAAAAAAAAAAAAAAVAAPPTAVGSLSGAEGVPVSSQPLPSQPW

SEQ ID NO: 53811 - protein, 454 aa, Homo sapiens
  Payload ID: 10660
  Gene Symbol: MAZ
  Gene Name: MYC-associated zinc finger protein (purine-binding transcription factor)
  Uniprot ID: P56270
  ENSP ID: ENSP00000443956
MDPSNWSSFIFQGHAQNPLQVGAELQSRFFASQGCAQSPFQAAPAPPPTPQAPAAEPLQVDLLPVLAAAQESAAAAAAAAAAAAAVAAAPPAPAAASTVDTAALKQPPAPPPPPPPVSAPAAEAAPPASAATIAAAAATAVVAPTSTVAVAPVASALEKKTKSKGPYICALCAKEFKNGYNLRRHEAIHTGAKAGRVPSGAMKMPTMVPLSLLSVPQLSGAGGGGGEAGAGGGAAAVAAGGVVTTTASGKRIRKNHACEMCGKAFRDVYHLNRHKLSHSDEKPYQCPVCQQRFKRKDRMSYHVRSHDGAVHKPYNCSHCGKSFSRPDHLNSHVRQVHSTERPFKCEKCEAAFATKDRLRAHTVRHEEKVPCHVCGKMLSSAYISDHMKVHSQGPHHVCELCNKGTGEVCPMAAAAAAAAAAAAAAVAAPPTAVGSLSGAEGVPVSSQPLPSQPW

SEQ ID NO: 53812 - protein, 78 aa, Homo sapiens
  Payload ID: 10660
  Gene Symbol: MAZ
  Gene Name: MYC-associated zinc finger protein (purine-binding transcription factor)
  ENSP ID: ENSP00000455473
MLSSAYISDHMKVHSQGPHHVCELCNKGTGEVCPMAAAAAAAAAAAAAAVAAPPTAVGSLSGAEGVPVSSQPLPSQPW

SEQ ID NO: 53813 - protein, 172 aa, Homo sapiens
  Payload ID: 10660
  Gene Symbol: MAZ
  Gene Name: MYC-associated zinc finger protein (purine-binding transcription factor)
  Uniprot ID: P56270
  ENSP ID: ENSP00000455726
MFPVFPCTLLAPPFPVLGLDSRGVGGLMNSFPPPQGHAQNPLQVGAELQSRFFASQGCAQSPFQKCEAAFATKDRLRAHTVRHEEKVPCHVCGKMLSSAYISDHMKVHSQGPHHVCELCNKGTGEVCPMAAAAAAAAAAAAAAVAAPPTAVGSLSGAEGVPVSSQPLPSQPW

SEQ ID NO: 53814 - protein, 196 aa, Homo sapiens
  Payload ID: 10660
  Gene Symbol: MAZ
  Gene Name: MYC-associated zinc finger protein (purine-binding transcription factor)
  ENSP ID: ENSP00000455794
  MOD_RES (1)..(1): Any amino acid
XGAVHKPYNCSHCGKSFSRPDHLNSHVRQVHSTERPFKCEKCEAAFATKDRLRAHTVRHEEKVPCHVCGKMLSSAYISDHMKVHSQGPHHVCELCNKGTGEVCPMAAAAAAAAAAAAAAVAAPPTAVGSLSGAEGVPVSSQPLPSQPCSSPGLVFSSLFPTTEEVVALAMSSCSCVPCMYPTLHPFLLRGPHYNKF

SEQ ID NO: 53815 - protein, 152 aa, Homo sapiens
  Payload ID: 10660
  Gene Symbol: MAZ
  Gene Name: MYC-associated zinc finger protein (purine-binding transcription factor)
  ENSP ID: ENSP00000455913
SFSRCARGLGRPLGRGEGGTRRRPDHLNSHVRQVHSTERPFKCEKCEAAFATKDRLRAHTVRHEEKVPCHVCGKMLSSAYISDHMKVHSQGPHHVCELCNKGTGEVCPMAAAAAAAAAAAAAAVAAPPTAVGSLSGAEGVPVSSQPLPSQPW

SEQ ID NO: 53816 - protein, 84 aa, Homo sapiens
  Payload ID: 10660
  Gene Symbol: MAZ
  Gene Name: MYC-associated zinc finger protein (purine-binding transcription factor)
  ENSP ID: ENSP00000456179
MFPVFPCTLLAPPFPVLGLDSRGVGGLMNSFPPPQGHAQNPLQVGAELQSRFFASQGCAQSPFQAGSPQQSRQTSALNRTALQM

SEQ ID NO: 53817 - protein, 186 aa, Homo sapiens
  Payload ID: 10660
  Gene Symbol: MAZ
  Gene Name: MYC-associated zinc finger protein (purine-binding transcription factor)
  ENSP ID: ENSP00000457310
MFPVFPCTLLAPPFPVLGLDSRGVGGLMNSFPPPQGHAQNPLQVGAELQSRFFASQGCAQSPFQAAPAPPPTPQAPAAEPLQVDLLPVLAAAQDGSGGSGSSGSSSSPSHSCGLPLGGGGGACELSATSLPTLVSSKLVAGERGEWSRVPWYKLLSPLFSHQLLFPYQPRSLQKERRKKCFLRGIR

SEQ ID NO: 53818 - protein, 94 aa, Homo sapiens
  Payload ID: 10660
  Gene Symbol: MAZ
  Gene Name: MYC-associated zinc finger protein (purine-binding transcription factor)
  ENSP ID: ENSP00000458201
MLSSAYISDHMKVHSQGPHHVCELCNKGFTTAAYLRIHAVKDHGLQAPRADRILCKLCSVHCKTPAQLAGHMQTHLGGAAPPVPGDAPQPQPTC

SEQ ID NO: 53819 - protein, 202 aa, Homo sapiens
  Payload ID: 10660
  Gene Symbol: MAZ
  Gene Name: MYC-associated zinc finger protein (purine-binding transcription factor)
  ENSP ID: ENSP00000460057
AGAGGGAAAVAAGGVVTTTASGKRIRKNHACEMCGKAFRDVYHLNRHKLSHSDEKPYQCPVCQQRFKRKDRMSYHVRSHDGAVHKPYNCSHCGKSFSRPDHLNSHVRQVHSTERPFKCEKCEAAFATKDRLRAHTVRHEEKVPCHVCGKMLSSAYISDHMKVHSQGPHHVCELCNKGTCRGLPGGPGAEGGRLARRLATDTG

SEQ ID NO: 53820 - protein, 53 aa, Homo sapiens
  Payload ID: 10660
  Gene Symbol: MAZ
  Gene Name: MYC-associated zinc finger protein (purine-binding transcription factor)
  ENSP ID: ENSP00000460877
MLSSAYISDHMKVHSQGPHHVCELCNKGTCRGLPGGPGAEGGRLARRLATDTG

SEQ ID NO: 53821 - protein, 184 aa, Homo sapiens
  Payload ID: 10660
  Gene Symbol: MAZ
  Gene Name: MYC-associated zinc finger protein (purine-binding transcription factor)
  ENSP ID: ENSP00000461174
MFPVFPCTLLAPPFPVLGLDSRGVGGLMNSFPPPQGHAQNPLQVGAELQSRFFASQGCAQSPFQAAPAPPPTPQAPAAEPLQVDLLPVLAAAQDGGSGSSGSSSSPSHSCGLPLGGGGGACELSATSLPTLVSSKLVAGERGEWSRVPWYKLLSPLFSHQLLFPYQPRSLQKERRKKCFLRGIR

SEQ ID NO: 53822 - protein, 78 aa, Homo sapiens
  Payload ID: 10660
  Gene Symbol: MAZ
  Gene Name: MYC-associated zinc finger protein (purine-binding transcription factor)
  ENSP ID: ENSP00000461630
MLSSAYISDHMKVHSQGPHHVCELCNKGFTTAAYLRIHAVKDHGLQAPRADRILCKLCSVHCKTPAQLAGHMQTHLGG

SEQ ID NO: 53823 - protein, 252 aa, Homo sapiens [sequence omitted]

SEQ ID NO: 53824 - protein, 984 aa, Homo sapiens
  Payload ID: 10661
  Gene Symbol: MYCBPAP
  Gene Name: MYCBP associated protein
  Uniprot ID: Q8TBZ2
  ENSP ID: ENSP00000323184
MRAPARGTGCCGRSGGRWLAGAAQPRCLWAGGAGQRFMVPGGTMKSLKKDSRLRITPTRLLEASENVKEKKRAKGPEQPTPTIQEEPEPVSNVLQGDDILALAIKKEDLKEQHIPRLTEKEDKRVITQKFIIRKLKPMDPRRKVCHLVARPANPDEATKPLDYSGPGDSFDGSDQILPHHILGSLQDFKRIALARGNTQLAERIPTSPCLMTLISAEGESKQKAPKEEKRPPWAPPPQHNFLKNWQRNTALRKKQQEALSEHLKKPVSELLMHTGETYRRIQEERELIDCTLPTRRDRKSWENSGFWSRLEYLGDEMTGLVMTKTKTQRGLMEPITHIRKPHSIRVETGLPAQRDASYRYTWDRSLFLIYRRKELQRIMEELDFSQQDIDGLEVVGKGWPFSAVTVEDYTVFERSQGSSSEDTAYLGTLASSSDVSMPILGPSLLFCGKPACWIRGSNPQDKRQVGIAAHLTFETLEGEKTSSELTVVNNGTVAIWYDWRRQHQPDTFQDLKKNRMQRFYFDNREGVILPGEIKTFTFFFKSLTAGVFREFWEFRTHPTLLGGAILQVNLHAVSLTQDVFEDERKVLESKLTAHEAVTVVREVLQELLMGVLTPERTPSPVDAYLTEEDLFRHRNPPLHYEHQVVQSLHQLWRQYMTLPAKAEEARPGDKEHVSPIATEKASVNAELLPRFRSPISETQVPRPENEALRESGSQKARVGTKSPQRKSIMEEILVEESPDVDSTKSPWEPDGLPLLEWNLCLEDFRKAVMVLPDENHREDALMRLNKAALELCQKPRPLQSNLLHQMCLQLWRDVIDSLVGHSMWLRSVLGLPEKETIYLNVPEEQDQKSPPIMEVKVPVGKAGKEERKGAAQEKKQLGIKDKEDKKGAKLLGKEDRPNSKKHKAKDDKKVIKSASQDRFSLEDPTPDIILSSQEPIDPLVMGKYTQSLHSEVRGLLDTLVTDLMVLADELSPIKNVEEALRLCR

SEQ ID NO: 53825 - protein, 942 aa, Homo sapiens
  Payload ID: 10661
  Gene Symbol: MYCBPAP
  Gene Name: MYCBP associated protein
  Uniprot ID: Q8TBZ2
  ENSP ID: ENSP00000397209
MVPGGTMKSLKKDSRLRITPTRLLEASENVKEKKRAKGPEQPTPTIQEEPEPVSNVLQGDDILALAIKKEDLKEQHIPRLTEKEDKRVITQKFIIRKLKPMDPRRKVCHLVARPANPDEATKPLDYSGPGDSFDGSDQILPHHILGSLQDFKRIALARGNTQLAERIPTSPCLMTLISAEGESKQKAPKEEKRPPWAPPPQHNFLKNWQRNTALRKKQQEALSEHLKKPVSELLMHTGETYRRIQEERELIDCTLPTRRDRKSWENSGFWSRLEYLGDEMTGLVMTKTKTQRGLMEPITHIRKPHSIRVETGLPAQRDASYRYTWDRSLFLIYRRKELQRIMEELDFSQQDIDGLEVVGKGWPFSAVTVEDYTVFERSQGSSSEDTAYLGTLASSSDVSMPILGPSLLFCGKPACWIRGSNPQDKRQVGIAAHLTFETLEGEKTSSELTVVNNGTVAIWYDWRRQHQPDTFQDLKKNRMQRFYFDNREGVILPGEIKTFTFFFKSLTAGVFREFWEFRTHPTLLGGAILQVNLHAVSLTQDVFEDERKVLESKLTAHEAVTVVREVLQELLMGVLTPERTPSPVDAYLTEEDLFRHRNPPLHYEHQVVQSLHQLWRQYMTLPAKAEEARPGDKEHVSPIATEKASVNAELLPRFRSPISETQVPRPENEALRESGSQKARVGTKSPQRKSIMEEILVEESPDVDSTKSPWEPDGLPLLEWNLCLEDFRKAVMVLPDENHREDALMRLNKAALELCQKPRPLQSNLLHQMCLQLWRDVIDSLVGHSMWLRSVLGLPEKETIYLNVPEEQDQKSPPIMEVKVPVGKAGKEERKGAAQEKKQLGIKDKEDKKGAKLLGKEDRPNSKKHKAKDDKKVIKSASQDRFSLEDPTPDIILSSQEPIDPLVMGKYTQSLHSEVHPGRCVPWENTMQGAFPSTTRCGGSCL

SEQ ID NO: 53826 - protein, 97 aa, Homo sapiens
  Payload ID: 10661
  Gene Symbol: MYCBPAP
  Gene Name: MYCBP associated protein
  ENSP ID: ENSP00000397686
  MOD_RES (1)..(1): Any amino acid
XRPLAGGCGAASVSLGRRCRATFHGAGRHHEVSKEGFPPQNNSDQIIRGLRECQRAQTGLELLGSSDLPALASQDLATLNPFLGMPLPMGKEAGKGT

SEQ ID NO: 53827 - protein, 314 aa, Homo sapiens
  Payload ID: 10661
  Gene Symbol: MYCBPAP
  Gene Name: MYCBP associated protein
  ENSP ID: ENSP00000407145
MRAPARGTGCCGRSGGRWLAGAAQPRCLWAGGAGQRFMVPGGTMKSLKKDSRLRITPTRLLEASENVKEKKRAKGPEQPTPTIQEEPEPVSNVLQGDDILALAIKKEDLKEQHIPRLTEKEDKRVITQKFIIRKLKPMDPRRKVCHLVARPANPDEATKPLDYSGTPSLSPGFTVFQLMGPGDSFDGSDQILPHHILGSLQDFKRIALARGNTQLAERIPTSPCLMTLISAEGESKQKAPKEEKRPPWAPPPQHNFLKNWQRNTALRKKQQEALSEHLKKPVSELLMHTGETYRRIQEERELIDCTLPTRRDRK

SEQ ID NO: 53828 - protein, 89 aa, Homo sapiens
  Payload ID: 10661
  Gene Symbol: MYCBPAP
  Gene Name: MYCBP associated protein
  ENSP ID: ENSP00000407719
MRAPARGTGCCGRSGGRWLAGAAQPRCLWAGGAGQRFMVPGGTMKSLKKDSRLRITPTRLLEASENVKGWHAGGRIPGLDEVQKSQERV

SEQ ID NO: 53829 - protein, 954 aa, Homo sapiens
  Payload ID: 10661
  Gene Symbol: MYCBPAP
  Gene Name: MYCBP associated protein
  ENSP ID: ENSP00000414583
  MOD_RES (1)..(1): Any amino acid
XCLWAGGAGQRFMVPGGTMKSLKKDSRLRITPTRLLEASENVKEKKRAKGPEQPTPTIQEEPEPVSNVLQGDDILALAIKKEDLKEQHIPRLTEKEDKRVITQKFIIRKLKPMDPRRKVCHLVARPANPDEATKPLDYSGPGDSFDGSDQILPHHILGSLQDFKRIALARGNTQLAERIPTSPCLMTLISAEGESKQKAPKEEKRPPWAPPPQHNFLKNWQRNTALRKKQQEALSEHLKKPVSELLMHTGETYRRIQEERELIDCTLPTRRDRKSWENSGFWSRLEYLGDEMTGLVMTKTKTQRGLMEPITHIRKPHSIRVETGLPAQRDASYRYTWDRSLFLIYRRKELQRIMEELDFSQQDIDGLEVVGKGWPFSAVTVEDYTVFERSQGSSSEDTAYLGTLASSSDVSMPILGPSLLFCGKPACWIRGSNPQDKRQVGIAAHLTFETLEGEKTSSELTVVNNGTVAIWYDWRRQHQPDTFQDLKKNRMQRFYFDNREGVILPGEIKTFTFFFKSLTAGVFREFWEFRTHPTLLGGAILQVNLHAVSLTQDVFEDERKVLESKLTAHEAVTVVREVLQELLMGVLTPERTPSPVDAYLTEEDLFRHRNPPLHYEHQVVQSLHQLWRQYMTLPAKAEEARPGDKEHVSPIATEKASVNAELLPRFRSPISETQVPRPENEALRESGSQKARVGTKSPQRKSIMEEILVEESPDVDSTKSPWEPDGLPLLEWNLCLEDFRKAVMVLPDENHREDALMRLNKAALELCQKPRPLQSNLLHQMCLQLWRDVIDSLVGHSMWLRSVLGLPEKETIYLNVPEEQDQKSPPIMEVKVPVGKAGKEERKGAAQEKKQLGIKDKEDKKGAKLLGKEDRPNSKKHKAKDDKKVIKSASQDRFSLEDPTPDIILSSQEPIDPLVMGKYTQSLHSEVHPGRCVPWENTMQGAFPSTTRCGGSCL

SEQ ID NO: 53830 - protein, 106 aa, Homo sapiens
  Payload ID: 10661
  Gene Symbol: MYCBPAP
  Gene Name: MYCBP associated protein
  ENSP ID: ENSP00000464992
  MOD_RES (1)..(1): Any amino acid
XVNLHAVSLTQDVFEDERKVLESKLTAHEAVTVVREVLQELLMGVLTPERTPSPVDAYLTEEDLFRHRNPPVRPSASPCPLMCALRQGSPTRRPHSGRSVGCWTPW

SEQ ID NO: 53831 - protein, 48 aa, Homo sapiens
  Payload ID: 10661
  Gene Symbol: MYCBPAP
  Gene Name: MYCBP associated protein
  ENSP ID: ENSP00000465337
  MOD_RES (1)..(1): Any amino acid
XHSEVKGSAQQPFPCLPPALFIPFSLQTISAHSIMVEAELLQEGHPRV

SEQ ID NO: 53832 - protein, 108 aa, Homo sapiens
  Payload ID: 10661
  Gene Symbol: MYCBPAP
  Gene Name: MYCBP associated protein
  ENSP ID: ENSP00000465746
  MOD_RES (1)..(1): Any amino acid
XDKEHVSPIATEKASVNAELLPRFRSPISETQVPRPENEALRESGSQKARVGTKSPQRKSIMEEILVEESPDVDSTKSPWEPDGLPLLEWNLCLEDFRKNGAHDPARQ

SEQ ID NO: 53833 - protein, 767 aa, Homo sapiens
  Payload ID: 10662
  Gene Symbol: MAATS1
  Gene Name: MYCBP-associated, testis expressed 1
  Uniprot ID: Q7Z4T9
  ENSP ID: ENSP00000273390
MSHAVTIEEPQAQPQVSQTRYRERSRAGSHISSNRAYDFLYDPLFIVSSEKDHTQANIQATLIRSRLRKVPRFKTMFSNLIHYPRYSLYWSKSDPVPPFISREWKGHKEKHREALRQLTTTDASFQMPKEVYEDPEVTGKNRYKYFERPFLPFFQQMPFNVVYAVSKAEPYTFPPTSTKHLSIPSKSTVGTQTDYRDADVQTDPYSAEYVVCQDSIPELLTLATLTWGRGLPAGQAEVEMIERAREKRAWEASLPALSDTSQFEKRRKMMNEMERKEWAFREQEIEKLQEIRLEVLKELLRKREENQNEVNMKHLNARWSKLQEGKEAKMAKIQRTHVSTIRKLVGKRKNIEGKLERRNIIKDYSDYASQVYGPLSRLGCFPDNNSEDFVVKNYYLNTYEGLVELESCLPDFVTQPQIRAPKPKVITTKAGFLKRAARLDYELAEVHKALLDKKNKVLEVKKPPRFLQRNPIPQPRLPTPTLEMTSNEEEEMEMAVIYLQKLLRGRVVQNMMFEGKEKRLELIQELRTCHALQEDEKLVKKAEKQVTLALQRQRNLHEHKVSLVENHLAGLEGRALADMFDFLSKELVRLQEERRIHAFVMLAERQRRVREAEESGRRQVEKQRLREEDEIFKEVVKVHHSTISSYLEDIILNTEANTAEEQARAEIEKMAEKINDIAYEMESRRTYLQSEEIVAELVYSFLIPEVQKYFVKEKVRNAQRKHILAAHQIIHSYTESMVQKKLTEGEQDEASNAAMLLEKETQNENNS

SEQ ID NO: 53834 - protein, 55 aa, Homo sapiens
  Payload ID: 10662
  Gene Symbol: MAATS1
  Gene Name: MYCBP-associated, testis expressed 1
  ENSP ID: ENSP00000418601
MSHAVTIEEPQAQPQVSQTRYRERSRAGSHISSNRAYDFLYGKDRRRPSSASVAS

SEQ ID NO: 53835 - protein, 238 aa, Homo sapiens
  Payload ID: 10662
  Gene Symbol: MAATS1
  Gene Name: MYCBP-associated, testis expressed 1
  Uniprot ID: Q7Z4T9
  ENSP ID: ENSP00000419489
MSHAVTIEEPQAQPQVSQTRYRERSRAGSHISSNRAYDFLYDPLFIVSSEKDHTQANIQATLIRSRLRKVPRFKTMFSNLIHYPRYSLYWSKSDPVPPFISREWKGHKEKHREALRQLTTTDASFQMPKEVYEDPEVTGKNRYKYFERPFLPFFQQMPFNVVYAVSKAEPYTFPPTSTKHLSIPSKSTVGTQTDYRDADVQTDPYSAEYVVCQDSIPELLTLATLTWGELVNLLTIGR

SEQ ID NO: 53836 - protein, 47 aa, Homo sapiens
  Payload ID: 10662
  Gene Symbol: MAATS1
  Gene Name: MYCBP-associated, testis expressed 1
  ENSP ID: ENSP00000419520
MSHAVTIEEPQAQPQVSQTRYRERSRAGSHISSNRAYDFLYEKSSQV

SEQ ID NO: 53837 - protein, 101 aa, Homo sapiens
  Payload ID: 10662
  Gene Symbol: MAATS1
  Gene Name: MYCBP-associated, testis expressed 1
  ENSP ID: ENSP00000419554
EWKGHKEKHREALRQLTTCLKKFMKILKLLERIAINTLKGLFSHFFSRCHSMLFMPYPRQNHTLFLLLLLSTYPSLQSLLWALRLIIGMLTFKQIHTLQNM

SEQ ID NO: 53838 - protein, 131 aa, Homo sapiens
  Payload ID: 10662
  Gene Symbol: MAATS1
  Gene Name: MYCBP-associated, testis expressed 1
  ENSP ID: ENSP00000419972
MSHAVTIEEPQAQPQVSQTRYRERSRAGSHISSNRAYDFLYELTLLFRCLKKFMKILKLLERIAINTLKGLFSHFFSRCHSMLFMPYPRQNHTLFLLLLLSTYPSLQSLLWALRLIIGMLTFKQIHTLQNM

SEQ ID NO: 53839 - protein, 582 aa, Homo sapiens
  Payload ID: 10663
  Gene Symbol: MAG
  Gene Name: myelin associated glycoprotein
  Uniprot ID: P20916
  ENSP ID: ENSP00000355234
MIFLTALPLFWIMISASRGGHWGAWMPSSISAFEGTCVSIPCRFDFPDELRPAVVHGVWYFNSPYPKNYPPVVFKSRTQVVHESFQGRSRLLGDLGLRNCTLLLSNVSPELGGKYYFRGDLGGYNQYTFSEHSVLDIVNTPNIVVPPEVVAGTEVEVSCMVPDNCPELRPELSWLGHEGLGEPAVLGRLREDEGTWVQVSLLHFVPTREANGHRLGCQASFPNTTLQFEGYASMDVKYPPVIVEMNSSVEAIEGSHVSLLCGADSNPPPLLTWMRDGTVLREAVAESLLLELEEVTPAEDGVYACLAENAYGQDNRTVGLSVMYAPWKPTVNGTMVAVEGETVSILCSTQSNPDPILTIFKEKQILSTVIYESELQLELPAVSPEDDGEYWCVAENQYGQRATAFNLSVEFAPVLLLESHCAAARDTVQCLCVVKSNPEPSVAFELPSRNVTVNESEREFVYSERSGLVLTSILTLRGQAQAPPRVICTARNLYGAKSLELPFQGAHRLMWAKIGPVGAVVAFAILIAIVCYITQTRRKKNVTESPSFSAGDNPPVLFSSDFRISGAPEKYESKEVSTLESH

SEQ ID NO: 53840 - protein, 626 aa, Homo sapiens
  Payload ID: 10663
  Gene Symbol: MAG
  Gene Name: myelin associated glycoprotein
  Uniprot ID: P20916
  ENSP ID: ENSP00000376048
MIFLTALPLFWIMISASRGGHWGAWMPSSISAFEGTCVSIPCRFDFPDELRPAVVHGVWYFNSPYPKNYPPVVFKSRTQVVHESFQGRSRLLGDLGLRNCTLLLSNVSPELGGKYYFRGDLGGYNQYTFSEHSVLDIVNTPNIVVPPEVVAGTEVEVSCMVPDNCPELRPELSWLGHEGLGEPAVLGRLREDEGTWVQVSLLHFVPTREANGHRLGCQASFPNTTLQFEGYASMDVKYPPVIVEMNSSVEAIEGSHVSLLCGADSNPPPLLTWMRDGTVLREAVAESLLLELEEVTPAEDGVYACLAENAYGQDNRTVGLSVMYAPWKPTVNGTMVAVEGETVSILCSTQSNPDPILTIFKEKQILSTVIYESELQLELPAVSPEDDGEYWCVAENQYGQRATAFNLSVEFAPVLLLESHCAAARDTVQCLCVVKSNPEPSVAFELPSRNVTVNESEREFVYSERSGLVLTSILTLRGQAQAPPRVICTARNLYGAKSLELPFQGAHRLMWAKIGPVGAVVAFAILIAIVCYITQTRRKKNVTESPSFSAGDNPPVLFSSDFRISGAPEKYESERRLGSERRLLGLRGEPPELDLSYSHSDLGKRPTKDSYTLTEELAEYAEIRVK

SEQ ID NO: 53841 - protein, 601 aa, Homo sapiens
  Payload ID: 10663
  Gene Symbol: MAG
  Gene Name: myelin associated glycoprotein
  Uniprot ID: P20916
  ENSP ID: ENSP00000440695
MPSSISAFEGTCVSIPCRFDFPDELRPAVVHGVWYFNSPYPKNYPPVVFKSRTQVVHESFQGRSRLLGDLGLRNCTLLLSNVSPELGGKYYFRGDLGGYNQYTFSEHSVLDIVNTPNIVVPPEVVAGTEVEVSCMVPDNCPELRPELSWLGHEGLGEPAVLGRLREDEGTWVQVSLLHFVPTREANGHRLGCQASFPNTTLQFEGYASMDVKYPPVIVEMNSSVEAIEGSHVSLLCGADSNPPPLLTWMRDGTVLREAVAESLLLELEEVTPAEDGVYACLAENAYGQDNRTVGLSVMYAPWKPTVNGTMVAVEGETVSILCSTQSNPDPILTIFKEKQILSTVIYESELQLELPAVSPEDDGEYWCVAENQYGQRATAFNLSVEFAPVLLLESHCAAARDTVQCLCVVKSNPEPSVAFELPSRNVTVNESEREFVYSERSGLVLTSILTLRGQAQAPPRVICTARNLYGAKSLELPFQGAHRLMWAKIGPVGAVVAFAILIAIVCYITQTRRKKNVTESPSFSAGDNPPVLFSSDFRISGAPEKYESERRLGSERRLLGLRGEPPELDLSYSHSDLGKRPTKDSYTLTEELAEYAEIRVK

SEQ ID NO: 53842 - protein, 131 aa, Homo sapiens
  Payload ID: 10663
  Gene Symbol: MAG
  Gene Name: myelin associated glycoprotein
  ENSP ID: ENSP00000470772
MPSSISAFEGTCVSIPCRFDFPDELRPAVVHGVWYFNSPYPKNYPPVVFKSRTQVVHESFQGRSRLLGDLGLRNCTLLLSNVSPELGGKYYFRGDLGGYNQYTFSEHSVLDIVNTPNIVVPPEVVAGTEVE

SEQ ID NO: 53843 - protein, 158 aa, Homo sapiens
  Payload ID: 10663
  Gene Symbol: MAG
  Gene Name: myelin associated glycoprotein
  ENSP ID: ENSP00000473125
MIFLTALPLFWIMISASRGGHWGAWMPSSISAFEGTCVSIPCRFDFPDELRPAVVHGVWYFNSPYPKNYPPVVFKSRTQVVHESFQGRSRLLGDLGLRNCTLLLSNVSPELGGKYYFRGDLGGYNQYTFSEHSVLDIVNTPNIVVPPEVVAGTEVEVS

SEQ ID NO: 53844 - protein, 58 aa, Homo sapiens
  Payload ID: 10663
  Gene Symbol: MAG
  Gene Name: myelin associated glycoprotein
  ENSP ID: ENSP00000473245
MIFLTALPLFWIMISASRGGHWGAWMPSSISAFEGTCVSIPCRFDFPDELRPAVVHGV

SEQ ID NO: 53845 - protein, 73 aa, Homo sapiens
  Payload ID: 10664
  Gene Symbol: MBP
  Gene Name: myelin basic protein
  ENSP ID: ENSP00000346545
MASQKRPSQRHGSKYLATASTMDHARHGFLPRHRDTGILDSIGRFFGGDRGAPKRGSGKGGRDSRSGSPMARR

SEQ ID NO: 53846 - protein, 304 aa, Homo sapiens
  Payload ID: 10664
  Gene Symbol: MBP
  Gene Name: myelin basic protein
  Uniprot ID: P02686
  ENSP ID: ENSP00000348273
MGNHAGKRELNAEKASTNSETNRGESEKKRNLGELSRTTSEDNEVFGEADANQNNGTSSQDTAVTDSKRTADPKNAWQDAHPADPGSRPHLIRLFSRDAPGREDNTFKDRPSESDELQTIQEDSAATSESLDVMASQKRPSQRHGSKYLATASTMDHARHGFLPRHRDTGILDSIGRFFGGDRGAPKRGSGKDSHHPARTAHYGSLPQKSHGRTQDENPVVHFFKNIVTPRTPPPSQGKGRGLSLSRFSWGAEGQRPGFGYGGRASDYKSAHKGFKGVDAQGTLSKIFKLGGRDSRSGSPMARR

SEQ ID NO: 53847 - protein, 186 aa, Homo sapiens
  Payload ID: 10664
  Gene Symbol: MBP
  Gene Name: myelin basic protein
  Uniprot ID: P02686
  ENSP ID: ENSP00000352667
MASQKRPSQRHGSKYLATASTMDHARHGFLPRHRDTGILDSIGRFFGGDRGAPKRGSGKVPWLKPGRSPLPSHARSQPGLCNMYKDSHHPARTAHYGSLPQKSHGRTQDENPVVHFFKNIVTPRTPPPSQGKGAEGQRPGFGYGGRASDYKSAHKGFKGVDAQGTLSKIFKLGGRDSRSGSPMARR

SEQ ID NO: 53848 - protein, 197 aa, Homo sapiens
  Payload ID: 10664
  Gene Symbol: MBP
  Gene Name: myelin basic protein
  Uniprot ID: P02686
  ENSP ID: ENSP00000372025
MASQKRPSQRHGSKYLATASTMDHARHGFLPRHRDTGILDSIGRFFGGDRGAPKRGSGKVPWLKPGRSPLPSHARSQPGLCNMYKDSHHPARTAHYGSLPQKSHGRTQDENPVVHFFKNIVTPRTPPPSQGKGRGLSLSRFSWGAEGQRPGFGYGGRASDYKSAHKGFKGVDAQGTLSKIFKLGGRDSRSGSPMARR

SEQ ID NO: 53849 - protein, 197 aa, Homo sapiens
  Payload ID: 10664
  Gene Symbol: MBP
  Gene Name: myelin basic protein
  Uniprot ID: P02686
  ENSP ID: ENSP00000380958
MGNHAGKRELNAEKASTNSETNRGESEKKRNLGELSRTTSEDNEVFGEADANQNNGTSSQDTAVTDSKRTADPKNAWQDAHPADPGSRPHLIRLFSRDAPGREDNTFKDRPSESDELQTIQEDSAATSESLDVMASQKRPSQRHGSKYLATASTMDHARHGFLPRHRDTGILDSIGRFFGGDRGAPKRGSGKVSSEE

SEQ ID NO: 53850 - protein, 197 aa, Homo sapiens; identical to SEQ ID NO: 53849
  Payload ID: 10664
  Gene Symbol: MBP
  Gene Name: myelin basic protein
  Uniprot ID: P02686
  ENSP ID: ENSP00000380961

SEQ ID NO: 53851 - protein, 160 aa, Homo sapiens
  Payload ID: 10664
  Gene Symbol: MBP
  Gene Name: myelin basic protein
  Uniprot ID: P02686
  ENSP ID: ENSP00000380963
MASQKRPSQRHGSKYLATASTMDHARHGFLPRHRDTGILDSIGRFFGGDRGAPKRGSGKDSHHPARTAHYGSLPQKSHGRTQDENPVVHFFKNIVTPRTPPPSQGKGAEGQRPGFGYGGRASDYKSAHKGFKGVDAQGTLSKIFKLGGRDSRSGSPMARR

SEQ ID NO: 53852 - protein, 171 aa, Homo sapiens
  Payload ID: 10664
  Gene Symbol: MBP
  Gene Name: myelin basic protein
  Uniprot ID: P02686
  ENSP ID: ENSP00000380964
MASQKRPSQRHGSKYLATASTMDHARHGFLPRHRDTGILDSIGRFFGGDRGAPKRGSGKDSHHPARTAHYGSLPQKSHGRTQDENPVVHFFKNIVTPRTPPPSQGKGRGLSLSRFSWGAEGQRPGFGYGGRASDYKSAHKGFKGVDAQGTLSKIFKLGGRDSRSGSPMARR

SEQ ID NO: 53853 - protein, 236 aa, Homo sapiens
  Payload ID: 10664
  Gene Symbol: MBP
  Gene Name: myelin basic protein
  ENSP ID: ENSP00000380967
MASQKRPSQRHGSKYLATASTMDHARHGFLPRHRDTGILDSIGRFFGGDRGAPKRGSGKDSHHPARTAHYGSLPQKSHGRTQDENPVVHFFKNIVTPRTPPPSQGKGRGLSLSRFSWVGDERTSIGFLFRPSPHSPATFVFCSVSVASWPPFLSSRDLSAHSWDRAALSSTGEMKRGLPFRKGAEGQRPGFGYGGRASDYKSAHKGFKGVDAQGTLSKIFKLGGRDSRSGSPMARR

SEQ ID NO: 53854 - protein, 181 aa, Homo sapiens
  Payload ID: 10664
  Gene Symbol: MBP
  Gene Name: myelin basic protein
  ENSP ID: ENSP00000380973
MASQKRPSQRHGSKYLATASTMDHARHGFLPRHRDTGILDSIGRFFGGDRGAPKRGSGKDSHHPARTAHYGSLPQKSHGRTQDENPVVHFFKNICSPRFSVSFQVTPRTPPPSQGKGRGLSLSRFSWGAEGQRPGFGYGGRASDYKSAHKGFKGVDAQGTLSKIFKLGGRDSRSGSPMARR

SEQ ID NO: 53855 - protein, 101 aa, Homo sapiens
  Payload ID: 10664
  Gene Symbol: MBP
  Gene Name: myelin basic protein
  ENSP ID: ENSP00000405882
MYKDSHHPARTAHYGSLPQKSHGRTQDENPVVHFFKNIVTPRTPPPSQGKGRGLSLSRFSWGAEGQRPGFGYGGRASDYKSAHKGFKGVDAQGTLSKIFKL

SEQ ID NO: 53856 - protein, 32 aa, Homo sapiens
  Payload ID: 10664
  Gene Symbol: MBP
  Gene Name: myelin basic protein
  ENSP ID: ENSP00000431267
MASQKRPSQRHGSKYLATASTMDHARHGFLPR

SEQ ID NO: 53857 - protein, 59 aa, Homo sapiens
  Payload ID: 10664
  Gene Symbol: MBP
  Gene Name: myelin basic protein
  ENSP ID: ENSP00000431335
MASQKRPSQRHGSKYLATASTMDHARHGFLPRTHTTRQELLTTAPCPRSHTAGPKMKTP

SEQ ID NO: 53858 - protein, 98 aa, Homo sapiens
  Payload ID: 10664
  Gene Symbol: MBP
  Gene Name: myelin basic protein
  ENSP ID: ENSP00000432988
MASQKRPSQRHGSKYLATASTMDHARHGFLPRHRDTGILDSIGRFFGGDRGAPKRGSGKDSHHPARTAHYGSLPQKSHGRTQDENPVVHFFKNIAGAR

SEQ ID NO: 53859 - protein, 64 aa, Homo sapiens
  Payload ID: 10664
  Gene Symbol: MBP
  Gene Name: myelin basic protein
  ENSP ID: ENSP00000434011
MASQKRPSQRHGSKYLATASTMDHARHGFLPSGALARTHTTRQELLTTAPCPRSHTAGPKMKTP

SEQ ID NO: 53860 - protein, 108 aa, Homo sapiens
  Payload ID: 10664
  Gene Symbol: MBP
  Gene Name: myelin basic protein
  ENSP ID: ENSP00000435243
MASQKRPSQRHGSKYLATASTMDHARHGFLPRHRDTGILDSIGRFFGGDRGAPKRGSGKDSHHPARTAHYGSLPQKHTAAETERTWAAERTVDIQASFVFFSCPSLTS

SEQ ID NO: 53861 - protein, 119 aa, Homo sapiens
  Payload ID: 10664
  Gene Symbol: MBP
  Gene Name: myelin basic protein
  ENSP ID: ENSP00000435322
MASQKRPSQRHGSKYLATASTMDHARHGFLPRHRDTGILDSIGRFFGGDRGAPKRGSGKDSHHPARTAHYGSLPQKSHGRTQDENPVVHFFKNIVYTSSPTRTEVGRLGTRVLLAADGC

SEQ ID NO: 53862 - protein, 149 aa, Homo sapiens
  Payload ID: 10664
  Gene Symbol: MBP
  Gene Name: myelin basic protein
  ENSP ID: ENSP00000435641
MASQKRPSQRHRDTGILDSIGRFFGGDRGAPKRGSGKDSHHPARTAHYGSLPQKSHGRTQDENPVVHFFKNIVTPRTPPPSQGKGRGLSLSRFSWGAEGQRPGFGYGGRASDYKSAHKGFKGVDAQGTLSKIFKLGGRDSRSGSPMARR

SEQ ID NO: 53863 - protein, 68 aa, Homo sapiens
  Payload ID: 10664
  Gene Symbol: MBP
  Gene Name: myelin basic protein
  ENSP ID: ENSP00000436830
MASQKRPSQRHGSKYLATASTMDHARHGFLPRARFPKFLSWEEEIVALDHPWLDAENPPGSGILSSAS

SEQ ID NO: 53864 - protein, 108 aa, Homo sapiens
  Payload ID: 10664
  Gene Symbol: MBP
  Gene Name: myelin basic protein
  ENSP ID: ENSP00000436951
MASQKRPSQRHGSKYLATASTMDHARHGFLPRHRDTGILDSIGRFFGGDRGAPKRGSGKDSHHPARTAHYGSLPQKSHGRTQDENPVVHFFKNIDRSGEAGHPGASGS

SEQ ID NO: 53865 - protein, 86 aa, Homo sapiens
  Payload ID: 10664
  Gene Symbol: MBP
  Gene Name: myelin basic protein
  ENSP ID: ENSP00000437063
MASQKRPSQRHGSKYLATASTMDHARHGFLPRHRDTGILDSIGRFFGGDRGAPKRGSGKDSHHPARTAHYGSLPQKSHGRTQDENP

SEQ ID NO: 53866 - protein, 66 aa, Homo sapiens
  Payload ID: 10664
  Gene Symbol: MBP
  Gene Name: myelin basic protein
  ENSP ID: ENSP00000442393
MASQKRPSQRHGSKYLATASTMDHARHGFLPRHRDTGILDSIGRFFGGDRGAPKRGSGKESRTLSR

SEQ ID NO: 53867 - protein, 304 aa, Homo sapiens; identical to SEQ ID NO: 53846
  Payload ID: 10664
  Gene Symbol: MBP
  Gene Name: myelin basic protein
  Uniprot ID: P02686
  ENSP ID: ENSP00000462223

SEQ ID NO: 53868 - protein, 159 aa, Homo sapiens
  Payload ID: 10664
  Gene Symbol: MBP
  Gene Name: myelin basic protein
  ENSP ID: ENSP00000462374
MGNHAGKRELNAEKASTNSETNRGESEKKRNLGELSRTTSEDNEVFGEADANQNNGTSSQDTAVTDSKRTADPKNAWQDAHPADPGSRPHLIRLFSRDAPGREDNTFKDRPSESDELQTIQEDSAATSESLDVMASQKRPSQRHGSKYLATASTMDHAR

SEQ ID NO: 53869 - protein, 180 aa, Homo sapiens
  Payload ID: 10664
  Gene Symbol: MBP
  Gene Name: myelin basic protein
  ENSP ID: ENSP00000462734
  MOD_RES (1)..(1): Any amino acid
XLPQKSHGRTQDENPVVHFFKNIVTPRTPPPSQGKGRGLSLSRFSWVGDERTSIGFLFRPSPHSPATFVFCSVSVASWPPFLSSRDLSAHSWDRAALSSTGEMKRGLPFRKVWSLASVPGTQPCKARSSSPRGFPGDVTGLPPREGATPRPRKCLTSSNTTSARSPRNPHVEVGLAGPSQ

SEQ ID NO: 53870 - protein, 59 aa, Homo sapiens; identical to SEQ ID NO: 53857
  Payload ID: 10664
  Gene Symbol: MBP
  Gene Name: myelin basic protein
  ENSP ID: ENSP00000462758

SEQ ID NO: 53871 - protein, 60 aa, Homo sapiens
  Payload ID: 10664
  Gene Symbol: MBP
  Gene Name: myelin basic protein
  ENSP ID: ENSP00000462780
  MOD_RES (1)..(1): Any amino acid
XQKRPSQRHGSKYLATASTMDHARHGFLPRHRDTGILDSIGRFFGGDRGAPKRGSGKDCP

SEQ ID NO: 53872 - protein, 171 aa, Homo sapiens
  Payload ID: 10664
  Gene Symbol: MBP
  Gene Name: myelin basic protein
  ENSP ID: ENSP00000463137
MASQKRPSQRHGSKYLATASTMDHARHGFLPRHRDTGILDSIGRFFGGDRGAPKRGSGKVPWLKPGRSPLPSHARSQPGLCNMYKDSHHPARTAHYGSLPQKSHGRTQDENPVVHFFKNIVTPRTPPPSQGKGRGLSLSRFSWVGDERTSIGFLFRPSPHSPATFVFCSVS

SEQ ID NO: 53873 - protein, 41 aa, Homo sapiens
  Payload ID: 10664
  Gene Symbol: MBP
  Gene Name: myelin basic protein
  ENSP ID: ENSP00000463164
MGNHAGKRELNAEKASTNSETNRGESEKKRNLGELSRTTSE

SEQ ID NO: 53874 - protein, 157 aa, Homo sapiens
  Payload ID: 10664
  Gene Symbol: MBP
  Gene Name: myelin basic protein
  ENSP ID: ENSP00000463403
MASQKRPSQRHGSKYLATASTMDHARHGFLPRHRDTGILDSIGRFFGGDRGAPKRGSGKDSHHPARTAHYGSLPQKSHGRTQDENPVVHFFKNIVTPRTPPPSQGKGRGLSLSRFSWGAEGQRPGFGYGGRASDYKSAHKGFKGVDAQGTLSKIFKL

SEQ ID NO: 53875 - protein, 253 aa, Homo sapiens
  Payload ID: 10664
  Gene Symbol: MBP
  Gene Name: myelin basic protein
  ENSP ID: ENSP00000463780
MGNHAGKRELNAEKASTNSETNRGESEKKRNLGELSRTTSEDNEVFGEADANQNNGTSSQDTAVTDSKRTADPKNAWQDAHPADPGSRPHLIRLFSRDAPGREDNTFKDRPSESDELQTIQEDSAATSESLDVMASQKRPSQRHGSKYLATASTMDHARHGFLPRHRDTGILDSIGRFFGGDRGAPKRGSGKDSHHPARTAHYGSLPQKSHGRTQDENPVVHFFKNIVTPRTPPPSQGKGGRDSRSGSPMARR

SEQ ID NO: 53876 - protein, 576 aa, Homo sapiens
  Payload ID: 10665
  Gene Symbol: MYEF2
  Gene Name: myelin expression factor 2
  ENSP ID: ENSP00000267836
MADANKAEVPGATGGDSPHLQPAEPPGEPRREPHPAEAEKQQPQHSSSSNGVKMENDESAKEEKSDLKEKSTGSKKANRFHPYSKDKNSGAGEKKGPNRNRVFISNIPYDMKWQAIKDLMREKVGEVTYVELFKDAEGKSRGCGVVEFKDEEFVKKALETMNKYDLSGRPLNIKEDPDGENARRALQRTGGSFPGGHVPDMGSGLMNLPPSILNNPNIPPEVISNLQAGRLGSTIFVANLDFKVGWKKLKEVFSIAGTVKRADIKEDKDGKSRGMGTVTFEQAIEAVQAISMFNGQFLFDRPMHVKMDDKSVPHEEYRSHDGKTPQLPRGLGGIGMGLGPGGQPISASQLNIGGVMGNLGPGGMGMDGPGFGGMNRIGGGIGFGGLEAMNSMGGFGGVGRMGELYRGAMTSSMERDFGRGDIGINRGFGDSFGRLGGGMGSMNSVTGGMGMGLDRMSSSFDRMGPGIGAILERSIDMDRGFLSGPMGSGMRERIGSKGNQIFVRNLPFDLTWQKLKEKFSQCGHVMFAEIKMENGKSKGCGTVRFDSPESAEKACRIMNGIKISGREIDVRLDRNA

SEQ ID NO: 53877 - protein, 600 aa, Homo sapiens
  Payload ID: 10665
  Gene Symbol: MYEF2
  Gene Name: myelin expression factor 2
  ENSP ID: ENSP00000316950
MADANKAEVPGATGGDSPHLQPAEPPGEPRREPHPAEAEKQQPQHSSSSNGVKMENDESAKEEKSDLKEKSTGSKKANRFHPYSKDKNSGAGEKKGPNRNRVFISNIPYDMKWQAIKDLMREKVGEVTYVELFKDAEGKSRGCGVVEFKDEEFVKKALETMNKYDLSGRPLNIKEDPDGENARRALQRTGGSFPGGHVPDMGSGLMNLPPSILNNPNIPPEVISNLQAGRLGSTIFVANLDFKVGWKKLKEVFSIAGTVKRADIKEDKDGKSRGMGTVTFEQAIEAVQAISMFNGQFLFDRPMHVKMDDKSVPHEEYRSHDGKTPQLPRGLGGIGMGLGPGGQPISASQLNIGGVMGNLGPGGMGMDGPGFGGMNRIGGGIGFGGLEAMNSMGGFGGVGRMGELYRGAMTSSMERDFGRGDIGINRGFGDSFGRLGSAMIGGFAGRIGSSNMGPVGSGISGGMGSMNSVTGGMGMGLDRMSSSFDRMGPGIGAILERSIDMDRGFLSGPMGSGMRERIGSKGNQIFVRNLPFDLTWQKLKEKFSQCGHVMFAEIKMENGKSKGCGTVRFDSPESAEKACRIMNGIKISGREIDVRLDRNA

SEQ ID NO: 53878 - protein, 128 aa, Homo sapiens
  Payload ID: 10665
  Gene Symbol: MYEF2
  Gene Name: myelin expression factor 2
  Uniprot ID: Q9P2K5
  ENSP ID: ENSP00000452913
MADANKAEVPGATGGDSPHLQPAEPPGEPRREPHPAEAEKQQPQHSSSSNGVKMENDESAKEEKSDLKEKSTGSKKANRFHPYSKDKNSGAGEKKGPNRNRVFISNIPYDMKWQAIKDLMREKGLWCG

SEQ ID NO: 53879 - protein, 126 aa, Homo sapiens
  Payload ID: 10665
  Gene Symbol: MYEF2
  Gene Name: myelin expression factor 2
  ENSP ID: ENSP00000452918
  MOD_RES (1)..(1): Any amino acid
XGLDRMSSSFDRMGPGIGAILERSIDMDRGFLSGPMGSGMRERIGSKGNQIFVRNLPFDLTWQKLKEKFSQCGHVMFAEIKMENGKSKGCGTVRFDSPESAEKACRIMNGIKISGREIDVRLDRNA

SEQ ID NO: 53880 - protein, 128 aa, Homo sapiens; identical to SEQ ID NO: 53878
  Payload ID: 10665
  Gene Symbol: MYEF2
  Gene Name: myelin expression factor 2
  Uniprot ID: Q9P2K5
  ENSP ID: ENSP00000453125

SEQ ID NO: 53881 - protein, 290 aa, Homo sapiens
  Payload ID: 10665
  Gene Symbol: MYEF2
  Gene Name: myelin expression factor 2
  ENSP ID: ENSP00000453830
  MOD_RES (1)..(1): Any amino acid
XEVISNLQAGRLGSTIFVANLDFKVGWKKLKEVFSIAGTVKRADIKEDKDGKSRGMGTVTFEQAIEAVQAISMFNGQFLFDRPMHVKMDDKSVPHEEYRSHDGKTPQLPRGLGGIGMGLGPGGQPISASQLNIGGVMGNLGPGGIGFGGLEAMNSMGGFGGVGRMGELYRGAMTSSMERDFGRGDIGINRGFGDSFGRLGGGMGSMNSVTGGMGMGLDRMSSSFDRMGPGIGAILERSIDMDRGFLSGPMGSGMRERIGSKGNQIFVRNLPFDLTWQKLKEKFSQCGHVM

SEQ ID NO: 53882 - protein, 547 aa, Homo sapiens
  Payload ID: 10665
  Gene Symbol: MYEF2
  Gene Name: myelin expression factor 2
  ENSP ID: ENSP00000478898
MENDESAKEEKSDLKEKSTGSKKANRFHPYSKDKNSGAGEKKGPNRNRVFISNIPYDMKWQAIKDLMREKVGEVTYVELFKDAEGKSRVSGVVEFKDEEFVKKALETMNKYDLSGRPLNIKEDPDGENARRALQRTGGSFPGGHVPDMGSGLMNLPPSILNNPNIPPEVISNLQAGRLGSTIFVANLDFKVGWKKLKEVFSIAGTVKRADIKEDKDGKSRGMGTVTFEQAIEAVQAISMFNGQFLFDRPMHVKMDDKSVPHEEYRSHDGKTPQLPRGLGGIGMGLGPGGQPISASQLNIGGVMGNLGPGGMGMDGPGFGGMNRIGGGIGFGGLEAMNSMGGFGGVGRMGELYRGAMTSSMERDFGRGDIGINRGFGDSFGRLGSAMIGGFAGRIGSSNMGPVGSGISGGMGSMNSVTGGMGMGLDRMSSSFDRMGPGIGAILERSIDMDRGFLSGPMGSGMRERIGSKGNQIFVRNLPFDLTWQKLKEKFSQCGHVMFAEIKMENGKSKGCGTVRFDSPESAEKACRIMNGIKISGREIDVRLDRNA

SEQ ID NO: 53883 - protein, 126 aa, Homo sapiens
  Payload ID: 10665
  Gene Symbol: MYEF2
  Gene Name: myelin expression factor 2
  ENSP ID: ENSP00000480118
MADANKAEVPGATGGDSPHLQPAEPPGEPRREPHPAEAEKQQPQHSSSSNGVKMENDESAKEEKSDLKEKSTGSKKANRFHPYSKDKNSGAGEKKGPNRNRVFISNIPYDMKWQAIKDLMREKGCG

SEQ ID NO: 53884 - protein, 211 aa, Homo sapiens
  Payload ID: 10665
  Gene Symbol: MYEF2
  Gene Name: myelin expression factor 2
  ENSP ID: ENSP00000480281
MDGPGFGGMNRIGGGIGFGGLEAMNSMGGFGGVGRMGELYRGAMTSSMERDFGRGDIGINRGFGDSFGRLGGGMGSMNSVTGGMGMGLDRMSSSFDRMGPGIGAILERSIDMDRGFLSGPMGSGMRERIGSKGNQIFVRNLPFDLTWQKLKEKFSQCGHVMFAEIKMENGKSKGCGTVRFDSPESAEKACRIMNGIKISGREIDVRLDRNA

SEQ ID NO: 53885 - protein, 295 aa, Homo sapiens [sequence omitted]

SEQ ID NO: 53886 - protein, 213 aa, Homo sapiens
  Payload ID: 10666
  Gene Symbol: MOG
  Gene Name: myelin oligodendrocyte glycoprotein
  Uniprot ID: Q16653
  ENSP ID: ENSP00000352534
MASLSRPSLPSCLCSFLLLLLLQVSSSYAGQFRVIGPRHPIRALVGDEVELPCRISPGKNATGMEVGWYRPPFSRVVHLYRNGKDQDGDQAPEYRGRTELLKDAIGEGKVTLRIRNVRFSDEGGFTCFFRDHSYQEEAAMELKVEDPFYWVSPGVLVLLAVLPVLLLQITVGLVFLCLQYRLRGKLRAEIENLHRTFGQFLEELLFHLEALSG

SEQ ID NO: 53887 - protein, 131 aa, Homo sapiens
  Payload ID: 10666
  Gene Symbol: MOG
  Gene Name: myelin oligodendrocyte glycoprotein
  Uniprot ID: Q16653
  ENSP ID: ENSP00000366085
MASLSRPSLPSCLCSFLLLLLLQVSSSYADPFYWVSPGVLVLLAVLPVLLLQITVGLIFLCLQYRLRGKLRAEIENLHRTFDPHFLRVPCWKITLFVIVPVLGPLVALIICYNWLHRRLAGQFLEELRNPF

SEQ ID NO: 53888 - protein, 142 aa, Homo sapiens
  Payload ID: 10666
  Gene Symbol: MOG
  Gene Name: myelin oligodendrocyte glycoprotein
  ENSP ID: ENSP00000366086
  MOD_RES (1)..(1): Any amino acid
XQFRVIGPRHPIRALVGDEVELPCRISPGKNATGMEVGWYRPPFSRVVHLYRNGKDQDGDQAPEYRGRTELLKDAIGEGKVTLRIRNVRFSDEGGFTCFFRDHSYQEEAAMELKVEVSHSVTQDWLQWHDHGSLQPPPPRLK

SEQ ID NO: 53889 - protein, 206 aa, Homo sapiens
  Payload ID: 10666
  Gene Symbol: MOG
  Gene Name: myelin oligodendrocyte glycoprotein
  Uniprot ID: Q16653
  ENSP ID: ENSP00000366088
MASLSRPSLPSCLCSFLLLLLLQVSSSYAGQFRVIGPRHPIRALVGDEVELPCRISPGKNATGMEVGWYRPPFSRVVHLYRNGKDQDGDQAPEYRGRTELLKDAIGEGKVTLRIRNVRFSDEGGFTCFFRDHSYQEEAAMELKVEDPFYWVSPGVLVLLAVLPVLLLQITVGLIFLCLQYRLRGKLRAEIENLHRTFVFHLEALSG

SEQ ID NO: 53890 - protein, 295 aa, Homo sapiens
  Payload ID: 10666
  Gene Symbol: MOG
  Gene Name: myelin oligodendrocyte glycoprotein
  Uniprot ID: Q16653
  ENSP ID: ENSP00000366091
MASLSRPSLPSCLCSFLLLLLLQVSSSYAGQFRVIGPRHPIRALVGDEVELPCRISPGKNATGMEVGWYRPPFSRVVHLYRNGKDQDGDQAPEYRGRTELLKDAIGEGKVTLRIRNVRFSDEGGFTCFFRDHSYQEEAAMELKVEDPFYWVSPGVLVLLAVLPVLLLQITVGLIFLCLQYRLRGKLRAEIENLHRTFDPHFLRVPCWKITLFVIVPVLGPLVALIICYNWLHRRLAGQFLEELRKFSSLCYKQRIKSQERETEATRGRGGLLRDHIPRGKEELESLGGGKTPPGR

SEQ ID NO: 53891 - protein, 252 aa, Homo sapiens
  Payload ID: 10666
  Gene Symbol: MOG
  Gene Name: myelin oligodendrocyte glycoprotein
  Uniprot ID: Q16653
  ENSP ID: ENSP00000366095
MASLSRPSLPSCLCSFLLLLLLQVSSSYAGQFRVIGPRHPIRALVGDEVELPCRISPGKNATGMEVGWYRPPFSRVVHLYRNGKDQDGDQAPEYRGRTELLKDAIGEGKVTLRIRNVRFSDEGGFTCFFRDHSYQEEAAMELKVEDPFYWVSPGVLVLLAVLPVLLLQITVGLIFLCLQYRLRGKLRAEIENLHRTFDPHFLRVPCWKITLFVIVPVLGPLVALIICYNWLHRRLAGQFLEELLFHLEALSG

SEQ ID NO: 53892 - protein, 45 aa, Homo sapiens
  Payload ID: 10666
  Gene Symbol: MOG
  Gene Name: myelin oligodendrocyte glycoprotein
  ENSP ID: ENSP00000366101
MASLSRPSLPSCLCSFLLLLLLQVSSSYAVQSDRTKTPYPGSGRG

SEQ ID NO: 53893 - protein, 247 aa, Homo sapiens
  Payload ID: 10666
  Gene Symbol: MOG
  Gene Name: myelin oligodendrocyte glycoprotein
  Uniprot ID: Q16653
  ENSP ID: ENSP00000366115
MASLSRPSLPSCLCSFLLLLLLQVSSSYAGQFRVIGPRHPIRALVGDEVELPCRISPGKNATGMEVGWYRPPFSRVVHLYRNGKDQDGDQAPEYRGRTELLKDAIGEGKVTLRIRNVRFSDEGGFTCFFRDHSYQEEAAMELKVEDPFYWVSPGVLVLLAVLPVLLLQITVGLIFLCLQYRLRGKLRAEIENLHRTFDPHFLRVPCWKITLFVIVPVLGPLVALIICYNWLHRRLAGQFLEELRNPF

SEQ ID NO: 53894 - protein, 131 aa, Homo sapiens [sequence omitted]

SEQ ID NO: 53895 - protein, 247 aa, Homo sapiens
  Payload ID: 10666
  Gene Symbol: MOG
  Gene Name: myelin oligodendrocyte glycoprotein
  Uniprot ID: Q16653
  ENSP ID: ENSP00000373017
MASLSRPSLPSCLCSFLLLLLLQVSSSYAGQFRVIGPRHPIRALVGDEVELPCRISPGKNATGMEVGWYRPPFSRVVHLYRNGKDQDGDQAPEYRGRTELLKDAIGEGKVTLRIRNVRFSDEGGFTCFFRDHSYQEEAAMELKVEDPFYWVSPGVLVLLAVLPVLLLQITVGLVFLCLQYRLRGKLRAEIENLHRTFDPHFLRVPCWKITLFVIVPVLGPLVALIICYNWLHRRLAGQFLEELRNPF

SEQ ID NO: 53896 - protein, 247 aa, Homo sapiens; identical to SEQ ID NO: 53895
  Payload ID: 10666
  Gene Symbol: MOG
  Gene Name: myelin oligodendrocyte glycoprotein
  Uniprot ID: Q16653
  ENSP ID: ENSP00000373126

SEQ ID NO: 53897 - protein, 229 aa, Homo sapiens [sequence omitted]

SEQ ID NO: 53898 - protein, 213 aa, Homo sapiens
  Payload ID: 10666
  Gene Symbol: MOG
  Gene Name: myelin oligodendrocyte glycoprotein
  Uniprot ID: Q16653
  ENSP ID: ENSP00000379929
MASLSRPSLPSCLCSFLLLLLLQVSSSYAGQFRVIGPRHPIRALVGDEVELPCRISPGKNATGMEVGWYRPPFSRVVHLYRNGKDQDGDQAPEYRGRTELLKDAIGEGKVTLRIRNVRFSDEGGFTCFFRDHSYQEEAAMELKVEDPFYWVSPGVLVLLAVLPVLLLQITVGLIFLCLQYRLRGKLRAEIENLHRTFGQFLEELLFHLEALSG

SEQ ID NO: 53899 - protein, 224 aa, Homo sapiens
  Payload ID: 10666
  Gene Symbol: MOG
  Gene Name: myelin oligodendrocyte glycoprotein
  Uniprot ID: Q16653
  ENSP ID: ENSP00000379932
MASLSRPSLPSCLCSFLLLLLLQVSSSYAGQFRVIGPRHPIRALVGDEVELPCRISPGKNATGMEVGWYRPPFSRVVHLYRNGKDQDGDQAPEYRGRTELLKDAIGEGKVTLRIRNVRFSDEGGFTCFFRDHSYQEEAAMELKVEDPFYWVSPGVLVLLAVLPVLLLQITVGLIFLCLQYRLRGKLRAEIENLHRTFESFGVLGPQVKEPKKTGQFLEELRNPF

SEQ ID NO: 53900 - protein, 224 aa, Homo sapiens
  Payload ID: 10666
  Gene Symbol: MOG
  Gene Name: myelin oligodendrocyte glycoprotein
  ENSP ID: ENSP00000383509
MASLSRPSLPSCLCSFLLLLLLQVSSSYAGQFRVIGPRHPIRALVGDEVELPCRISPGKNATGMEVGWYRPPFSRVVHLYRNGKDQDGDQAPEYRGRTELLKDAIGEGKVTLRIRNVRFSDEGGFTCFFRDHSYQEEAAMELKVEDPFYWVSPGVLVLLAVLPVLLLQITLGLVFLCLQYRLRGKLRAEIENLHRTFESFGVLGPQVKEPKKTGQFLEELRNPF

SEQ ID NO: 53901 - protein, 229 aa, Homo sapiens [sequence omitted]

SEQ ID NO: 53902 - protein, 213 aa, Homo sapiens; identical to SEQ ID NO: 53886
  Payload ID: 10666
  Gene Symbol: MOG
  Gene Name: myelin oligodendrocyte glycoprotein
  Uniprot ID: Q16653
  ENSP ID: ENSP00000383512

SEQ ID NO: 53903 - protein, 179 aa, Homo sapiens
  Payload ID: 10666
  Gene Symbol: MOG
  Gene Name: myelin oligodendrocyte glycoprotein
  ENSP ID: ENSP00000383525
  MOD_RES (1)..(1): Any amino acid
XQFRVIGPRHPIRALVGDEVELPCRISPGKNATGMEVGWYRPPFSRVVHLYRNGKDQDGDQAPEYRGRTELLKDAIGEGKVTLRIRNVRFSDEGGFTCFFRDHSYQEEAAMELKVEDPFYWVSPGVLVLLAVLPVLLLQITVGLVFLCLQYRLRGKLRAEIENLHRTFGQFLEELRNPF

SEQ ID NO: 53904 - protein, 131 aa, Homo sapiens [sequence omitted]

SEQ ID NO: 53905 - protein, 204 aa, Homo sapiens
  Payload ID: 10666
  Gene Symbol: MOG
  Gene Name: myelin oligodendrocyte glycoprotein
  Uniprot ID: Q16653
  ENSP ID: ENSP00000383528
SLSRPSLPSCLCSFLLLLLLQVSSSYAGQFRVIGPRHPIRALVGDEVELPCRISPGKNATGMEVGWYRPPFSRVVHLYRNGKDQDGDQAPEYRGRTELLKDAIGEGKVTLRIRNVRFSDEGGFTCFFRDHSYQEEAAMELKVEDPFYWVSPGVLVLLAVLPVLLLQITVGLVFLCLQYRLRGKLRAEIENLHRTFVFHLEALSG

SEQ ID NO: 53906 - protein, 131 aa, Homo sapiens
  Payload ID: 10666
  Gene Symbol: MOG
  Gene Name: myelin oligodendrocyte glycoprotein
  ENSP ID: ENSP00000387448
MASLSRPSLPSCLCSFLLLLLLQVSSSYADPFYWVSPGVLVLLAVLPVLLLQITLGLVFLCLQYRLRGKLRAEIENLHRTFDPHFLRVPCWKITLFVIVPVLGPLVALIICYNWLHRRLAGQFLEELRNPF

SEQ ID NO: 53907 - protein, 247 aa, Homo sapiens
  Payload ID: 10666
  Gene Symbol: MOG
  Gene Name: myelin oligodendrocyte glycoprotein
  Uniprot ID: Q16653
  ENSP ID: ENSP00000389022
MASLSRPSLPSCLCSFLLLLLLQVSSSYAGQFRVIGPRHPIRALVGDEVELPCRISPGKNATGMEVGWYRPPFSRVVHLYRNGKDQDGDQAPEYRGRTELLKDAIGEGKVTLRIRNVRFSDEGGFTCFFRDHSYQEEAAMELKVEDPFYWVSPGVLVLLAVLPVLLLQITLGLVFLCLQYRLRGKLRAEIENLHRTFDPHFLRVPCWKITLFVIVPVLGPLVALIICYNWLHRRLAGQFLEELRNPF

SEQ ID NO: 53908 - protein, 247 aa, Homo sapiens; identical to SEQ ID NO: 53895
  Payload ID: 10666
  Gene Symbol: MOG
  Gene Name: myelin oligodendrocyte glycoprotein
  Uniprot ID: Q16653
  ENSP ID: ENSP00000389221

SEQ ID NO: 53909 - protein, 224 aa, Homo sapiens [sequence omitted]

SEQ ID NO: 53910 - protein, 295 aa, Homo sapiens [sequence omitted]

SEQ ID NO: 53911 - protein, 213 aa, Homo sapiens; identical to SEQ ID NO: 53886
  Payload ID: 10666
  Gene Symbol: MOG
  Gene Name: myelin oligodendrocyte glycoprotein
  Uniprot ID: Q16653
  ENSP ID: ENSP00000390682

SEQ ID NO: 53912 - protein, 295 aa, Homo sapiens
  Payload ID: 10666
  Gene Symbol: MOG
  Gene Name: myelin oligodendrocyte glycoprotein
  ENSP ID: ENSP00000390785
MASLSRPSLPSCLCSFLLLLLLQVSSSYAGQFRVIGPRHPIRALVGDEVELPCRISPGKNATGMEVGWYRPPFSRVVHLYRNGKDQDGDQAPEYRGRTELLKDAIGEGKVTLRIRNVRFSDEGGFTCFFRDHSYQEEAAMELKVEDPFYWVSPGVLVLLAVLPVLLLQITLGLVFLCLQYRLRGKLRAEIENLHRTFDPHFLRVPCWKITLFVIVPVLGPLVALIICYNWLHRRLAGQFLEELRKFSSLCYKQRIKSQERETEATRGRGGLLRDHIPRGKEELESLGGGKTPPGR

SEQ ID NO: 53913 - protein, 213 aa, Homo sapiens; identical to SEQ ID NO: 53886
  Payload ID: 10666
  Gene Symbol: MOG
  Gene Name: myelin oligodendrocyte glycoprotein
  Uniprot ID: Q16653
  ENSP ID: ENSP00000391516

SEQ ID NO: 53914 - protein, 295 aa, Homo sapiens [sequence omitted]

SEQ ID NO: 53915 - protein, 179 aa, Homo sapiens; identical to SEQ ID NO: 53903
  Payload ID: 10666
  Gene Symbol: MOG
  Gene Name: myelin oligodendrocyte glycoprotein
  ENSP ID: ENSP00000392661
  MOD_RES (1)..(1): Any amino acid

SEQ ID NO: 53916 - protein, 252 aa, Homo sapiens
  Payload ID: 10666
  Gene Symbol: MOG
  Gene Name: myelin oligodendrocyte glycoprotein
  ENSP ID: ENSP00000394156
MASLSRPSLPSCLCSFLLLLLLQVSSSYAGQFRVIGPRHPIRALVGDEVELPCRISPGKNATGMEVGWYRPPFSRVVHLYRNGKDQDGDQAPEYRGRTELLKDAIGEGKVTLRIRNVRFSDEGGFTCFFRDHSYQEEAAMELKVEDPFYWVSPGVLVLLAVLPVLLLQITVGLVFLCLQYRLRGKLRAEIENLHRTFDPHFLRVPCWKITLFVIVPVLGPLVALIICYNWLHRRLAGQFLEELLFHLEALSG

SEQ ID NO: 53917 - protein, 131 aa, Homo sapiens [sequence omitted]

SEQ ID NO: 53918 - protein, 295 aa, Homo sapiens [sequence omitted]

SEQ ID NO: 53919 - protein, 204 aa, Homo sapiens
  Payload ID: 10666
  Gene Symbol: MOG
  Gene Name: myelin oligodendrocyte glycoprotein
  ENSP ID: ENSP00000395146
SLSRPSLPSCLCSFLLLLLLQVSSSYAGQFRVIGPRHPIRALVGDEVELPCRISPGKNATGMEVGWYRPPFSRVVHLYRNGKDQDGDQAPEYRGRTELLKDAIGEGKVTLRIRNVRFSDEGGFTCFFRDHSYQEEAAMELKVEDPFYWVSPGVLVLLAVLPVLLLQITLGLVFLCLQYRLRGKLRAEIENLHRTFVFHLEALSG

SEQ ID NO: 53920 - protein, 252 aa, Homo sapiens; identical to SEQ ID NO: 53916
  Payload ID: 10666
  Gene Symbol: MOG
  Gene Name: myelin oligodendrocyte glycoprotein
  ENSP ID: ENSP00000395304

SEQ ID NO: 53921 - protein, 252 aa, Homo sapiens; identical to SEQ ID NO: 53916
  Payload ID: 10666
  Gene Symbol: MOG
  Gene Name: myelin oligodendrocyte glycoprotein
  ENSP ID: ENSP00000396344

SEQ ID NO: 53922 - protein, 295 aa, Homo sapiens [sequence omitted]

SEQ ID NO: 53923 - protein, 204 aa, Homo sapiens; identical to SEQ ID NO: 53905
  Payload ID: 10666
  Gene Symbol: MOG
  Gene Name: myelin oligodendrocyte glycoprotein
  Uniprot ID: Q16653
  ENSP ID: ENSP00000397723

SEQ ID NO: 53924 - protein, 204 aa, Homo sapiens; identical to SEQ ID NO: 53905
  Payload ID: 10666
  Gene Symbol: MOG
  Gene Name: myelin oligodendrocyte glycoprotein
  Uniprot ID: Q16653
  ENSP ID: ENSP00000397837

SEQ ID NO: 53925 - protein, 213 aa, Homo sapiens; identical to SEQ ID NO: 53886
  Payload ID: 10666
  Gene Symbol: MOG
  Gene Name: myelin oligodendrocyte glycoprotein
  Uniprot ID: Q16653
  ENSP ID: ENSP00000398197

SEQ ID NO: 53926 - protein, 295 aa, Homo sapiens [sequence omitted]

SEQ ID NO: 53927 - protein, 204 aa, Homo sapiens; identical to SEQ ID NO: 53905
  Payload ID: 10666
  Gene Symbol: MOG
  Gene Name: myelin oligodendrocyte glycoprotein
  Uniprot ID: Q16653
  ENSP ID: ENSP00000399240

SEQ ID NO: 53928 - protein, 252 aa, Homo sapiens; identical to SEQ ID NO: 53916
  Payload ID: 10666
  Gene Symbol: MOG
  Gene Name: myelin oligodendrocyte glycoprotein
  ENSP ID: ENSP00000400564

SEQ ID NO: 53929 - protein, 252 aa, Homo sapiens
  Payload ID: 10666
  Gene Symbol: MOG
  Gene Name: myelin oligodendrocyte glycoprotein
  ENSP ID: ENSP00000400681
MASLSRPSLPSCLCSFLLLLLLQVSSSYAGQFRVIGPRHPIRALVGDEVELPCRISPGKNATGMEVGWYRPPFSRVVHLYRNGKDQDGDQAPEYRGRTELLKDAIGEGKVTLRIRNVRFSDEGGFTCFFRDHSYQEEAAMELKVEDPFYWVSPGVLVLLAVLPVLLLQITLGLVFLCLQYRLRGKLRAEIENLHRTFDPHFLRVPCWKITLFVIVPVLGPLVALIICYNWLHRRLAGQFLEELLFHLEALSG

SEQ ID NO: 53930 - protein, 179 aa, Homo sapiens; identical to SEQ ID NO: 53903
  Payload ID: 10666
  Gene Symbol: MOG
  Gene Name: myelin oligodendrocyte glycoprotein
  ENSP ID: ENSP00000401457
  MOD_RES (1)..(1): Any amino acid

SEQ ID NO: 53931 - protein, 247 aa, Homo sapiens; identical to SEQ ID NO: 53895
  Payload ID: 10666
  Gene Symbol: MOG
  Gene Name: myelin oligodendrocyte glycoprotein
  Uniprot ID: Q16653
  ENSP ID: ENSP00000401609

SEQ ID NO: 53932 - protein, 229 aa, Homo sapiens [sequence omitted]

SEQ ID NO: 53933 - protein, 213 aa, Homo sapiens
  Payload ID: 10666
  Gene Symbol: MOG
  Gene Name: myelin oligodendrocyte glycoprotein
  ENSP ID: ENSP00000402247
MASLSRPSLPSCLCSFLLLLLLQVSSSYAGQFRVIGPRHPIRALVGDEVELPCRISPGKNATGMEVGWYRPPFSRVVHLYRNGKDQDGDQAPEYRGRTELLKDAIGEGKVTLRIRNVRFSDEGGFTCFFRDHSYQEEAAMELKVEDPFYWVSPGVLVLLAVLPVLLLQITLGLVFLCLQYRLRGKLRAEIENLHRTFGQFLEELLFHLEALSG

SEQ ID NO: 53934 - protein, 252 aa, Homo sapiens; identical to SEQ ID NO: 53916
  Payload ID: 10666
  Gene Symbol: MOG
  Gene Name: myelin oligodendrocyte glycoprotein
  ENSP ID: ENSP00000402363

SEQ ID NO: 53935 - protein, 229 aa, Homo sapiens [sequence omitted]

SEQ ID NO: 53936 - protein, 179 aa, Homo sapiens; identical to SEQ ID NO: 53903
  Payload ID: 10666
  Gene Symbol: MOG
  Gene Name: myelin oligodendrocyte glycoprotein
  ENSP ID: ENSP00000403235
  MOD_RES (1)..(1): Any amino acid

SEQ ID NO: 53937 - protein, 224 aa, Homo sapiens [sequence omitted]

SEQ ID NO: 53938 - protein, 224 aa, Homo sapiens [sequence omitted]

SEQ ID NO: 53939 - protein, 224 aa, Homo sapiens [sequence omitted]

SEQ ID NO: 53940 - protein, 252 aa, Homo sapiens; identical to SEQ ID NO: 53916
  Payload ID: 10666
  Gene Symbol: MOG
  Gene Name: myelin oligodendrocyte glycoprotein
  ENSP ID: ENSP00000404362

SEQ ID NO: 53941 - protein, 247 aa, Homo sapiens; identical to SEQ ID NO: 53895
  Payload ID: 10666
  Gene Symbol: MOG
  Gene Name: myelin oligodendrocyte glycoprotein
  Uniprot ID: Q16653
  ENSP ID: ENSP00000404537

SEQ ID NO: 53942 - protein, 229 aa, Homo sapiens [sequence omitted]

SEQ ID NO: 53943 - protein, 179 aa, Homo sapiens
  Payload ID: 10666
  Gene Symbol: MOG
  Gene Name: myelin oligodendrocyte glycoprotein
  ENSP ID: ENSP00000406627
  MOD_RES (1)..(1): Any amino acid
XQFRVIGPRHPIRALVGDEVELPCRISPGKNATGMEVGWYRPPFSRVVHLYRNGKDQDGDQAPEYRGRTELLKDAIGEGKVTLRIRNVRFSDEGGFTCFFRDHSYQEEAAMELKVEDPFYWVSPGVLVLLAVLPVLLLQITLGLVFLCLQYRLRGKLRAEIENLHRTFGQFLEELRNPF

SEQ ID NO: 53944 - protein, 179 aa, Homo sapiens; identical to SEQ ID NO: 53903
  Payload ID: 10666
  Gene Symbol: MOG
  Gene Name: myelin oligodendrocyte glycoprotein
  ENSP ID: ENSP00000407143
  MOD_RES (1)..(1): Any amino acid

SEQ ID NO: 53945 - protein, 179 aa, Homo sapiens; identical to SEQ ID NO: 53903
  Payload ID: 10666
  Gene Symbol: MOG
  Gene Name: myelin oligodendrocyte glycoprotein
  ENSP ID: ENSP00000408039
  MOD_RES (1)..(1): Any amino acid

SEQ ID NO: 53946 - protein, 209 aa, Homo sapiens
  Payload ID: 10666
  Gene Symbol: MOG
  Gene Name: myelin oligodendrocyte glycoprotein
  ENSP ID: ENSP00000409394
MASLSRPSLPSCLCSFLLLLLLQVSSSYAGQFRVIGPRHPIRALVGDEVELPCRISPGKNATGMEVGWYRPPFSRVVHLYRNGKDQDGDQAPEYRGRTELLKDAIGEGKVTLRIRNVRFSDEGGFTCFFRDHSYQEEAAMELKVEGKLRAEIENLHRTFDPHFLRVPCWKITLFVIVPVLGPLVALIICYNWLHRRLAGQFLEELRNPF

SEQ ID NO: 53947 - protein, 213 aa, Homo sapiens; identical to SEQ ID NO: 53886
  Payload ID: 10666
  Gene Symbol: MOG
  Gene Name: myelin oligodendrocyte glycoprotein
  Uniprot ID: Q16653
  ENSP ID: ENSP00000409534

SEQ ID NO: 53948 - protein, 131 aa, Homo sapiens [sequence omitted]

SEQ ID NO: 53949 - protein, 131 aa, Homo sapiens [sequence omitted]

SEQ ID NO: 53950 - protein, 208 aa, Homo sapiens
  Payload ID: 10666
  Gene Symbol: MOG
  Gene Name: myelin oligodendrocyte glycoprotein
  Uniprot ID: Q16653
  ENSP ID: ENSP00000410866
MASLSRPSLPSCLCSFLLLLLLQVSSSYAGQFRVIGPRHPIRALVGDEVELPCRISPGKNATGMEVGWYRPPFSRVVHLYRNGKDQDGDQAPEYRGRTELLKDAIGEGKVTLRIRNVRFSDEGGFTCFFRDHSYQEEAAMELKVEDPFYWVSPGVLVLLAVLPVLLLQITVGLIFLCLQYRLRGKLRAEIENLHRTFGQFLEELRNPF

SEQ ID NO: 53951 - protein, 229 aa, Homo sapiens [sequence omitted]

SEQ ID NO: 53952 - protein, 131 aa, Homo sapiens [sequence omitted]

SEQ ID NO: 53953 - protein, 204 aa, Homo sapiens; identical to SEQ ID NO: 53905
  Payload ID: 10666
  Gene Symbol: MOG
  Gene Name: myelin oligodendrocyte glycoprotein
  Uniprot ID: Q16653
  ENSP ID: ENSP00000413370

SEQ ID NO: 53954 - protein, 224 aa, Homo sapiens [sequence omitted]

SEQ ID NO: 53955 - protein, 247 aa, Homo sapiens; identical to SEQ ID NO: 53895
  Payload ID: 10666
  Gene Symbol: MOG
  Gene Name: myelin oligodendrocyte glycoprotein
  Uniprot ID: Q16653
  ENSP ID: ENSP00000414489

SEQ ID NO: 53956 - protein, 224 aa, Homo sapiens [sequence omitted]

SEQ ID NO: 53957 - protein, 204 aa, Homo sapiens; identical to SEQ ID NO: 53905
  Payload ID: 10666
  Gene Symbol: MOG
  Gene Name: myelin oligodendrocyte glycoprotein
  Uniprot ID: Q16653
  ENSP ID: ENSP00000415883

SEQ ID NO: 53958 - protein, 229 aa, Homo sapiens
  Payload ID: 10666
  Gene Symbol: MOG
  Gene Name: myelin oligodendrocyte glycoprotein
  Uniprot ID: Q16653
  ENSP ID: ENSP00000417405
MASLSRPSLPSCLCSFLLLLLLQVSSSYAGQFRVIGPRHPIRALVGDEVELPCRISPGKNATGMEVGWYRPPFSRVVHLYRNGKDQDGDQAPEYRGRTELLKDAIGEGKVTLRIRNVRFSDEGGFTCFFRDHSYQEEAAMELKVEDPFYWVSPGVLVLLAVLPVLLLQITVGLIFLCLQYRLRGKLRAEIENLHRTFESFGVLGPQVKEPKKTGQFLEELLFHLEALSG

SEQ ID NO: 53959 - protein, 92 aa, Homo sapiens
  Payload ID: 10666
  Gene Symbol: MOG
  Gene Name: myelin oligodendrocyte glycoprotein
  ENSP ID: ENSP00000418090
MASLSRPSLPSCLCSFLLLLLLQVSSSYADPFYWVSPGVLVLLAVLPVLLLQITVGLIFLCLQYRLRGKLRAEIENLHRTFGQFLEELRNPF

SEQ ID NO: 53960 - protein, 142 aa, Homo sapiens; identical to SEQ ID NO: 53888
  Payload ID: 10666
  Gene Symbol: MOG
  Gene Name: myelin oligodendrocyte glycoprotein
  ENSP ID: ENSP00000418872
  MOD_RES (1)..(1): Any amino acid

SEQ ID NO: 53961 - protein, 229 aa, Homo sapiens
  Payload ID: 10666
  Gene Symbol: MOG
  Gene Name: myelin oligodendrocyte glycoprotein
  ENSP ID: ENSP00000420250
MASLSRPSLPSCLCSFLLLLLLQVSSSYAGQFRVIGPRHPIRALVGDEVELPCRISPGKNATGMEVGWYRPPFSRVVHLYRNGKDQDGDQAPEYRGRTELLKDAIGEGKVTLRIRNVRFSDEGGFTCFFRDHSYQEEAAMELKVEDPFYWVSPGVLVLLAVLPVLLLQITLGLVFLCLQYRLRGKLRAEIENLHRTFESFGVLGPQVKEPKKTGQFLEELLFHLEALSG

SEQ ID NO: 53962 - protein, 108 aa, Homo sapiens
  Payload ID: 10666
  Gene Symbol: MOG
  Gene Name: myelin oligodendrocyte glycoprotein
  Uniprot ID: Q16653
  ENSP ID: ENSP00000420350
MASLSRPSLPSCLCSFLLLLLLQVSSSYADPFYWVSPGVLVLLAVLPVLLLQITVGLIFLCLQYRLRGKLRAEIENLHRTFESFGVLGPQVKEPKKTGQFLEELRNPF

SEQ ID NO: 53963 - protein, 208 aa, Homo sapiens [sequence omitted]

SEQ ID NO: 53964 - protein, 208 aa, Homo sapiens [sequence omitted]

SEQ ID NO: 53965 - protein, 208 aa, Homo sapiens [sequence omitted]

SEQ ID NO: 53966 - protein, 208 aa, Homo sapiens [sequence omitted]

SEQ ID NO: 53967 - protein, 208 aa, Homo sapiens [sequence omitted]

SEQ ID NO: 53968 - protein, 208 aa, Homo sapiens [sequence omitted]

SEQ ID NO: 53969 - protein, 52 aa, Homo sapiens
  Payload ID: 10667
  Gene Symbol: MPZ
  Gene Name: myelin protein zero
  ENSP ID: ENSP00000431441
MEKGKLHKPGKDASKRGRQTPVLYAMLDHSRSTKAVSEKKAKGLGESRKDKK

SEQ ID NO: 53970 - protein, 248 aa, Homo sapiens
  Payload ID: 10667
  Gene Symbol: MPZ
  Gene Name: myelin protein zero
  Uniprot ID: P25189
  ENSP ID: ENSP00000431538
MAPGAPSSSPSPILAVLLFSSLVLSPAQAIVVYTDREVHGAVGSRVTLHCSFWSSEWVSDDISFTWRYQPEGGRDAISIFHYAKGQPYIDEVGTFKERIQWVGDPRWKDGSIVIHNLDYSDNGTFTCDVKNPPDIVGKTSQVTLYVFEKVPTRYGVVLGAVIGGVLGVVLLLLLLFYVVRYCWLRRQAALQRRLSAMEKGKLHKPGKDASKRGRQTPVLYAMLDHSRSTKAVSEKKAKGLGESRKDKK

SEQ ID NO: 53971 - protein, 248 aa, Homo sapiens; identical to SEQ ID NO: 53970
  Payload ID: 10667
  Gene Symbol: MPZ
  Gene Name: myelin protein zero
  Uniprot ID: P25189
  ENSP ID: ENSP00000432943

SEQ ID NO: 53972 - protein, 136 aa, Homo sapiens
  Payload ID: 10667
  Gene Symbol: MPZ
  Gene Name: myelin protein zero
  ENSP ID: ENSP00000488104
  MOD_RES (1)..(1): Any amino acid
XPYIDEVGTFKERIQWVGDPRWKDGSIVIHNLDYSDNVPTRYGVVLGAVIGGVLGVVLLLLLLFYVVRYCWLRRQAALQRRLSAMEKGKLHKPGKDASKRGRQTPVLYAMLDHSRSTKAVSEKKAKGLGESRKDKK

SEQ ID NO: 53973 - protein, 269 aa, Homo sapiens
  Payload ID: 10668
  Gene Symbol: MPZL1
  Gene Name: myelin protein zero-like 1
  Uniprot ID: O95297
  ENSP ID: ENSP00000352513
MAASAGAGAVIAAPDSRRWLWSVLAAALGLLTAGVSALEVYTPKEIFVANGTQGKLTCKFKSTSTTGGLTSVSWSFQPEGADTTVSFFHYSQGQVYLGNYPPFKDRISWAGDLDKKDASINIENMQFIHNGTYICDVKNPPDIVVQPGHIRLYVVEKENLPVFPVWVVVGIVTAVVLGLTLLISMILAVLYRRKNSKRDYTGCSTSESLSPVKQAPRKSPSDTEGLVKSLPSGSHQGPVIYAQLDHSGGHHSDKINKSESVVYADIRKN

SEQ ID NO: 53974 - protein, 183 aa, Homo sapiens
  Payload ID: 10668
  Gene Symbol: MPZL1
  Gene Name: myelin protein zero-like 1
  ENSP ID: ENSP00000356827
PFSSVTAGVSALEVYTPKEIFVANGTQGKLTCKFKSTSTTGGLTSVSWSFQPEGADTTVSFFHYSQGQVYLGNYPPFKDRISWAGDLDKKDASINIENMQFIHNGTYICDVKNPPDIVVQPGHIRLYVVEKENLPVFPVWVVVGIVTAVVLGLTLLISMILAVLYRRKNSKRDYTGAQSYMHS

SEQ ID NO: 53975 - protein, 119 aa, Homo sapiens
  Payload ID: 10668
  Gene Symbol: MPZL1
  Gene Name: myelin protein zero-like 1
  Uniprot ID: O95297
  ENSP ID: ENSP00000375968
MAASAGAGAVIAAPDSRRWLWSVLAAALGLLTAGVSALEVYTPKEIFVANGTQGKLTCKFKSTSTTGGLTSVSWSFQPEGADTTVSGPVIYAQLDHSGGHHSDKINKSESVVYADIRKN

SEQ ID NO: 53976 - protein, 95 aa, Homo sapiens
  Payload ID: 10668
  Gene Symbol: MPZL1
  Gene Name: myelin protein zero-like 1
  ENSP ID: ENSP00000399490
MAASAGAGAVIAAPDSRRWLWSVLAAALGLLTAGVSALEVYTPKEIFVANGTQGKLTCKFKSTSTTGGLTSVSWSFQPEGADTTVSRICLCFQFG

SEQ ID NO: 53977 - protein, 209 aa, Homo sapiens
  Payload ID: 10668
  Gene Symbol: MPZL1
  Gene Name: myelin protein zero-like 1
  Uniprot ID: O95297
  ENSP ID: ENSP00000420455
MAASAGAGAVIAAPDSRRWLWSVLAAALGLLTAGVSALEVYTPKEIFVANGTQGKLTCKFKSTSTTGGLTSVSWSFQPEGADTTVSFFHYSQGQVYLGNYPPFKDRISWAGDLDKKDASINIENMQFIHNGTYICDVKNPPDIVVQPGHIRLYVVEKENLPVFPVWVVVGIVTAVVLGLTLLISMILAVLYRRKNSKRDYTGAQSYMHS

SEQ ID NO: 53978 - protein, 215 aa, Homo sapiens
  Payload ID: 10669
  Gene Symbol: MPZL2
  Gene Name: myelin protein zero-like 2
  Uniprot ID: O60487
  ENSP ID: ENSP00000278937
MYGKSSTRAVLLLLGIQLTALWPIAAVEIYTSRVLEAVNGTDARLKCTFSSFAPVGDALTVTWNFRPLDGGPEQFVFYYHIDPFQPMSGRFKDRVSWDGNPERYDASILLWKLQFDDNGTYTCQVKNPPDVDGVIGEIRLSVVHTVRFSEIHFLALAIGSACALMIIIVIVVVLFQHYRKKRWAERAHKVVEIKSKEEERLNQEKKVSVYLEDTD

SEQ ID NO: 53979 - protein, 215 aa, Homo sapiens; identical to SEQ ID NO: 53978
  Payload ID: 10669
  Gene Symbol: MPZL2
  Gene Name: myelin protein zero-like 2
  Uniprot ID: O60487
  ENSP ID: ENSP00000408362

SEQ ID NO: 53980 - protein, 235 aa, Homo sapiens
  Payload ID: 10670
  Gene Symbol: MPZL3
  Gene Name: myelin protein zero-like 3
  Uniprot ID: Q6UWV2
  ENSP ID: ENSP00000278949
MQQRGAAGSRGCALFPLLGVLFFQGVYIVFSLEIRADAHVRGYVGEKIKLKCTFKSTSDVTDKLTIDWTYRPPSSSHTVSIFHYQSFQYPTTAGTFRDRISWVGNVYKGDASISISNPTIKDNGTFSCAVKNPPDVHHNIPMTELTVTERGFGTMLSSVALLSILVFVPSAVVVALLLVRMGRKAAGLKKRSRSGYKKSSIEVSDDTDQEEEEACMARLCVRCAECLDSDYEETY

SEQ ID NO: 53981 - protein, 108 aa, Homo sapiens
  Payload ID: 10670
  Gene Symbol: MPZL3
  Gene Name: myelin protein zero-like 3
  Uniprot ID: Q6UWV2
  ENSP ID: ENSP00000393594
MQQRGAAGSRGCALFPLLGVLFFQGVYIVFSLEIRADAHVRGYVGEKIKLKCTFKSTSDVTDKLTIDWTYRPPSSSHTVSVLAPCFPLWPFFPSLSLCPQPWWLLCCW

SEQ ID NO: 53982 - protein, 223 aa, Homo sapiens
  Payload ID: 10670
  Gene Symbol: MPZL3
  Gene Name: myelin protein zero-like 3
  Uniprot ID: Q6UWV2
  ENSP ID: ENSP00000432106
MQQRGAAGSRGCALFPLLGVLFFQDAHVRGYVGEKIKLKCTFKSTSDVTDKLTIDWTYRPPSSSHTVSIFHYQSFQYPTTAGTFRDRISWVGNVYKGDASISISNPTIKDNGTFSCAVKNPPDVHHNIPMTELTVTERGFGTMLSSVALLSILVFVPSAVVVALLLVRMGRKAAGLKKRSRSGYKKSSIEVSDDTDQEEEEACMARLCVRCAECLDSDYEETY

SEQ ID NO: 53983 - protein, 65 aa, Homo sapiens
  Payload ID: 10670
  Gene Symbol: MPZL3
  Gene Name: myelin protein zero-like 3
  ENSP ID: ENSP00000434636
MQQRGAAGSRGCALFPLLGVLFFQALIRRRKRRVWRGFVSVALSAWIQTMKRHIDESLYDTRRVT

SEQ ID NO: 53984 - protein, 1111 aa, Homo sapiens
  Payload ID: 10671
  Gene Symbol: MYRF
  Gene Name: myelin regulatory factor
  Uniprot ID: Q9Y2G1
  ENSP ID: ENSP00000265460
MHWLPAGHDINGALEPSNIDTSILEEYISKEDASDLCFPDISAPASSASYSHGQPAMPGSSGVHHLSPPGGGPSPGRHGPLPPPGYGTPLNCNNNNGMGAAPKPFPGGTGPPIKAEPKAPYAPGTLPDSPPDSGSEAYSPQQVNEPHLLRTITPETLCHVGVPSRLEHPPPPPAHLPGPPPPPPPPPHYPVLQRDLYMKAEPPIPHYAAMGQGLVPTDLHHTQQSQMLHQLLQQHGAELPTHPSKKRKHSESPPSTLNAQMLNGMIKQEPGTVTALPLHPTRAPSPPWPPQGPLSPGPGSLPLSIARVQTPPWHPPGAPSPGLLQDSDSLSGSYLDPNYQSIKWQPHQQNKWATLYDANYKELPMLTYRVDADKGFNFSVGDDAFVCQKKNHFQVTVYIGMLGEPKYVKTPEGLKPLDCFYLKLHGVKLEALNQSINIEQSQSDRSKRPFNPVTVNLPPEQVTKVTVGRLHFSETTANNMRKKGKPNPDQRYFMLVVALQAHAQNQNYTLAAQISERIIVRASNPGQFESDSDVLWQRAQVPDTVFHHGRVGINTDRPDEALVVHGNVKVMGSLMHPSDLRAKEHVQEVDTTEQLKRISRMRLVHYRYKPEFAASAGIEATAPETGVIAQEVKEILPEAVKDTGDMVFANGKTIENFLVVNKERIFMENVGAVKELCKLTDNLETRIDELERWSHKLAKLRRLDSLKSTGSSGAFSHAGSQFSRAGSVPHKKRPPKVASKSSSVVPDQACISQRFLQGTIIALVVVMAFSVVSMSTLYVLSLRTEEDLVDTDGRSSQSFGTTQLRQSPLTTGLPGIQPSLLLVTTSLTSSAPGSAVRTLDMCSSHPCPVICCSSPTTNPTTGPSLGPSFNPGHVLSPSPSPSTNRSGPSQMALLPVTNIRAKSWGLSVNGIGHSKHHKSLEPLASPAVPFPGGQGKAKNSPSLGFHGRARRGALQSSVGPAEPTWAQGQSEPVPSLTSIQVLENSMSITSQYCAPGDACRPGNFTYHIPVSSGTPLHLSLTLQMNSSSPVSVVLCSLRSKEEPCEEGSLPQSLHTHQDTQGTSHRWPITILSFREFTYHFRVALLGQANCSSEALAQPATDYHFHFYRLCD

SEQ ID NO: 53985 - protein, 1151 aa, Homo sapiens
  Payload ID: 10671
  Gene Symbol: MYRF
  Gene Name: myelin regulatory factor
  Uniprot ID: Q9Y2G1
  ENSP ID: ENSP00000278836
MEVVDETEALQRFFEGHDINGALEPSNIDTSILEEYISKEDASDLCFPDISAPASSASYSHGQPAMPGSSGVHHLSPPGGGPSPGRHGPLPPPGYGTPLNCNNNNGMGAAPKPFPGGTGPPIKAEPKAPYAPGTLPDSPPDSGSEAYSPQQVNEPHLLRTITPETLCHVGVPSRLEHPPPPPAHLPGPPPPPPPPPHYPVLQRDLYMKAEPPIPHYAAMGQGLVPTDLHHTQQSQMLHQLLQQHGAELPTHPSKKRKHSESPPSTLNAQMLNGMIKQEPGTVTALPLHPTRAPSPPWPPQGPLSPGPGSLPLSIARVQTPPWHPPGAPSPGLLQDSDSLSGSYLDPNYQSIKWQPHQQNKWATLYDANYKELPMLTYRVDADKGFNFSVGDDAFVCQKKNHFQVTVYIGMLGEPKYVKTPEGLKPLDCFYLKLHGVKLEALNQSINIEQSQSDRSKRPFNPVTVNLPPEQVTKVTVGRLHFSETTANNMRKKGKPNPDQRYFMLVVALQAHAQNQNYTLAAQISERIIVRASNPGQFESDSDVLWQRAQVPDTVFHHGRVGINTDRPDEALVVHGNVKVMGSLMHPSDLRAKEHVQEVDTTEQLKRISRMRLVHYRYKPEFAASAGIEATAPETGVIAQEVKEILPEAVKDTGDMVFANGKTIENFLVVNKERIFMENVGAVKELCKLTDNLETRIDELERWSHKLAKLRRLDSLKSTGSSGAFSHAGSQFSRAGSVPHKKRPPKVASKSSSVVPDQACISQRFLQGTIIALVVVMAFSVVSMSTLYVLSLRTEEDLVDTDGSFAVSTSCLLALLRPQPPGGSEALCPWSSQSFGTTQLRQSPLTTGLPGIQPSLLLVTTSLTSSAPGSAVRTLDMCSSHPCPVICCSSPTTNPTTGPSLGPSFNPGHVLSPSPSPSTNRSGPSQMALLPVTNIRAKSWGLSVNGIGHSKHHKSLEPLASPAVPFPGGQGKAKNSPSLGFHGRARRGALQSSVGPAEPTWAQGQSASLLAEPVPSLTSIQVLENSMSITSQYCAPGDACRPGNFTYHIPVSSGTPLHLSLTLQMNSSSPVSVVLCSLRSKEEPCEEGSLPQSLHTHQDTQGTSHRWPITILSFREFTYHFRVALLGQANCSSEALAQPATDYHFHFYRLCD

SEQ ID NO: 53986 - protein, 537 aa, Homo sapiens
  Payload ID: 10671
  Gene Symbol: MYRF
  Gene Name: myelin regulatory factor
  ENSP ID: ENSP00000374253
MRLVHYRYKPEFAASAGIEATAPETGVIAQEVKEILPEAVKDTGDMVFANGKTIENFLVVNKERIFMENVGAVKELCKLTDNLETRIDELERWSHKLAKLRRLDSLKSTGSSGAFSHAGSQFSRAGSVPHKKRPPKVASKSSSVVPDQACISQRFLQGTIIALVVVMAFSVVSMSTLYVLSLRTEEDLVDTDGSFAVSTSCLLALLRPQPPGGSEALCPWSSQSFGTTQLRQSPLTTGLPGIQPSLLLVTTSLTSSAPGSAVRTLDMCSSHPCPVICCSSPTTNPTTGPSLGPSFNPGHVLSPSPSPSTNRSGPSQMALLPVTNIRAKSWGLSVNGIGHSKHHKSLEPLASPAVPFPGGQGKAKNSPSLGFHGRARRGALQSSVGPAEPTWAQGQSEPVPSLTSIQVLENSMSITSQYCAPGDACRPGNFTYHIPVSSGTPLHLSLTLQMNSSSPVSVVLCSLRSKEEPCEEGSLPQSLHTHQDTQGTSHRWPITILSFREFTYHFRVALLGQANCSSEALAQPATDYHFHFYRLCD

SEQ ID NO: 53987 - protein, 250 aa, Homo sapiens
  Payload ID: 10672
  Gene Symbol: MYRFL
  Gene Name: myelin regulatory factor-like
  ENSP ID: ENSP00000299350
MVFLALTIVALYILSLKDQDRRVPNLPPSNITSSQEPALLPTASSSAPNTSLVTTPASLQVPEITFCEILPCQETYCCPIRGMKEVSSSPVQRQSEEKEFHQRRWSEDKSKSVLARNALSGPDWESDWIDTTISSIQIMEIQQIIDHQYCIQSLQCGTTEPLIVFQCKFTLGNICFHSKRGTKGLESHREISQEMTQGYQHIWSLPVAPFSDSMFHFRVAAPDLADCSTDPYFAGIFFTDYFFYFYRRCA

SEQ ID NO: 53988 - protein, 250 aa, Homo sapiens
  Payload ID: 10672
  Gene Symbol: MYRFL
  Gene Name: myelin regulatory factor-like
  ENSP ID: ENSP00000440626
MAFCALTIVALYILSLKDQDRRVPNLPPSNITSSQEPALLPTASSSAPNTSLVTTPASLQVPEITFCEILPCQETYCCPIRGMKEVSSSPVQRQSEEKEFHQRRWSEDKSKSVLARNALSGPDWESDWIDTTISSIQIMEIQQIIDHQYCIQSLQCGTTEPLIVFQCKFTLGNICFHSKRGTKGLESHREISQEMTQGYQHIWSLPVAPFSDSMFHFRVAAPDLADCSTDPYFAGIFFTDYFFYFYRRCA

SEQ ID NO: 53989 - protein, 375 aa, Homo sapiens
  Payload ID: 10672
  Gene Symbol: MYRFL
  Gene Name: myelin regulatory factor-like
  ENSP ID: ENSP00000447167
  MOD_RES (1)..(1): Any amino acid
XIFMENVGAVKQLCKLTNNLEERIEELEIWNRKLARLKRLSSWKSSASEASTISKSSRAVSASSPRRAVHKKNNKVYFSGKRQACPNWVFQTLVITLIAVMAFCALTIVALYILSLKDQDRRVPNLPPSNITSSQEPALLPTASSSAPNTSLVTTPASLQVPEITFCEILPCQETYCCPIRGMKEVSSSPVQRQSEEKEFHQRRWSEDKSKSVLARNALSGPDWESDWIDTTISSIQIMEIQQIIDHQYCIQSLQCGSGNYNYNIPVNKHTPTNVKFSLEINTTEPLIVFQCKFTLGNICFHSKRGTKGLESHREISQEMTQGYQHIWSLPVAPFSDSMFHFRVAAPDLADCSTDPYFAGIFFTDYFFYFYRRCA

SEQ ID NO: 53990 - protein, 910 aa, Homo sapiens
  Payload ID: 10672
  Gene Symbol: MYRFL
  Gene Name: myelin regulatory factor-like
  Uniprot ID: Q96LU7
  ENSP ID: ENSP00000448753
MDVVGENEALQQFFEAQGANGTLENPALDTSLLEEFLGNDFDLGALQRQLPDTPPYSASDSCSPPQVKGACYPTLRPTAGRTPAPFLHPTAAPAMPPMHPLQSTSGMGDSCQIHGGFHSCHSNASHLATPLDQSVSSHLGIGCSYPQQPLCHSPGASLPPTKKRKCTQALEDSGECRVWACHCRPMTSRSRSSEVQDPDSEGQNRMPTDQCSPALKWQPCHSVPWHSLLNSHYEKLPDVGYRVVTDKGFNFSPADEAFVCQKKNHFQITIHIQVWGSPKFVETEMGLKPIEMFYLKVFGTKVEATNQIIAIEQSQADRSKKIFNPVKIDLLADQVTKVTLGRLHFSETTANNMRKKGKPNPDQRYFMLVVGLYAANQDQFYLLSAHISERIIVRASNPGQFENDSDALWQRGQVPESIVCHGRVGINTDAPDEALVVCGNMKVMGTIMHPSDSRAKQNIQEVDTNEQLKRIAQMRIVEYDYKPEFASAMGINTAHQTGMIAQEVQEILPRAVREVGDVTCGNGETLENFLMVDKDQIFMENVGAVKQLCKLTNNLEERIEELEIWNRKLARLKRLSSWKSSASEASTISKSSRAVSASSPRRAVHKKNNKVYFSGKRQACPNWVFQTLVITLIAVMAFCALTIVALYILSLKDQDRRVPNLPPSNITSSQEPALLPTASSSAPNTSLVTTPASLQVPEITFCEILPCQETYCCPIRGMKEVSSSPVQRQSEEKEFHQRRWSEDKSKSVLARNALSGPDWESDWIDTTISSIQIMEIQQIIDHQYCIQSLQCGSGNYNYNIPVNKHTPTNVKFSLEINTTEPLIVFQCKFTLGNICFHSKRGTKGLESHREISQEMTQGYQHIWSLPVAPFSDSMFHFRVAAPDLADCSTDPYFAGIFFTDYFFYFYRRCA

SEQ ID NO: 53991 - protein, 898 aa, Homo sapiens
  Payload ID: 10672
  Gene Symbol: MYRFL
  Gene Name: myelin regulatory factor-like
  ENSP ID: ENSP00000449598
MDVVGENEALQQFFEAQGANGTLENPALDTSLLEEFLGNDFDLGALQRQLPDTPPYSASDSCSPPQVKGACYPTLRPTAGRTPAPFLHPTAAPAMPPMHPLQSTSGMGDSCQIHGGFHSCHSNASHLATPLDQSVSSHLGIGCSYPQQPLCHSPGASLPPTKKRKCTQALEDSGECRVWACHCRPMTSRSRSSEVQDPDSEGQNRMPTDQCSPALKWQPCHSVPWHSLLNSHYEKLPDVGYRVVTDKGFNFSPADEAFVCQKKNHFQITIHIQVWGSPKFVETEMGLKPIEMFYLKVFGTKVEATNQIIAIEQSQADRSKKIFNPVKIDLLADQVTKVTLGRLHFSETTANNMRKKGKPNPDQRYFMLVVGLYAANQDQFYLLSAHISERIIVRASNPGQFENDSDALWQRGQVPESIVCHGRVGINTDAPDEALVVCGNMKVMGTIMHPSDSRAKQNIQEVDTNEQLKRIAQMRIVEYDYKPEFASAMGINTAHQTGMIAQEVQEILPRAVREVGDVTCGNGETLENFLMVDKDQIFMENVGAVKQLCKLTNNLEERIEELEIWNRKLARLKRLSSWKSSASEASTISKSSRAVSASSPRRAVHKKNNKVYFSGKRQACPNWVFQTLVITLIAVMAFCLKDQDRRVPNLPPSNITSSQEPALLPTASSSAPNTSLVTTPASLQVPEITFCEILPCQETYCCPIRGMKEVSSSPVQRQSEEKEFHQRRWSDKSKSVLARNALSGPDWESDWIDTTISSIQIMEIQQIIDHQYCIQSLQCGSGNYNYNIPVNKHTPTNVKFSLEINTTEPLIVFQCKFTLGNICFHSKRGTKGLESHREISQEMTQGYQHIWSLPVAPFSDSMFHFRVAAPDLADCSTDPYFAGIFFTDYFFYFYRRCA

SEQ ID NO: 53992 - protein, 1121 aa, Homo sapiens
  Payload ID: 10673
  Gene Symbol: MYT1
  Gene Name: myelin transcription factor 1
  Uniprot ID: Q01538
  ENSP ID: ENSP00000327465
MSLENEDKRARTRSKALRGPPETTAADLSCPTPGCTGSGHVRGKYSRHRSLQSCPLAKKRKLEGAEAEHLVSKRKSHPLKLALDEGYGVDSDGSEDTEVKDASVSDESEGTLEGAEAETSGQDEIHRPETAEGRSPVKSHFGSNPIGSATASSKGSYSSYQGIIATSLLNLGQIAEETLVEEDLGQAAKPGPGIVHLLQEAAEGAASEEGEKGLFIQPEDAEEVVEVTTERSQDLCPQSLEDAASEESSKQKGILSHEEEDEEEEEEEEEEEEDEEEEEEEEEEEEEEEEEEEEEEEEEEEEEEEEAAPDVIFQEDTSHTSAQKAPELRGPESPSPKPEYSVIVEVRSDDDKDEDTHSRKSTVTDESEMQDMMTRGNLGLLEQAIALKAEQVRTVCEPGCPPAEQSQLGLGEPGKAAKPLDTVRKSYYSKDPSRAEKREIKCPTPGCDGTGHVTGLYPHHRSLSGCPHKDRIPPEILAMHENVLKCPTPGCTGQGHVNSNRNTHRSLSGCPIAAAEKLAKSHEKQQPQTGDPSKSSSNSDRILRPMCFVKQLEVPPYGSYRPNVAPATPRANLAKELEKFSKVTFDYASFDAQVFGKRMLAPKIQTSETSPKAFQCFDYSQDAEAAHMAATAILNLSTRCWEMPENLSTKPQDLPSKSVDIEVDENGTLDLSMHKHRKRENAFPSSSSCSSSPGVKSPDASQRHSSTSAPSSSMTSPQSSQASRQDEWDRPLDYTKPSRLREEEPEESEPAAHSFASSEADDQEVSEENFEERKYPGEVTLTNFKLKFLSKDIKKELLTCPTPGCDGSGHITGNYASHRSLSGCPLADKSLRNLMAAHSADLKCPTPGCDGSGHITGNYASHRSLSGCPRAKKSGVKVAPTKDDKEDPELMKCPVPGCVGLGHISGKYASHRSASGCPLAARRQKEGSLNGSSFSWKSLKNEGPTCPTPGCDGSGHANGSFLTHRSLSGCPRATFAGKKGKLSGDEVLSPKFKTSDVLENDEEIKQLNQEIRDLNESNSEMEAAMVQLQSQISSMEKNLKNIEEENKLIEEQNEALFLELSGLSQALIQSLANIRLPHMEPICEQNFDAYVSTLTDMYSNQDPENKDLLESIKQAVRGIQV

SEQ ID NO: 53993 - protein, 591 aa, Homo sapiens
  Payload ID: 10673
  Gene Symbol: MYT1
  Gene Name: myelin transcription factor 1
  ENSP ID: ENSP00000353269
MSLENEDKRARTRSKALRGPPETTAADLSCPTPGCTGSGHVRGKYSRHRSLQSCPLAKKRKLEGAEAEHLVSKRKSHPLKLALDEGYGVDSDGSEDTEVKDASVSDESEGTLEGAEAETSGQDEIHRPETAEDPSRAEKREIKCPTPGCDGTGHVTGLYPHHRSLSGCPHKDRIPPEILAMHENVLKCPTPGCTGQGHVNSNRNTHRSLSGCPIAAAEKLAKSHEKQQPQTGDPSKSSSNSDRILRPMCFVKQLEVPPYGSYRPNVAPATPRANLAKELEKFSKVTFDYASFDAQVFGKRMLAPKIQTSETSPKAFQCFDYSQDAEAAHMAATAILNLSTRCWEMPENLSTKPQDLPSKSVDIEVDENGTLDLSMHKHRKRENAFPSSSSCSSSPGVKSPDASQRHSSTSAPSSSMTSPQSSQASRQDEWDRPLDYTKPSRLREEEPEESEPAAHSFASSEADDQEVSEENFEERKYPGEVTLTNFKLKFLSKDIKKELLTCPTPGCDGSGHITGNYASHRRCPTPGCDGSGHITGNYASHRSLSGCPRAKKSGVKVAPTKDDKEDPELMKYVGPCWLFHCIAELRFSCVL

SEQ ID NO: 53994 - protein, 1148 aa, Homo sapiens
  Payload ID: 10673
  Gene Symbol: MYT1
  Gene Name: myelin transcription factor 1
  Uniprot ID: Q01538
  ENSP ID: ENSP00000442412
MSLENEDKRARTRSKALRGPPETTAADLSCPTPGCTGSGHVRGKYSRHRSLQSCPLAKKRKLEGAEAEHLVSKRKSHPLKLALDEGYGVDSDGSEDTEVKDASVSDESEGTLEGAEAETSGQDEIHRPETAEGRSPVKSHFGSNPIGSATASSKGSYSSYQGIIATSLLNLGQIAEETLVEEDLGQAAKPGPGIVHLLQEAAEGAASEEGEKGLFIQPEDAEEVVEVTTERSQDLCPQSLEDAASEESSKQKGILSHEEEDEEEEEEEEEEEEDEEEEEEEEEEEEEEEEEEEEEEEEEEEEEEEEAAPDVIFQEDTSHTSAQKAPELRGPESPSPKPEYSVIVEVRSDDDKDEDTHSRKSTVTDESEMQDMMTRGNLGLLEQAIALKAEQVRTVCEPGCPPAEQSQLGLGEPGKAAKPLDTVRKSYYSKDPSRAEKREIKCPTPGCDGTGHVTGLYPHHRSLSGCPHKDRIPPEILAMHENVLKCPTPGCTGQGHVNSNRNTHRSLSGCPIAAAEKLAKSHEKQQPQTGDPSKSSSNSDRILRPMCFVKQLEVPPYGSYRPNVAPATPRANLAKELEKFSKVTFDYASFDAQVFGKRMLAPKIQTSETSPKAFQSKPFPKASSPRHSPSSSYVRSTSSSSAGFDYSQDAEAAHMAATAILNLSTRCWEMPENLSTKPQDLPSKSVDIEVDENGTLDLSMHKHRKRENAFPSSSSCSSSPGVKSPDASQRHSSTSAPSSSMTSPQSSQASRQDEWDRPLDYTKPSRLREEEPEESEPAAHSFASSEADDQEVSEENFEERKYPGEVTLTNFKLKFLSKDIKKELLTCPTPGCDGSGHITGNYASHRSLSGCPLADKSLRNLMAAHSADLKCPTPGCDGSGHITGNYASHRSLSGCPRAKKSGVKVAPTKDDKEDPELMKCPVPGCVGLGHISGKYASHRSASGCPLAARRQKEGSLNGSSFSWKSLKNEGPTCPTPGCDGSGHANGSFLTHRSLSGCPRATFAGKKGKLSGDEVLSPKFKTSDVLENDEEIKQLNQEIRDLNESNSEMEAAMVQLQSQISSMEKNLKNIEEENKLIEEQNEALFLELSGLSQALIQSLANIRLPHMEPICEQNFDAYVSTLTDMYSNQDPENKDLLESIKQAVRGIQV

SEQ ID NO: 53995 - protein, 1121 aa, Homo sapiens; identical to SEQ ID NO: 53992
  Payload ID: 10673
  Gene Symbol: MYT1
  Gene Name: myelin transcription factor 1
  Uniprot ID: Q01538
  ENSP ID: ENSP00000477771

SEQ ID NO: 53996 - protein, 591 aa, Homo sapiens; identical to SEQ ID NO: 53993
  Payload ID: 10673
  Gene Symbol: MYT1
  Gene Name: myelin transcription factor 1
  ENSP ID: ENSP00000478819

SEQ ID NO: 53997 - protein, 591 aa, Homo sapiens; identical to SEQ ID NO: 53993
  Payload ID: 10673
  Gene Symbol: MYT1
  Gene Name: myelin transcription factor 1
  ENSP ID: ENSP00000480510

SEQ ID NO: 53998 - protein, 591 aa, Homo sapiens; identical to SEQ ID NO: 53993
  Payload ID: 10673
  Gene Symbol: MYT1
  Gene Name: myelin transcription factor 1
  ENSP ID: ENSP00000481863

SEQ ID NO: 53999 - protein, 1148 aa, Homo sapiens; identical to SEQ ID NO: 53994
  Payload ID: 10673
  Gene Symbol: MYT1
  Gene Name: myelin transcription factor 1
  Uniprot ID: Q01538
  ENSP ID: ENSP00000483021

SEQ ID NO: 54000 - protein, 202 aa, Homo sapiens
  Payload ID: 10674
  Gene Symbol: MYT1L
  Gene Name: myelin transcription factor 1-like
  ENSP ID: ENSP00000382111
EDQEPIRCPVPGCDGQGHITGKYASHRSASGCPLAAKRQKDGYLNGSQFSWKSVKTEGMSCPTPGCDGSGHVSGSFLTHRSLSGCPRATSAMKKAKLSGEQMLTIKQRASNGIENDEEIKQLDEEIKELNESNSQMEADMIKLRTQITTMESNLKTIEEENKVIEQQNESLLHELANLSQSLIHSLANIQLPHMEDGVWWGQ

SEQ ID NO: 54001 - protein, 1186 aa, Homo sapiens
  Payload ID: 10674
  Gene Symbol: MYT1L
  Gene Name: myelin transcription factor 1-like
  Uniprot ID: Q9UL68
  ENSP ID: ENSP00000382114
MEVDTEEKRHRTRSKGVRVPVEPAIQELFSCPTPGCDGSGHVSGKYARHRSVYGCPLAKKRKTQDKQPQEPAPKRKPFAVKADSSSVDECDDSDGTEDMDEKEEDEGEEYSEDNDEPGDEDEEDEEGDREEEEEIEEEDEDDDEDGEDVEDEEEEEEEEEEEEEEEENEDHQMNCHNTRIMQDTEKDDNNNDEYDNYDELVAKSLLNLGKIAEDAAYRARTESEMNSNTSNSLEDDSDKNENLGRKSELSLDLDSDVVRETVDSLKLLAQGHGVVLSENMNDRNYADSMSQQDSRNMNYVMLGKPMNNGLMEKMVEESDEEVCLSSLECLRNQCFDLARKLSETNPQERNPQQNMNIRQHVRPEEDFPGRTPDRNYSDMLNLMRLEEQLSPRSRVFASCAKEDGCHERDDDTTSVNSDRSEEVFDMTKGNLTLLEKAIALETERAKAMREKMAMEAGRRDNMRSYEDQSPRQLPGEDRKPKSSDSHVKKPYYGKDPSRTEKKESKCPTPGCDGTGHVTGLYPHHRSLSGCPHKDRVPPEILAMHESVLKCPTPGCTGRGHVNSNRNSHRSLSGCPIAAAEKLAKAQEKHQSCDVSKSSQASDRVLRPMCFVKQLEIPQYGYRNNVPTTTPRSNLAKELEKYSKTSFEYNSYDNHTYGKRAIAPKVQTRDISPKGYDDAKRYCKDPSPSSSSTSSYAPSSSSNLSCGGGSSASSTCSKSSFDYTHDMEAAHMAATAILNLSTRCREMPQNLSTKPQDLCATRNPDMEVDENGTLDLSMNKQRPRDSCCPILTPLEPMSPQQQAVMNNRCFQLGEGDCWDLPVDYTKMKPRRIDEDESKDITPEDLDPFQEALEERRYPGEVTIPSPKPKYPQCKESKKDLITLSGCPLADKSIRSMLATSSQELKCPTPGCDGSGHITGNYASHRSLSGCPRAKKSGIRIAQSKEDKEDQEPIRCPVPGCDGQGHITGKYASHRSASGCPLAAKRQKDGYLNGSQFSWKSVKTEGMSCPTPGCDGSGHVSGSFLTHRSLSGCPRATSAMKKAKLSGEQMLTIKQRASNGIENDEEIKQLDEEIKELNESNSQMEADMIKLRTQITTMESNLKTIEEENKVIEQQNESLLHELANLSQSLIHSLANIQLPHMDPINEQNFDAYVTTLTEMYTNQDRYQSPENKALLENIKQAVRGIQV

SEQ ID NO: 54002 - protein, 184 aa, Homo sapiens
  Payload ID: 10674
  Gene Symbol: MYT1L
  Gene Name: myelin transcription factor 1-like
  Uniprot ID: Q9UL68
  ENSP ID: ENSP00000384219
MSCPTPGCDGSGHVSGSFLTHRSLSGCPRATSAMKKAKLSGEQMLTIKQRASNGIENDEEIKQLDEEIKELNESNSQMEADMIKLRTQVTITTMESNLKTIEEENKVIEQQNESLLHELANLSQSLIHSLANIQLPHMDPINEQNFDAYVTTLTEMYTNQDRYQSPENKALLENIKQAVRGIQV

SEQ ID NO: 54003 - protein, 1184 aa, Homo sapiens
  Payload ID: 10674
  Gene Symbol: MYT1L
  Gene Name: myelin transcription factor 1-like
  Uniprot ID: Q9UL68
  ENSP ID: ENSP00000396103
MEVDTEEKRHRTRSKGVRVPVEPAIQELFSCPTPGCDGSGHVSGKYARHRSVYGCPLAKKRKTQDKQPQEPAPKRKPFAVKADSSSVDECDDSDGTEDMDEKEEDEGEEYSEDNDEPGDEDEEDEEGDREEEEEIEEEDEDDDEDGEDVEDEEEEEEEEEEEEEEEENEDHQMNCHNTRIMQDTEKDDNNNDEYDNYDELVAKSLLNLGKIAEDAAYRARTESEMNSNTSNSLEDDSDKNENLGRKSELSLDLDSDVVRETVDSLKLLAQGHGVVLSENMNDRNYADSMSQQDSRNMNYVMLGKPMNNGLMEKMVEESDEEVCLSSLECLRNQCFDLARKLSETNPQERNPQQNMNIRQHVRPEEDFPGRTPDRNYSDMLNLMRLEEQLSPRSRVFASCAKEDGCHERDDDTTSVNSDRSEEVFDMTKGNLTLLEKAIALETERAKAMREKMAMEAGRRDNMRSYEDQSPRQLPGEDRKPKSSDSHVKKPYYDPSRTEKKESKCPTPGCDGTGHVTGLYPHHRSLSGCPHKDRVPPEILAMHESVLKCPTPGCTGRGHVNSNRNSHRSLSGCPIAAAEKLAKAQEKHQSCDVSKSSQASDRVLRPMCFVKQLEIPQYGYRNNVPTTTPRSNLAKELEKYSKTSFEYNSYDNHTYGKRAIAPKVQTRDISPKGYDDAKRYCKDPSPSSSSTSSYAPSSSSNLSCGGGSSASSTCSKSSFDYTHDMEAAHMAATAILNLSTRCREMPQNLSTKPQDLCATRNPDMEVDENGTLDLSMNKQRPRDSCCPILTPLEPMSPQQQAVMNNRCFQLGEGDCWDLPVDYTKMKPRRIDEDESKDITPEDLDPFQEALEERRYPGEVTIPSPKPKYPQCKESKKDLITLSGCPLADKSIRSMLATSSQELKCPTPGCDGSGHITGNYASHRSLSGCPRAKKSGIRIAQSKEDKEDQEPIRCPVPGCDGQGHITGKYASHRSASGCPLAAKRQKDGYLNGSQFSWKSVKTEGMSCPTPGCDGSGHVSGSFLTHRSLSGCPRATSAMKKAKLSGEQMLTIKQRASNGIENDEEIKQLDEEIKELNESNSQMEADMIKLRTQITTMESNLKTIEEENKVIEQQNESLLHELANLSQSLIHSLANIQLPHMDPINEQNFDAYVTTLTEMYTNQDRYQSPENKALLENIKQAVRGIQV

SEQ ID NO: 54004 - protein, 343 aa, Homo sapiens
  Payload ID: 10674
  Gene Symbol: MYT1L
  Gene Name: myelin transcription factor 1-like
  ENSP ID: ENSP00000473409
QERNPQQNMNIRQHVRPEEDFPGRTPDRNYSDMLNLMRLEEQLSPRSRVFASCAKEDGCHERDDDTTSVNSDRSEEVFDMTKGNLTLLEKAIALETERAKAMREKMAMEAGRRDNMRSYEDQSPRQLPGEDRKPKSSDSHVKKPYYGKDPSRTEKKESKCPTPGCDGTGHVTGLYPHHRSLSGCPHKDRVPPEILAMHESVLKCPTPGCTGRGHVNSNRNSHRSLSGCPIAAAEKLAKAQEKHQSCDVSKSSQASDRVLRPMCFVKQLEIPQYGYRNNVPTTTPRSNLAKELEKYSKTSFEYNSYDNHTYGKRAIAPKRSGTARTPAPAAAAPAATRPAAAAT

SEQ ID NO: 54005 - protein, 206 aa, Homo sapiens
  Payload ID: 10675
  Gene Symbol: MOBP
  Gene Name: myelin-associated oligodendrocyte basic protein
  Uniprot ID: Q13875
  ENSP ID: ENSP00000312293
MSQKPAKEGPRLSKNQKYSEHFSIHCCPPFTFLNSKKEIVDRKYSICKSGCFYQKKEEDWICCACQKTSSCQRRLSSRGEPWLPPPASFGPLRTSRRAKSPQRPKQQPAAPPAVVRAPAKPRSPPRSERQPRSPPRSERQPRSPPRSERQPRSPPRSERQPRPRPEVRPPPAKQRPPQKSKQQPRSSPLRGPGASRGGSPVKASRF

SEQ ID NO: 54006 - protein, 81 aa, Homo sapiens
  Payload ID: 10675
  Gene Symbol: MOBP
  Gene Name: myelin-associated oligodendrocyte basic protein
  Uniprot ID: Q13875
  ENSP ID: ENSP00000373261
MSQKPAKEGPRLSKNQKYSEHFSIHCCPPFTFLNSKKEIVDRKYSICKSGCFYQKKEEDWICCACQKTRLKRKIRPTPKKK

SEQ ID NO: 54007 - protein, 81 aa, Homo sapiens; identical to SEQ ID NO: 54006
  Payload ID: 10675
  Gene Symbol: MOBP
  Gene Name: myelin-associated oligodendrocyte basic protein
  Uniprot ID: Q13875
  ENSP ID: ENSP00000388148

SEQ ID NO: 54008 - protein, 183 aa, Homo sapiens
  Payload ID: 10675
  Gene Symbol: MOBP
  Gene Name: myelin-associated oligodendrocyte basic protein
  Uniprot ID: Q13875
  ENSP ID: ENSP00000388827
MSQKPAKEGPRLSKNQKYSEHFSIHCCPPFTFLNSKKEIVDRKYSICKSGCFYQKKEEDWICCACQKTRTSRRAKSPQRPKQQPAAPPAVVRAPAKPRSPPRSERQPRSPPRSERQPRSPPRSERQPRSPPRSERQPRPRPEVRPPPAKQRPPQKSKQQPRSSPLRGPGASRGGSPVKASRFW

SEQ ID NO: 54009 - protein, 183 aa, Homo sapiens; identical to SEQ ID NO: 54008
  Payload ID: 10675
  Gene Symbol: MOBP
  Gene Name: myelin-associated oligodendrocyte basic protein
  Uniprot ID: Q13875
  ENSP ID: ENSP00000389055

SEQ ID NO: 54010 - protein, 183 aa, Homo sapiens; identical to SEQ ID NO: 54008
  Payload ID: 10675
  Gene Symbol: MOBP
  Gene Name: myelin-associated oligodendrocyte basic protein
  Uniprot ID: Q13875
  ENSP ID: ENSP00000400491

SEQ ID NO: 54011 - protein, 81 aa, Homo sapiens; identical to SEQ ID NO: 54006
  Payload ID: 10675
  Gene Symbol: MOBP
  Gene Name: myelin-associated oligodendrocyte basic protein
  Uniprot ID: Q13875
  ENSP ID: ENSP00000401312

SEQ ID NO: 54012 - protein, 81 aa, Homo sapiens; identical to SEQ ID NO: 54006
  Payload ID: 10675
  Gene Symbol: MOBP
  Gene Name: myelin-associated oligodendrocyte basic protein
  Uniprot ID: Q13875
  ENSP ID: ENSP00000405549

SEQ ID NO: 54013 - protein, 62 aa, Homo sapiens
  Payload ID: 10675
  Gene Symbol: MOBP
  Gene Name: myelin-associated oligodendrocyte basic protein
  ENSP ID: ENSP00000409071
MSVDIPLPTSEMSQKPAKEGPRLSKNQKYSEHFSIHCCPPFTFLNSKKEIVDRKYSICKSGC

SEQ ID NO: 54014 - protein, 81 aa, Homo sapiens; identical to SEQ ID NO: 54006
  Payload ID: 10675
  Gene Symbol: MOBP
  Gene Name: myelin-associated oligodendrocyte basic protein
  Uniprot ID: Q13875
  ENSP ID: ENSP00000409730

SEQ ID NO: 54015 - protein, 58 aa, Homo sapiens
  Payload ID: 10675
  Gene Symbol: MOBP
  Gene Name: myelin-associated oligodendrocyte basic protein
  ENSP ID: ENSP00000410720
MSQKPAKEGPRLSKNQKYSEHFSIHCCPPFTFLNSKKEIVDRKYSICKSGCFYQKKEE

SEQ ID NO: 54016 - protein, 182 aa, Homo sapiens
  Payload ID: 10675
  Gene Symbol: MOBP
  Gene Name: myelin-associated oligodendrocyte basic protein
  Uniprot ID: Q13875
  ENSP ID: ENSP00000413771
MSQKPAKEGPRLSKNQKYSEHFSIHCCPPFTFLNSKKEIVDRKYSICKSGCFYQKKEEDWICCACQKTRTSRRAKSPQRPKQQPAAPPAVVRAPAKPRSPPRSERQPRSPPRSERQPRSPPRSERQPRSPPRSERQPRPRPEVRPPPAKQRPPQKSKQQPRSSPLRGPGASRGGSPVKASRF

SEQ ID NO: 54017 - protein, 140 aa, Homo sapiens
  Payload ID: 10676
  Gene Symbol: MDS2
  Gene Name: myelodysplastic syndrome 2 translocation associated
  Uniprot ID: Q8NDY4
  ENSP ID: ENSP00000363683
MLQAADFIERTETAGELSRGLIGVLSSQISWCLLNVNLSKLPTRLQRLSCSVLNSSPAMRGGARGRPQLTLERPLRPGCRLHSCSEAEKGGFVRRKEIILFPPCEDPARGWLSANPGREPSPGICWHLNLGLPSLHNCEE

SEQ ID NO: 54018 - protein, 139 aa, Homo sapiens
  Payload ID: 10676
  Gene Symbol: MDS2
  Gene Name: myelodysplastic syndrome 2 translocation associated
  ENSP ID: ENSP00000483238
LQAADFIERTETAGELSRGLIGVLSSQISWCLLNVNLSKLPTRLQRLSCSVLNSSPAMRGGARGRPQLTLERPLRPGCRLHSCSEAEKGGFVRRKEIILFPPCEDPARGWLSANPGREPSPGICWHLNLGLPSLHNCEE

SEQ ID NO: 54019 - protein, 271 aa, Homo sapiens
  Payload ID: 10677
  Gene Symbol: MCL1
  Gene Name: myeloid cell leukemia 1
  Uniprot ID: Q07820
  ENSP ID: ENSP00000309973
MFGLKRNAVIGLNLYCGGAGLGAGSGGATRPGGRLLATEKEASARREIGGGEAGAVIGGSAGASPPSTLTPDSRRVARPPPIGAEVPDVTATPARLLFFAPTRRAAPLEEMEAPAADAIMSPEEELDGYEPEPLGKRPAVLPLLELVGESGNNTSTDGSLPSTPPPAEEEEDELYRQSLEIISRYLREQATGAKDTKPMGRSGATSRKALETLRRVGDGVQRNHETAFQGWVCGVLPCRGPRRWHQECAAGFCRCCWSRSWFGISNKIALL

SEQ ID NO: 54020 - protein, 350 aa, Homo sapiens
  Payload ID: 10677
  Gene Symbol: MCL1
  Gene Name: myeloid cell leukemia 1
  Uniprot ID: Q07820
  ENSP ID: ENSP00000358022
MFGLKRNAVIGLNLYCGGAGLGAGSGGATRPGGRLLATEKEASARREIGGGEAGAVIGGSAGASPPSTLTPDSRRVARPPPIGAEVPDVTATPARLLFFAPTRRAAPLEEMEAPAADAIMSPEEELDGYEPEPLGKRPAVLPLLELVGESGNNTSTDGSLPSTPPPAEEEEDELYRQSLEIISRYLREQATGAKDTKPMGRSGATSRKALETLRRVGDGVQRNHETAFQGMLRKLDIKNEDDVKSLSRVMIHVFSDGVTNWGRIVTLISFGAFVAKHLKTINQESCIEPLAESITDVLVRTKRDWLVKQRGWDGFVEFFHVEDLEGGIRNVLLAFAGVAGVGAGLAYLIR

SEQ ID NO: 54021 - protein, 197 aa, Homo sapiens
  Payload ID: 10677
  Gene Symbol: MCL1
  Gene Name: myeloid cell leukemia 1
  ENSP ID: ENSP00000477624
MFGLKRNAVIGLNLYCGGAGLGAGSGGATRPGGRLLATGAKDTKPMGRSGATSRKALETLRRVGDGVQRNHETAFQGMLRKLDIKNEDDVKSLSRVMIHVFSDGVTNWGRIVTLISFGAFVAKHLKTINQESCIEPLAESITDVLVRTKRDWLVKQRGWDGFVEFFHVEDLEGGIRNVLLAFAGVAGVGAGLAYLIR

SEQ ID NO: 54022 - protein, 407 aa, Homo sapiens
  Payload ID: 10678
  Gene Symbol: MNDA
  Gene Name: myeloid cell nuclear differentiation antigen
  Uniprot ID: P41218
  ENSP ID: ENSP00000357123
MVNEYKKILLLKGFELMDDYHFTSIKSLLAYDLGLTTKMQEEYNRIKITDLMEKKFQGVACLDKLIELAKDMPSLKNLVNNLRKEKSKVAKKIKTQEKAPVKKINQEEVGLAAPAPTARNKLTSEARGRIPVAQKRKTPNKEKTEAKRNKVSQEQSKPPGPSGASTSAAVDHPPLPQTSSSTPSNTSFTPNQETQAQRQVDARRNVPQNDPVTVVVLKATAPFKYESPENGKSTMFHATVASKTQYFHVKVFDINLKEKFVRKKVITISDYSECKGVMEIKEASSVSDFNQNFEVPNRIIEIANKTPKISQLYKQASGTMVYGLFMLQKKSVHKKNTIYEIQDNTGSMDVVGSGKWHNIKCEKGDKLRLFCLQLRTVDRKLKLVCGSHSFIKVIKAKKNKEGPMNVN

SEQ ID NO: 54023 - protein, 104 aa, Homo sapiens
  Payload ID: 10678
  Gene Symbol: MNDA
  Gene Name: myeloid cell nuclear differentiation antigen
  ENSP ID: ENSP00000406800
  MOD_RES (1)..(1): Any amino acid
XPNRIIEIANKTPKISQLYKQASGTMVYGLFMLQKKSVHKKNTIYEIQDNTGSMDVVGSGKWHNIKCEKGDKLRLFCLQLRTVDRKLKLVIKAKKNKEGPMNVN

SEQ ID NO: 54024 - protein, 309 aa, Homo sapiens
  Payload ID: 10679
  Gene Symbol: MYD88
  Gene Name: myeloid differentiation primary response 88
  ENSP ID: ENSP00000379625
MRPDRAEAPGPPAMAAGGPGAGSAAPVSSTSSLPLAALNMRVRRRLSLFLNVRTQVAADWTALAEEMDFEYLEIRQLETQADPTGRLLDAWQGRPGASVGRLLELLTKLGRDDVLLELGPSIEEDCQKYILKQQQEEAEKPLQVAAVDSSVPRTAELAGITTLDDPLGHMPERFDAFICYCPSDIQFVQEMIRQLEQTNYRLKLCVSDRDVLPGTCVWSIASELIEKRCRRMVVVVSDDYLQSKECDFQTKFALSLSPGAHQKRLIPIKYKAMKKEFPSILRFITVCDYTNPCTKSWFWTRLAKALSLP

SEQ ID NO: 54025 - protein, 264 aa, Homo sapiens
  Payload ID: 10679
  Gene Symbol: MYD88
  Gene Name: myeloid differentiation primary response 88
  ENSP ID: ENSP00000389979
MRPDRAEAPGPPAMAAGGPGAGSAAPVSSTSSLPLAALNMRVRRRLSLFLNVRTQVAADWTALAEEMDFEYLEIRQLETQADPTGRLLDAWQGRPGASVGRLLELLTKLGRDDVLLELGPSIGHMPERFDAFICYCPSDIQFVQEMIRQLEQTNYRLKLCVSDRDVLPGTCVWSIASELIEKRCRRMVVVVSDDYLQSKECDFQTKFALSLSPGAHQKRLIPIKYKAMKKEFPSILRFITVCDYTNPCTKSWFWTRLAKALSLP

SEQ ID NO: 54026 - protein, 204 aa, Homo sapiens
  Payload ID: 10679
  Gene Symbol: MYD88
  Gene Name: myeloid differentiation primary response 88
  Uniprot ID: Q99836
  ENSP ID: ENSP00000390565
MRPDRAEAPGPPAMAAGGPGAGSAAPVSSTSSLPLAALNMRVRRRLSLFLNVRTQVAADWTALAEEMDFEYLEIRQLETQADPTGRLLDAWQGRPGASVGRLLELLTKLGRDDVLLELGPSIEEDCQKYILKQQQEEAEKPLQVAAVDSSVPRTAELAGITTLDDPLGAAGWWWLSLMITCRARNVTSRPNLHSASLQVPIRSD

SEQ ID NO: 54027 - protein, 316 aa, Homo sapiens
  Payload ID: 10679
  Gene Symbol: MYD88
  Gene Name: myeloid differentiation primary response 88
  ENSP ID: ENSP00000391753
RPDRAEAPGPPAMAAGGPGAGSAAPVSSTSSLPLAALNMRVRRRLSLFLNVRTQVAADWTALAEEMDFEYLEIRQLETQADPTGRLLDAWQGRPGASVGRLLELLTKLGRDDVLLELGPSIEEDCQKYILKQQQEEAEKPLQVAAVDSSVPRTAELAGITTLDDPLGHMPERFDAFICYCPSDIQFVQEMIRQLEQTNYRLKLCVSDRDVLPGTCVWSIASELIEKRLARRPRGGCRRMVVVVSDDYLQSKECDFQTKFALSLSPGAHQKRLIPIKYKAMKKEFPSILRFITVCDYTNPCTKSWFWTRLAKALSLP

SEQ ID NO: 54028 - protein, 317 aa, Homo sapiens
  Payload ID: 10679
  Gene Symbol: MYD88
  Gene Name: myeloid differentiation primary response 88
  ENSP ID: ENSP00000401399
MRPDRAEAPGPPAMAAGGPGAGSAAPVSSTSSLPLAALNMRVRRRLSLFLNVRTQVAADWTALAEEMDFEYLEIRQLETQADPTGRLLDAWQGRPGASVGRLLELLTKLGRDDVLLELGPSIEEDCQKYILKQQQEEAEKPLQVAAVDSSVPRTAELAGITTLDDPLGHMPERFDAFICYCPSDIQFVQEMIRQLEQTNYRLKLCVSDRDVLPGTCVWSIASELIEKRLARRPRGGCRRMVVVVSDDYLQSKECDFQTKFALSLSPGAHQKRLIPIKYKAMKKEFPSILRFITVCDYTNPCTKSWFWTRLAKALSLP

SEQ ID NO: 54029 - protein, 159 aa, Homo sapiens
  Payload ID: 10679
  Gene Symbol: MYD88
  Gene Name: myeloid differentiation primary response 88
  Uniprot ID: Q99836
  ENSP ID: ENSP00000417848
MRPDRAEAPGPPAMAAGGPGAGSAAPVSSTSSLPLAALNMRVRRRLSLFLNVRTQVAADWTALAEEMDFEYLEIRQLETQADPTGRLLDAWQGRPGASVGRLLELLTKLGRDDVLLELGPSIGAAGWWWLSLMITCRARNVTSRPNLHSASLQVPIRSD

SEQ ID NO: 54030 - protein, 268 aa, Homo sapiens
  Payload ID: 10680
  Gene Symbol: MLF1
  Gene Name: myeloid leukemia factor 1
  Uniprot ID: P58340
  ENSP ID: ENSP00000348157
MFRMLNSSFEDDPFFSESILAHRENMRQMIRSFSEPFGRDLLSISDGRGRAHNRRGHNDGEDSLTHTDVSSFQTMDQMVSNMRNYMQKLERNFGQLSVDPNGHSFCSSSVMTYSKIGDEPPKVFQASTQTRRAPGGIKETRKAMRDSDSGLEKMAIGHHIHDRAHVIKKSKNKKTGDEEVNQEFINMNESDAHAFDEEWQSEVLKYKPGRHNLGNTRMRSVGHENPGSRELKRREKPQQSPAIEHGRRSNVLGDKLHIKGSSVKSNKK

SEQ ID NO: 54031 - protein, 243 aa, Homo sapiens
  Payload ID: 10680
  Gene Symbol: MLF1
  Gene Name: myeloid leukemia factor 1
  Uniprot ID: P58340
  ENSP ID: ENSP00000352025
MRQMIRSFSEPFGRDLLSISDGRGRAHNRRGHNDGEDSLTHTDVSSFQTMDQMVSNMRNYMQKLERNFGQLSVDPNGHSFCSSSVMTYSKIGDEPPKVFQASTQTRRAPGGIKETRKAMRDSDSGLEKMAIGHHIHDRAHVIKKSKNKKTGDEEVNQEFINMNESDAHAFDEEWQSEVLKYKPGRHNLGNTRMRSVGHENPGSRELKRREKPQQSPAIEHGRRSNVLGDKLHIKGSSVKSNKK

SEQ ID NO: 54032 - protein, 299 aa, Homo sapiens
  Payload ID: 10680
  Gene Symbol: MLF1
  Gene Name: myeloid leukemia factor 1
  Uniprot ID: P58340
  ENSP ID: ENSP00000376568
MLKEVLQREGKSYKSETLMYIKKARASENKLSESILAHRENMRQMIRSFSEPFGRDLLSISDGRGRAHNRRGHNDGEDSLTATSCSLVPFGDFGGMHTDVSSFQTMDQMVSNMRNYMQKLERNFGQLSVDPNGHSFCSSSVMTYSKIGDEPPKVFQASTQTRRAPGGIKETRKAMRDSDSGLEKMAIGHHIHDRAHVIKKSKNKKTGDEEVNQEFINMNESDAHAFDEEWQSEVLKYKPGRHNLGNTRMRSVGHENPGSRELKRREKPQQSPAIEHGRRSNVLGDKLHIKGSSVKSNKK

SEQ ID NO: 54033 - protein, 243 aa, Homo sapiens; identical to SEQ ID NO: 54031
  Payload ID: 10680
  Gene Symbol: MLF1
  Gene Name: myeloid leukemia factor 1
  Uniprot ID: P58340
  ENSP ID: ENSP00000417141

SEQ ID NO: 54034 - protein, 204 aa, Homo sapiens
  Payload ID: 10680
  Gene Symbol: MLF1
  Gene Name: myeloid leukemia factor 1
  ENSP ID: ENSP00000417278
MFRMLNSSFEDDPFFSESILAHRENMRQMIRSFSEPFGRDLLSISDGRGRAHNRRGHNDGEDSLTATSCSLVPFGDFGGMHTDVSSFQTMDQMVSNMRNYMQKLERNFGQLSVDPNGHSFCSSSVMTYSKIGDEPPKVFQASTQTRRAPGGIKETRKAMRDSDSGLEKMAIGHHIHDRAHVIKKSKNKKTGDEEVNQEFINMNE

SEQ ID NO: 54035 - protein, 258 aa, Homo sapiens
  Payload ID: 10680
  Gene Symbol: MLF1
  Gene Name: myeloid leukemia factor 1
  Uniprot ID: P58340
  ENSP ID: ENSP00000417777
MRQMIRSFSEPFGRDLLSISDGRGRAHNRRGHNDGEDSLTATSCSLVPFGDFGGMHTDVSSFQTMDQMVSNMRNYMQKLERNFGQLSVDPNGHSFCSSSVMTYSKIGDEPPKVFQASTQTRRAPGGIKETRKAMRDSDSGLEKMAIGHHIHDRAHVIKKSKNKKTGDEEVNQEFINMNESDAHAFDEEWQSEVLKYKPGRHNLGNTRMRSVGHENPGSRELKRREKPQQSPAIEHGRRSNVLGDKLHIKGSSVKSNKK

SEQ ID NO: 54036 - protein, 243 aa, Homo sapiens; identical to SEQ ID NO: 54031
  Payload ID: 10680
  Gene Symbol: MLF1
  Gene Name: myeloid leukemia factor 1
  Uniprot ID: P58340
  ENSP ID: ENSP00000417835

SEQ ID NO: 54037 - protein, 200 aa, Homo sapiens
  Payload ID: 10680
  Gene Symbol: MLF1
  Gene Name: myeloid leukemia factor 1
  Uniprot ID: P58340
  ENSP ID: ENSP00000418595
MRQMIRSFSEPFGRDLLSISDGRGRAHNRRGHNDGEDSLTHTDVSSFQTMDQMVSNMRNYMQKLERNFIKETRKAMRDSDSGLEKMAIGHHIHDRAHVIKKSKNKKTGDEEVNQEFINMNESDAHAFDEEWQSEVLKYKPGRHNLGNTRMRSVGHENPGSRELKRREKPQQSPAIEHGRRSNVLGDKLHIKGSSVKSNKK

SEQ ID NO: 54038 - protein, 40 aa, Homo sapiens
  Payload ID: 10680
  Gene Symbol: MLF1
  Gene Name: myeloid leukemia factor 1
  ENSP ID: ENSP00000419241
MFRMLNSSFEDDPFFSHTGGLTLQQLKLKHKKPLELSSGH

SEQ ID NO: 54039 - protein, 188 aa, Homo sapiens
  Payload ID: 10680
  Gene Symbol: MLF1
  Gene Name: myeloid leukemia factor 1
  ENSP ID: ENSP00000419636
MTPSSRELREPGVRGRAGIKHTDVSSFQTMDQMVSNMRNYMQKLERNFGQLSVDPNGHSFCSSSVMTYSKIGDEPPKVFQASTQTRRAPGGIKETRKAMRDSDSGLEKMAIGHHIHDRAHVIKKSKNKKTGDEEVNQEFINMNESDAHAFDEEWQSEVLKYKPGRHNLGNTRMRSVGHENPGSRELKR

SEQ ID NO: 54040 - protein, 174 aa, Homo sapiens
  Payload ID: 10680
  Gene Symbol: MLF1
  Gene Name: myeloid leukemia factor 1
  ENSP ID: ENSP00000419637
MRQMIRSFSEPFGRDLLSISDGRGRAHNRRGHNDGEDSLTATSCSLVPFGDFGGMHTDVSSFQTMDQMVSNMRNYMQKLERNFGQLSVDPNGHSFCSSSVMTYSKIGDEPPKVFQASTQTRRAPGGIKETRKAMRDSDSGLEKMAIGHHIHDRAHVIKKSKNKKTGDEEVNQEF

SEQ ID NO: 54041 - protein, 50 aa, Homo sapiens
  Payload ID: 10680
  Gene Symbol: MLF1
  Gene Name: myeloid leukemia factor 1
  ENSP ID: ENSP00000419775
MFRMLNSSFEDDPFFSWSYSAAAETEAQEALGTIIRTLSPFLHTEKICDR

SEQ ID NO: 54042 - protein, 258 aa, Homo sapiens; identical to SEQ ID NO: 54035
  Payload ID: 10680
  Gene Symbol: MLF1
  Gene Name: myeloid leukemia factor 1
  Uniprot ID: P58340
  ENSP ID: ENSP00000420134

SEQ ID NO: 54043 - protein, 191 aa, Homo sapiens
  Payload ID: 10680
  Gene Symbol: MLF1
  Gene Name: myeloid leukemia factor 1
  ENSP ID: ENSP00000420410
MDQMVSNMRNYMQKLERNFGQLSVDPNGHSFCSSSVMTYSKIGDEPPKVFQASTQTRRAPGGIKETRKAMRDSDSGLEKMAIGHHIHDRAHVIKKSKNKKTGDEEVNQEFINMNESDAHAFDEEWQSEVLKYKPGRHNLGNTRMRSVGHENPGSRELKRREKPQQSPAIEHGRRSNVLGDKLHIKGSSVKS

SEQ ID NO: 54044 - protein, 258 aa, Homo sapiens; identical to SEQ ID NO: 54035
  Payload ID: 10680
  Gene Symbol: MLF1
  Gene Name: myeloid leukemia factor 1
  Uniprot ID: P58340
  ENSP ID: ENSP00000483337

SEQ ID NO: 54045 - protein, 200 aa, Homo sapiens; identical to SEQ ID NO: 54037
  Payload ID: 10680
  Gene Symbol: MLF1
  Gene Name: myeloid leukemia factor 1
  Uniprot ID: P58340
  ENSP ID: ENSP00000484169

SEQ ID NO: 54046 - protein, 248 aa, Homo sapiens
  Payload ID: 10681
  Gene Symbol: MLF2
  Gene Name: myeloid leukemia factor 2
  Uniprot ID: Q15773
  ENSP ID: ENSP00000203630
MFRFMRDVEPEDPMFLMDPFAIHRQHMSRMLSGGFGYSPFLSITDGNMPGTRPASRRMQQAGAVSPFGMLGMSGGFMDMFGMMNDMIGNMEHMTAGGNCQTFSSSTVISYSNTGDGAPKVYQETSEMRSAPGGIRETRRTVRDSDSGLEQMSIGHHIRDRAHILQRSRNHRTGDQEERQDYINLDESEAAAFDDEWRRETSRFRQQRPLEFRRLESSGAGGRRAEGPPRLAIQGPEDSPSRQSRRYDW

SEQ ID NO: 54047 - protein, 248 aa, Homo sapiens; identical to SEQ ID NO: 54046
  Payload ID: 10681
  Gene Symbol: MLF2
  Gene Name: myeloid leukemia factor 2
  Uniprot ID: Q15773
  ENSP ID: ENSP00000403941

SEQ ID NO: 54048 - protein, 248 aa, Homo sapiens; identical to SEQ ID NO: 54046
  Payload ID: 10681
  Gene Symbol: MLF2
  Gene Name: myeloid leukemia factor 2
  Uniprot ID: Q15773
  ENSP ID: ENSP00000438671

SEQ ID NO: 54049 - protein, 230 aa, Homo sapiens
  Payload ID: 10681
  Gene Symbol: MLF2
  Gene Name: myeloid leukemia factor 2
  ENSP ID: ENSP00000439789
MFRFMRDVEPEDPMFLMDPFAIHRQHMSRMLSGGFGYSPFLSITDGNMPGTRPASRRMQQAGAVSPFGMLGMSGGFMDMFGMMNDMIGNMEHMTAGGNCQTFSSSTVISYSNTGDGAPKVYQETSEMRSAPGGVSWGALLSQRRSGRHGGLFGIQTVDWSRCPLGITSGTGLTSSSAPETIARGTRRSGRTISTWMRVRPQRLMTSGGGRPPDSGSSVPWSFGGLSPQGL

SEQ ID NO: 54050 - protein, 79 aa, Homo sapiens
  Payload ID: 10681
  Gene Symbol: MLF2
  Gene Name: myeloid leukemia factor 2
  ENSP ID: ENSP00000442444
MFRFMRDVEPEDPMFLMDPFAIHRQHMSRMLSGGFGYSPFLSITDGNMPGTRPASRRMQQAGAVSPFGMLGMSGGFMDM

SEQ ID NO: 54051 - protein, 121 aa, Homo sapiens
  Payload ID: 10681
  Gene Symbol: MLF2
  Gene Name: myeloid leukemia factor 2
  ENSP ID: ENSP00000443829
MFRFMRDVEPEDPMFLMDPFAIHRQHMSRMLSGGFGYSPFLSITDGNMPGTRPASRRMQQAGAVSPFGMLGMSGGFMDMFGMMNDMIGNMEHMTAGGNCQTFSSSTVISYSNTGDGAPKVY

SEQ ID NO: 54052 - protein, 248 aa, Homo sapiens; identical to SEQ ID NO: 54046
  Payload ID: 10681
  Gene Symbol: MLF2
  Gene Name: myeloid leukemia factor 2
  Uniprot ID: Q15773
  ENSP ID: ENSP00000446317

SEQ ID NO: 54053 - protein, 734 aa, Homo sapiens
  Payload ID: 10682
  Gene Symbol: MZF1
  Gene Name: myeloid zinc finger 1
  Uniprot ID: P28698
  ENSP ID: ENSP00000215057
MRPAVLGSPDRAPPEDEGPVMVKLEDSEEEGEAALWDPGPEAARLRFRCFRYEEATGPQEALAQLRELCRQWLRPEVRSKEQMLELLVLEQFLGALPPEIQARVQGQRPGSPEEAAALVDGLRREPGGPRRWVTVQVQGQEVLSEKMEPSSFQPLPETEPPTPEPGPKTPPRTMQESPLGLQVKEESEVTEDSDFLESGPLAATQESVPTLLPEEAQRCGTVLDQIFPHSKTGPEGPSWREHPRALWHEEAGGIFSPGFALQLGSISAGPGSVSPHLHVPWDLGMAGLSGQIQSPSREGGFAHALLLPSDLRSEQDPTDEDPCRGVGPALITTRWRSPRGRSRGRPSTGGGVVRGGRCDVCGKVFSQRSNLLRHQKIHTGERPFVCSECGRSFSRSSHLLRHQLTHTEERPFVCGDCGQGFVRSARLEEHRRVHTGEQPFRCAECGQSFRQRSNLLQHQRIHGDPPGPGAKPPAPPGAPEPPGPFPCSECRESFARRAVLLEHQAVHTGDKSFGCVECGERFGRRSVLLQHRRVHSGERPFACAECGQSFRQRSNLTQHRRIHTGERPFACAECGKAFRQRPTLTQHLRVHTGEKPFACPECGQRFSQRLKLTRHQRTHTGEKPYHCGECGLGFTQVSRLTEHQRIHTGERPFACPECGQSFRQHANLTQHRRIHTGERPYACPECGKAFRQRPTLTQHLRTHRREKPFACQDCGRRFHQSTKLIQHQRVHSAE

SEQ ID NO: 54054 - protein, 290 aa, Homo sapiens
  Payload ID: 10682
  Gene Symbol: MZF1
  Gene Name: myeloid zinc finger 1
  Uniprot ID: P28698
  ENSP ID: ENSP00000469378
MRPAVLGSPDRAPPEDEGPVMVKLEDSEEEGEAALWDPGPEAARLRFRCFRYEEATGPQEALAQLRELCRQWLRPEVRSKEQMLELLVLEQFLGALPPEIQARVQGQRPGSPEEAAALVDGLRREPGGPRRWVTVQVQGQEVLSEKMEPSSFQPLPETEPPTPEPGPKTPPRTMQESPLGLQVKEESEVTEDSDFLESGPLAATQESVPTLLPEEAQRCGTVLDQIFPHSKTGPEGPSWREHPRALWHEEAGGIFSPGAGAGAAPALGAGWLGAAVAMYVARCSANAATC

SEQ ID NO: 54055 - protein, 734 aa, Homo sapiens; identical to SEQ ID NO: 54053
  Payload ID: 10682
  Gene Symbol: MZF1
  Gene Name: myeloid zinc finger 1
  Uniprot ID: P28698
  ENSP ID: ENSP00000469493

SEQ ID NO: 54056 - protein, 259 aa, Homo sapiens
  Payload ID: 10682
  Gene Symbol: MZF1
  Gene Name: myeloid zinc finger 1
  ENSP ID: ENSP00000472123
MRPAVLGSPDRAPPEDEGPVMVKLEDSEEEGEAALWDPGPEAARLRFRCFRYEEATGPQEALAQLRELCRQWLRPEVRSKEQMLELLVLEQFLGALPPEIQARVQGQRPGSPEEAAALVDGLRREPGGPRRWVTVQVQGQEVLSEKMEPSSFQPLPETEPPTPEPGPKTPPRTMQESPLGLQVKEESEVTEDSDFLESGPLAATQESVPTLLPEEAQRCGTVLDQIFPHSKTGPEGPSWREHPRALWHEEAGGIFSPGK

SEQ ID NO: 54057 - protein, 63 aa, Homo sapiens
  Payload ID: 10682
  Gene Symbol: MZF1
  Gene Name: myeloid zinc finger 1
  ENSP ID: ENSP00000472454
MRPAVLGSPDRAPPEDEGPVMVKLEDSEEEGEAALWDPGPEAARLRFRCFRYEEATGPQEALA

SEQ ID NO: 54058 - protein, 559 aa, Homo sapiens
  Payload ID: 10683
  Gene Symbol: MLLT1
  Gene Name: myeloid/lymphoid or mixed-lineage leukemia
  translocated to, 1
  Uniprot ID: Q03111
  ENSP ID: ENSP00000252674
MDNQCTVQVRLELGHRAQLRKKPTTEGFTHDWMVFVRGPEQCDIQHFVEKVVFWLHDSFPKPRRVCKEPPYKVEESGYAGFIMPIEVHFKNKEEPRKVCFTYDLFLNLEGNPPVNHLRCEKLTFNNPTTEFRYKLLRAGGVMVMPEGADTVSRPSPDYPMLPTIPLSAFSDPKKTKPSHGSKDANKESSKTSKPHKVTKEHRERPRKDSESKSSSKELEREQAKSSKDTSRKLGEGRLPKEEKAPPPKAAFKEPKMALKETKLESTSPKGGPPPPPPPPPRASSKRPATADSPKPSAKKQKKSSSKGSRSAPGTSPRTSSSSSFSDKKPAKDKSSTRGEKVKAESEPREAKKALEVEESNSEDEASFKSESAQSSPSNSSSSSDSSSDSDFEPSQNHSQGPLRSMVEDLQSEESDEDDSSSGEEAAGKTNPGRDSRLSFSDSESDNSADSSLPSREPPPPQKPPPPNSKVSGRRSPESCSKPEKILKKGTYDKAYTDELVELHRRLMALRERNVLQQIVNLIEETGHFNVTNTTFDFDLFSLDETTVRKLQSCLEAVAT

SEQ ID NO: 54059 - protein, 1068 aa, Homo sapiens
  Payload ID: 10684
  Gene Symbol: MLLT10
  Gene Name: myeloid/lymphoid or mixed-lineage leukemia
  translocated to, 10
  Uniprot ID: P55197
  ENSP ID: ENSP00000307411
MVSSDRPVSLEDEVSHSMKEMIGGCCVCSDERGWAENPLVYCDGHGCSVAVHQACYGIVQVPTGPWFCRKCESQERAARVRCELCPHKDGALKRTDNGGWAHVVCALYIPEVQFANVSTMEPIVLQSVPHDRYNKTCYICDEQGRESKAATGACMTCNKHGCRQAFHVTCAQFAGLLCEEEGNGADNVQYCGYCKYHFSKLKKSKRGSNRSYDQSLSDSSSHSQDKHHEKEKKKYKEKDKHKQKHKKQPEPSPALVPSLTVTTEKTYTSTSNNSISGSLKRLEDTTARFTNANFQEVSAHTSSGKDVSETRGSEGKGKKSSAHSSGQRGRKPGGGRNPGTTVSAASPFPQGSFSGTPGSVKSSSGSSVQSPQDFLSFTDSDLRNDSYSHSQQSSATKDVHKGESGSQEGGVNSFSTLIGLPSTSAVTSQPKSFENSPGDLGNSSLPTAGYKRAQTSGIEEETVKEKKRKGNKQSKHGPGRPKGNKNQENVSHLSVSSASPTSSVASAAGSITSSSLQKSPTLLRNGSLQSLSVGSSPVGSEISMQYRHDGACPTTTFSELLNAIHNGIYNSNDVAVSFPNVVSGSGSSTPVSSSHLPQQSSGHLQQVGALSPSAVSSAAPAVATTQANTLSGSSLSQAPSHMYGNRSNSSMAALIAQSENNQTDQDLGDNSRNLVGRGSSPRGSLSPRSPVSSLQIRYDQPGNSSLENLPPVAASIEQLLERQWSEGQQFLLEQGTPSDILGMLKSLHQLQVENRRLEEQIKNLTAKKERLQLLNAQLSVPFPTITANPSPSHQIHTFSAQTAPTTDSLNSSKSPHIGNSFLPDNSLPVLNQDLTSSGQSTSSSSALSTPPPAGQSPAQQGSGVSGVQQVNGVTVGALASGMQPVTSTIPAVSAVGGIIGALPGNQLAINGIVGALNGVMQTPVTMSQNPTPLTHTTVPPNATHPMPATLTNSASGLGLLSDQQRQILIHQQQFQQLLNSQQLTPEQHQAFLYQLMQHHHQQHHQPELQQLQIPGPTQIPINNLLAGTQAPPLHTATTNPFLTIHGDNASQKVARLSDKTGPVAQEKS

SEQ ID NO: 54060 - protein, 1068 aa, Homo sapiens; identical to SEQ ID NO: 54059
  Payload ID: 10684
  Gene Symbol: MLLT10
  Gene Name: myeloid/lymphoid or mixed-lineage leukemia
  translocated to, 10
  Uniprot ID: P55197
  ENSP ID: ENSP00000366258

SEQ ID NO: 54061 - protein, 1027 aa, Homo sapiens
  Payload ID: 10684
  Gene Symbol: MLLT10
  Gene Name: myeloid/lymphoid or mixed-lineage leukemia
  translocated to, 10
  Uniprot ID: P55197
  ENSP ID: ENSP00000366272
MVSSDRPVSLEDEVSHSMKEMIGGCCVCSDERGWAENPLVYCDGHGCSVAVHQACYGIVQVPTGPWFCRKCESQERAARVRCELCPHKDGALKRTDNGGWAHVVCALYIPEVQFANVSTMEPIVLQSVPHDRYNKTCYICDEQGRESKAATGACMTCNKHGCRQAFHVTCAQFAGLLCEEEGNGADNVQYCGYCKYHFSKLKKSKRGSNRSYDQSLSDSSSHSQDKHHEKEKKKYKEKDKHKQKHKKQPEPSPALVPSLTVTTEKTYTSTSNNSISGSLKRLEDTTARFTNANFQEVSAHTSSGKDVSETRGSEGKGKKSSAHSSGQRGRKPGGGRNPGTTVSAASPFPQGSFSGTPGSVKSSSGSSVQSPQDFLSFTDSDLRNDSYSHSQQSSATKDVHKGESGSQEGGVNSFSTLIGLPSTSAVTSQPKSFENSPGDLGNSSLPTAGYKRAQTSGIEEETVKEKKRKGNKQSKHGPGRPKGNKNQENVSHLSVSSASPTSSVASAAGSITSSSLQKSPTLLRNGSLQSLSVGSSPVGSEISMQYRHDGACPTTTFSELLNAIHNDRGDSSTLTKQELKFIGIYNSNDVAVSFPNVVSGSGSSTPVSSSHLPQQSSGHLQQVGALSPSAVSSAAPAVATTQANTLSGSSLSQAPSHMYGNRSNSSMAALIAQSENNQTDQDLGDNSRNLVGRGSSPRGSLSPRSPVSSLQIRYDQPGNSSLENLPPVAASIEQLLERQWSEGQQFLLEQGTPSDILGMLKSLHQLQVENRRLEEQIKNLTAKKERLQLLNAQLSVPFPTITANPSPSHQIHTFSAQTAPTTDSLNSSKSPHIGNSFLPDNSLPVLNQDLTSSGQSTSSSSALSTPPPAGQSPAQQGSGVSGVQQVNGVTVGALASGMQPVTSTIPAVSAVGGIIGALPGNQLAINGIVGALNGVMQTPVTMSQNPTPLTHTTVPPNATHPMPATLTNSASGLGLLSDQQRQILIHQQQFQQLLNSQQLTPVHRHPHFTQLPPTHFSPSMEIMQVRK

SEQ ID NO: 54062 - protein, 126 aa, Homo sapiens
  Payload ID: 10684
  Gene Symbol: MLLT10
  Gene Name: myeloid/lymphoid or mixed-lineage leukemia
  translocated to, 10
  Uniprot ID: P55197
  ENSP ID: ENSP00000366295
MVSSDRPVSLEDEVSHSMKEMIGGCCVCSDERGWAENPLVYCDGHGCSVAVHQACYGIVQVPTGPWFCRKCESQERAARVAESRSVAQAKVQWCDLSPLQPLLPGFKRFSCLSLPNGMQFLLVSLI

SEQ ID NO: 54063 - protein, 179 aa, Homo sapiens
  Payload ID: 10684
  Gene Symbol: MLLT10
  Gene Name: myeloid/lymphoid or mixed-lineage leukemia
  translocated to, 10
  Uniprot ID: P55197
  ENSP ID: ENSP00000366304
MVSSDRPVSLEDEVSHSMKEMIGGCCVCSDERGWAENPLVYCDGHGCSVAVHQACYGIVQVPTGPWFCRKCESQERAARVMVCNSCWLASSENVTPGYIEHHCACASPHPRCLVSNVPPVSGALMHCFWACLTTAAFFGPQSFTTCHMSFLVSRDILFYIYGFMPFISVVIWRFKKERW

SEQ ID NO: 54064 - protein, 62 aa, Homo sapiens
  Payload ID: 10684
  Gene Symbol: MLLT10
  Gene Name: myeloid/lymphoid or mixed-lineage leukemia
  translocated to, 10
  ENSP ID: ENSP00000397800
  MOD_RES (1)..(1): Any amino acid
XENPLVYCDGHGCSVAVHQACYGIVQVPTGPWFCRKCESQERAARVVGPMWFVPCIFQRYNL

SEQ ID NO: 54065 - protein, 179 aa, Homo sapiens
  Payload ID: 10684
  Gene Symbol: MLLT10
  Gene Name: myeloid/lymphoid or mixed-lineage leukemia
  translocated to, 10
  ENSP ID: ENSP00000399883
  MOD_RES (1)..(1): Any amino acid
XSQPKSFENSPGDLGNSSLPTAGYKRAQTSGIEEETVKEKKRKGNKQSKHGPGRPKGNKNQENVSHLSVSSASPTSSVASAAGSITSSSLQKSPTLLRNGSLQSLSVGSSPVGSEISMQYRHDGACPTTSIYNSNDVAVSFPNVVSGSGSSTPVSSSHLPQQSSGHLQQVGALSPSAVS

SEQ ID NO: 54066 - protein, 361 aa, Homo sapiens
  Payload ID: 10684
  Gene Symbol: MLLT10
  Gene Name: myeloid/lymphoid or mixed-lineage leukemia
  translocated to, 10
  ENSP ID: ENSP00000408281
VTTEKTYTSTSNNSISGSLKRLEDTTARFTNANFQEVSAHTSSGKDVSETRGSEGKGKKSSAHSSGQRGRKPGGGRNPGTTVSAASPFPQAGYKRAQTSGIEEETVKEKKRKGNKQSKHGPGRPKGNKNQENVSHLSVSSASPTSSVASAAGSITSSSLQKSPTLLRNGSLQSLSVGSSPVGSEISMQYRHDGACPTTTFSELLNAIHNDRGDSSTLTKQELKFIGIYNSNDVAVSFPNVVSGSGSSTPVSSSHLPQQSSGHLQQVGALSPSAVSSAAPAVATTQANTLSGSSLSQAPSHMYGNRSNSSMAALIAQSENNQTDQDLGDNSRNLVGRGSSPRGSLSPRSPVSSLQIRYDQPG

SEQ ID NO: 54067 - protein, 126 aa, Homo sapiens; identical to SEQ ID NO: 54062
  Payload ID: 10684
  Gene Symbol: MLLT10
  Gene Name: myeloid/lymphoid or mixed-lineage leukemia
  translocated to, 10
  Uniprot ID: P55197
  ENSP ID: ENSP00000484335

SEQ ID NO: 54068 - protein, 1068 aa, Homo sapiens; identical to SEQ ID NO: 54059
  Payload ID: 10684
  Gene Symbol: MLLT10
  Gene Name: myeloid/lymphoid or mixed-lineage leukemia
  translocated to, 10
  Uniprot ID: P55197
  ENSP ID: ENSP00000488569

SEQ ID NO: 54069 - protein, 90 aa, Homo sapiens
  Payload ID: 10685
  Gene Symbol: MLLT11
  Gene Name: myeloid/lymphoid or mixed-lineage leukemia
  translocated to, 11
  Uniprot ID: Q13015
  ENSP ID: ENSP00000357917
MRDPVSSQYSSFLFWRMPIPELDLSELEGLGLSDTATYKVKDSSVGKMIGQATAADQEKNPEGDGLLEYSTFNFWRAPIASIHSFELDLL

SEQ ID NO: 54070 - protein, 162 aa, Homo sapiens
  Payload ID: 10686
  Gene Symbol: MLLT3
  Gene Name: myeloid/lymphoid or mixed-lineage leukemia
  translocated to, 3
  ENSP ID: ENSP00000369678
MKDLHSDDNEEESDEVEDNDNDSEMERPVNRGGSRSRRVSLSDGSDSESSSASSPLHHEPPPPLLKTNNNQILEVKSPIKQSKSDKQIKNGECDKAYLDELVELHRRLMTLRERHILQQIVNLIEETGHFHITNTTFDFDLCSLDKTTVRKLQSYLETSGTS

SEQ ID NO: 54071 - protein, 568 aa, Homo sapiens
  Payload ID: 10686
  Gene Symbol: MLLT3
  Gene Name: myeloid/lymphoid or mixed-lineage leukemia
  translocated to, 3
  Uniprot ID: P42568
  ENSP ID: ENSP00000369695
MASSCAVQVKLELGHRAQVRKKPTVEGFTHDWMVFVRGPEHSNIQHFVEKVVFHLHESFPRPKRVCKDPPYKVEESGYAGFILPIEVYFKNKEEPRKVRFDYDLFLHLEGHPPVNHLRCEKLTFNNPTEDFRRKLLKAGGDPNRSIHTSSSSSSSSSSSSSSSSSSSSSSSSSSSSSSSSSSSSSSSSSSTSFSKPHKLMKEHKEKPSKDSREHKSAFKEPSRDHNKSSKESSKKPKENKPLKEEKIVPKMAFKEPKPMSKEPKPDSNLLTITSGQDKKAPSKRPPISDSEELSAKKRKKSSSEALFKSFSSAPPLILTCSADKKQIKDKSHVKMGKVKIESETSEKKKSTLPPFDDIVDPNDSDVEENISSKSDSEQPSPASSSSSSSSSFTPSQTRQQGPLRSIMKDLHSDDNEEESDEVEDNDNDSEMERPVNRGGSRSRRVSLSDGSDSESSSASSPLHHEPPPPLLKTNNNQILEVKSPIKQSKSDKQIKNGECDKAYLDELVELHRRLMTLRERHILQQIVNLIEETGHFHITNTTFDFDLCSLDKTTVRKLQSYLETSGTS

SEQ ID NO: 54072 - protein, 565 aa, Homo sapiens
  Payload ID: 10686
  Gene Symbol: MLLT3
  Gene Name: myeloid/lymphoid or mixed-lineage leukemia
  translocated to, 3
  Uniprot ID: P42568
  ENSP ID: ENSP00000485996
MCAVQVKLELGHRAQVRKKPTVEGFTHDWMVFVRGPEHSNIQHFVEKVVFHLHESFPRPKRVCKDPPYKVEESGYAGFILPIEVYFKNKEEPRKVRFDYDLFLHLEGHPPVNHLRCEKLTFNNPTEDFRRKLLKAGGDPNRSIHTSSSSSSSSSSSSSSSSSSSSSSSSSSSSSSSSSSSSSSSSSSTSFSKPHKLMKEHKEKPSKDSREHKSAFKEPSRDHNKSSKESSKKPKENKPLKEEKIVPKMAFKEPKPMSKEPKPDSNLLTITSGQDKKAPSKRPPISDSEELSAKKRKKSSSEALFKSFSSAPPLILTCSADKKQIKDKSHVKMGKVKIESETSEKKKSTLPPFDDIVDPNDSDVEENISSKSDSEQPSPASSSSSSSSSFTPSQTRQQGPLRSIMKDLHSDDNEEESDEVEDNDNDSEMERPVNRGGSRSRRVSLSDGSDSESSSASSPLHHEPPPPLLKTNNNQILEVKSPIKQSKSDKQIKNGECDKAYLDELVELHRRLMTLRERHILQQIVNLIEETGHFHITNTTFDFDLCSLDKTTVRKLQSYLETSGTS

SEQ ID NO: 54073 - protein, 138 aa, Homo sapiens
  Payload ID: 10686
  Gene Symbol: MLLT3
  Gene Name: myeloid/lymphoid or mixed-lineage leukemia
  translocated to, 3
  ENSP ID: ENSP00000486193
MKDLHSDDNEEESDEVEDNDNDSEMERPVNRGGSRSRRVSLSDGSDSESSSASSPLHHEPPPPLLKTNNNQILEVKSPIKQSKSDKQIKNGECDKIVNLIEETGHFHITNTTFDFDLCSLDKTTVRKLQSYLETSGTS

SEQ ID NO: 54074 - protein, 1831 aa, Homo sapiens
  Payload ID: 10687
  Gene Symbol: MLLT4
  Gene Name: myeloid/lymphoid or mixed-lineage leukemia
  translocated to, 4
  ENSP ID: ENSP00000252692
MSAGGRDEERRKLADIIHHWNANRLDLFEISQPTEDLEFHGVMRFYFQDKAAGNFATKCIRVSSTATTQDVIETLAEKFRPDMRMLSSPKYSLYEVHVSGERRLDIDEKPLVVQLNWNKDDREGRFVLKNENDAIPPKKAQSNGPEKQEKEGVIQNFKRTLSKKEKKEKKKREKEALRQASDKDDRPFQGEDVENSRLAAEVYKDMPETSFTRTISNPEVVMKRRRQQKLEKRMQEFRSSDGRPDSGGTLRIYADSLKPNIPYKTILLSTTDPADFAVAEALEKYGLEKENPKDYCIARVMLPPGAQHSDEKGAKEIILDDDECPLQIFREWPSDKGILVFQLKRRPPDHIPKKTKKHLEGKTPKGKERADGSGYGSTLPPEKLPYLVELSPGRRNHFAYYNYHTYEDGSDSRDKPKLYRLQLSVTEVGTEKLDDNSIQLFGPGIQPHHCDLTNMDGVVTVTPRSMDAETYVEGQRISETTMLQSGMKVQFGASHVFKFVDPSQDHALAKRSVDGGLMVKGPRHKPGIVQETTFDLGGDIHSGTALPTSKSTTRLDSDRVSSASSTAERGMVKPMIRVEQQPDYRRQESRTQDASGPELILPASIEFRESSEDSFLSAIINYTNSSTVHFKLSPTYVLYMACRYVLSNQYRPDISPTERTHKVIAVVNKMVSMMEGVIQEVDQVDQKQKNIAGALAFWMANASELLNFIKQDRDLSRITLDAQDVLAHLVQMAFKYLVHCLQSELNNYMPAFLDDPEENSLQRPKIDDVLHTLTGAMSLLRRCRVNAALTIQLFSQLFHFINMWLFNRLVTDPDSGLCSHYWGAIIRQQLGHIEAWAEKQGLELAADCHLSRIVQATTLLTMDKYAPDDIPNINSTCFKLNSLQLQALLQNYHCAPDEPFIPTDLIENVVTVAENTADELARSDGREVQLEEDPDLQLPFLLPEDGYSCDVVRNIPNGLQEFLDPLCQRGFCRLIPHTRSPGTWTIYFEGADYESHLLRENTELAQPLRKEPEIITVTLKKQNGMGLSIVAAKGAGQDKLGIYVKSVVKGGAADVDGRLAAGDQLLSVDGRSLVGLSQERAAELMTRTSSVVTLEVAKQGAIYHGLATLLNQPSPMMQRISDRRGSGKPRPKSEGFELYNNSTQNGSPESPQLPWAEYSEPKKLPGDDRLMKNRADHRSSPNVANQPPSPGGKSAYASGTTAKITSVSTGNLCTEEQTPPPRPEAYPIPTQTYTREYFTFPASKSQDRMAPPQNQWPNYEEKPHMHTDSNHSSIAIQRVTRSQEELREDKAYQLERHRIEAAMDRKSDSDMWINQSSSLDSSTSSQEHLNHSSKSVTPASTLTKSGPGRWKTPAAIPATPVAVSQPIRTDLPPPPPPPPVHYAGDFDGMSMDLPLPPPPSANQIGLPSAQVAAAERRKREEHQRWYEKEKARLEEERERKRREQERKLGQMRTQSLNPAPFSPLTAQQMKPEKPSTLQRPQETVIRELQPQQQPRTIERRDLQYITVSKEELSSGDSLSPDPWKRDAKEKLEKQQQMHIVDMLSKEIQELQSKPDRSAEESDRLRKLMLEWQFQKRLQESKQKDEDDEEEEDDDVDTMLIMQRLEAERRARLQDEERRRQQQLEEMRKREAEDRARQEEERRRQEEERTKRDAEEKRRQEEGYYSRLEAERRRQHDEAARRLLEPEAPGLCRPPLPRDYEPPSPSPAPGAPPPPPQRNASYLKTQVLSPDSLFTAKFVAYNEEEEEEDCSLAGPNSYPGSTGAAVGAHDACRDAKEKRSKSQDADSPGSSGAPENLTFKERQRLFSQGQDVSNKVKASRKLTELENELNTK

SEQ ID NO: 54075 - protein, 1665 aa, Homo sapiens
  Payload ID: 10687
  Gene Symbol: MLLT4
  Gene Name: myeloid/lymphoid or mixed-lineage leukemia
  translocated to, 4
  ENSP ID: ENSP00000341118
MSAGGRDEERRKLADIIHHWNANRLDLFEISQPTEDLEFHGVMRFYFQDKAAGNFATKCIRVSSTATTQDVIETLAEKFRPDMRMLSSPKYSLYEVHVSGERRLDIDEKPLVVQLNWNKDDREGRFVLKNENDAIPPKKAQSNGPEKQEKEGVIQNFKRTLSKKEKKEKKKREKEALRQASDKDDRPFQGEDVENSRLAAEVYKDMPETSFTRTISNPEVVMKRRRQQKLEKRMQEFRSSDGRPDSGGTLRIYADSLKPNIPYKTILLSTTDPADFAVAEALEKYGLEKENPKDYCIARVMLPPGAQHSDEKGAKEIILDDDECPLQIFREWPSDKGILVFQLKRRPPDHIPKKTKKHLEGKTPKGKERADGSGYGSTLPPEKLPYLVELSPGRRNHFAYYNYHTYEDGSDSRDKPKLYRLQLSVTEVGTEKLDDNSIQLFGPGIQPHHCDLTNMDGVVTVTPRSMDAETYVEGQRISETTMLQSGMKVQFGASHVFKFVDPSQDHALAKRSVDGGLMVKGPRHKPGIVQETTFDLGGDIHSGTALPTSKSTTRLDSDRVSSASSTAERGMVKPMIRVEQQPDYRRQESRTQDASGPELILPASIEFRESSEDSFLSAIINYTNSSTVHFKLSPTYVLYMACRYVLSNQYRPDISPTERTHKVIAVVNKMVSMMEGVIQKQKNIAGALAFWMANASELLNFIKQDRDLSRITLDAQDVLAHLVQMAFKYLVHCLQSELNNYMPAFLDDPEENSLQRPKIDDVLHTLTGAMSLLRRCRVNAALTIQLFSQLFHFINMWLFNRLVTDPDSGLCSHYWGAIIRQQLGHIEAWAEKQGLELAADCHLSRIVQATTLLTMDKYAPDDIPNINSTCFKLNSLQLQALLQNYHCAPDEPFIPTDLIENVVTVAENTADELARSDGREVQLEEDPDLQLPFLLPEDGYSCDVVRNIPNGLQEFLDPLCQRGFCRLIPHTRSPGTWTIYFEGADYESHLLRENTELAQPLRKEPEIITVTLKKQNGMGLSIVAAKGAGQDKLGIYVKSVVKGGAADVDGRLAAGDQLLSVDGRSLVGLSQERAAELMTRTSSVVTLEVAKQGAIYHGLATLLNQPSPMMQRISDRRGSGKPRPKSEGFELYNNSTQNGSPESPQLPWAEYSEPKKLPGDDRLMKNRADHRSSPNVANQPPSPGGKSAYASGTTAKITSVSTGNLCTEEQTPPPRPEAYPIPTQTYTREYFTFPASKSQDRMAPPQNQWPNYEEKPHMHTDSNHSSIAIQRVTRSQEELREDKAYQLERHRIEAAMDRKSDSDMWINQSSSLDSSTSSQEHLNHSSKSVTPASTLTKSGPGRWKTPAAIPATPVAVSQPIRTDLPPPPPPPPVHYAGDFDGMSMDLPLPPPPSANQIGLPSAQVAAAERRKREEHQRWYEKEKARLEEERERKRREQERKLGQMRTQSLNPAPFSPLTAQQMKPEKPSTLQRPQETVIRELQPQQQPRTIERRDLQYITVSKEELSSGDSLSPDPWKRDAKEKLEKQQQMHIVDMLSKEIQELQSKPDRSAEESDRLRKLMLEWQFQKRLQESKQKDEDDEEEEDDDVDTMLIMQRLEAERRARQTAMPAISVLDLLQDEERRRQQQLEEMRKREAEDRARQEEERRRQEEERTKRDAEEKVMVL

SEQ ID NO: 54076 - protein, 1781 aa, Homo sapiens
  Payload ID: 10687
  Gene Symbol: MLLT4
  Gene Name: myeloid/lymphoid or mixed-lineage leukemia
  translocated to, 4
  ENSP ID: ENSP00000355771
MRFYFQDKAAGNFATKCIRVSSTATTQDVIETLAEKFRPDMRMLSSPKYSLYEVHVSGEERRLDIDEKPLVVQLNWNKDDREGRFVLKNENDAIPPKKAQSNGPEKQEKEGVIQNFKRTLSKKEKKEKKKREKEALRQASDKDDRPFQGEDVENSRLAAEVYKDMPETSFTRTISNPEVVMKRRRQQKLEKRMQEFRSSDGRPDSGGTLRIYADSLKPNIPYKTILLSTTDPADFAVAEALEKYGLEKENPKDYCIARVMLPPGAQHSDEKGAKEIILDDDECPLQIFREWPSDKGILVFQLKRRPPDHIPKKTKKHLEGKTPKGKERADGSGYGSTLPPEKLPYLVELSPGRRNHFAYYNYHTYEDGSDSRDKPKLYRLQLSVTEVGTEKLDDNSIQLFGPGIQPHHCDLTNMDGVVTVTPRSMDAETYVEGQRISETTMLQSGMKVQFGASHVFKFVDPSQDHALAKRSVDGGLMVKGPRHKPGIVQETTFDLGGDIHSGTALPTSKSTTRLDSDRVSSASSTAERGMVKPMIRVEQQPDYRRQESRTQDASGPELILPASIEFRESSEDSFLSAIINYTNSSTVHFKLSPTYVLYMACRYVLSNQYRPDISPTERTHKVIAVVNKMVSMMEGVIQKQKNIAGALAFWMANASELLNFIKQDRDLSRITLDAQDVLAHLVQMAFKYLVHCLQSELNNYMPAFLDDPEENSLQRPKIDDVLHTLTGAMSLLRRCRVNAALTIQLFSQLFHFINMWLFNRLVTDPDSGLCSHYWGAIIRQQLGHIEAWAEKQGLELAADCHLSRIVQATTLLTMDKYAPDDIPNINSTCFKLNSLQLQALLQNYHCAPDEPFIPTDLIENVVTVAENTADELARSDGREVQLEEDPDLQLPFLLPEDGYSCDVVRNIPNGLQEFLDPLCQRGFCRLIPHTRSPGTWTIYFEGADYESHLLRENTELAQPLRKEPEIITVTLKKQNGMGLSIVAAKGAGQDKLGIYVKSVVKGGAADVDGRLAAGDQLLSVDGRSLVGLSQERAAELMTRTSSVVTLEVAKQGAIYHGLATLLNQPSPMMQRISDRRGSGKPRPKSEGFELYNNSTQNGSPESPQLPWAEYSEPKKLPGDDRLMKNRADHRSSPNVANQPPSPGGKSAYASGTTAKITSVSTGNLCTEEQTPPPRPEAYPIPTQTYTREYFTFPASKSQDRMAPPQNQWPNYEEKPHMHTDSNHSSIAIQRVTRSQEELREDKAYQLERHRIEAAMDRKSDSDMWINQSSSLDSSTSSQEHLNHSSKSVTPASTLTKSGPGRWKTPAAIPATPVAVSQPIRTDLPPPPPPPPVHYAGDFDGMSMDLPLPPPPSANQIGLPSAQVAAAERRKREEHQRWYEKEKARLEEERERKRREQERKLGQMRTQSLNPAPFSPLTAQQMKPEKPSTLQRPQETVIRELQPQQQPRTIERRDLQYITVSKEELSSGDSLSPDPWKRDAKEKLEKQQQMHIVDMLSKEIQELQSKPDRSAEESDRLRKLMLEWQFQKRLQESKQKDEDDEEEEDDDVDTMLIMQRLEAERRARDEERRRQQQLEEMRKREAEDRARQEEERRRQEEERTKRDAEEKRRQEEGYYSRLEAERRRQHDEAARRLLEPEAPGLCRPPLPRDYEPPSPSPAPGAPPPPPQRNASYLKTQVLSPDSLFTAKFVAYNEEEEEEDCSLAGPNSYPGSTGAAVGAHDACRDAKEKRSKSQDADSPGSSGAPENLTFKERQRLFSQGQDVSNKVKASRKLTELENELNTK

SEQ ID NO: 54077 - protein, 1651 aa, Homo sapiens
  Payload ID: 10687
  Gene Symbol: MLLT4
  Gene Name: myeloid/lymphoid or mixed-lineage leukemia
  translocated to, 4
  Uniprot ID: P55196
  ENSP ID: ENSP00000375956
MSAGGRDEERRKLADIIHHWNANRLDLFEISQPTEDLEFHGVMRFYFQDKAAGNFATKCIRVSSTATTQDVIETLAEKFRPDMRMLSSPKYSLYEVHVSGERRLDIDEKPLVVQLNWNKDDREGRFVLKNENDAIPPKKAQSNGPEKQEKEGVIQNFKRTLSKKEKKEKKKREKEALRQASDKDDRPFQGEDVENSRLAAEVYKDMPETSFTRTISNPEVVMKRRRQQKLEKRMQEFRSSDGRPDSGGTLRIYADSLKPNIPYKTILLSTTDPADFAVAEALEKYGLEKENPKDYCIARVMLPPGAQHSDEKGAKEIILDDDECPLQIFREWPSDKGILVFQLKRRPPDHIPKKTKKHLEGKTPKGKERADGSGYGSTLPPEKLPYLVELSPGRRNHFAYYNYHTYEDGSDSRDKPKLYRLQLSVTEVGTEKLDDNSIQLFGPGIQPHHCDLTNMDGVVTVTPRSMDAETYVEGQRISETTMLQSGMKVQFGASHVFKFVDPSQDHALAKRSVDGGLMVKGPRHKPGIVQETTFDLGGDIHSGTALPTSKSTTRLDSDRVSSASSTAERGMVKPMIRVEQQPDYRRQESRTQDASGPELILPASIEFRESSEDSFLSAIINYTNSSTVHFKLSPTYVLYMACRYVLSNQYRPDISPTERTHKVIAVVNKMVSMMEGVIQKQKNIAGALAFWMANASELLNFIKQDRDLSRITLDAQDVLAHLVQMAFKYLVHCLQSELNNYMPAFLDDPEENSLQRPKIDDVLHTLTGAMSLLRRCRVNAALTIQLFSQLFHFINMWLFNRLVTDPDSGLCSHYWGAIIRQQLGHIEAWAEKQGLELAADCHLSRIVQATTLLTMDKYAPDDIPNINSTCFKLNSLQLQALLQNYHCAPDEPFIPTDLIENVVTVAENTADELARSDGREVQLEEDPDLQLPFLLPEDGYSCDVVRNIPNGLQEFLDPLCQRGFCRLIPHTRSPGTWTIYFEGADYESHLLRENTELAQPLRKEPEIITVTLKKQNGMGLSIVAAKGAGQDKLGIYVKSVVKGGAADVDGRLAAGDQLLSVDGRSLVGLSQERAAELMTRTSSVVTLEVAKQGAIYHGLATLLNQPSPMMQRISDRRGSGKPRPKSEGFELYNNSTQNGSPESPQLPWAEYSEPKKLPGDDRLMKNRADHRSSPNVANQPPSPGGKSAYASGTTAKITSVSTGNLCTEEQTPPPRPEAYPIPTQTYTREYFTFPASKSQDRMAPPQNQWPNYEEKPHMHTDSNHSSIAIQRVTRSQEELREDKAYQLERHRIEAAMDRKSDSDMWINQSSSLDSSTSSQEHLNHSSKSVTPASTLTKSGPGRWKTPAAIPATPVAVSQPIRTDLPPPPPPPPVHYAGDFDGMSMDLPLPPPPSANQIGLPSAQVAAAERRKREEHQRWYEKEKARLEEERERKRREQERKLGQMRTQSLNPAPFSPLTAQQMKPEKPSTLQRPQETVIRELQPQQQPRTIERRDLQYITVSKEELSSGDSLSPDPWKRDAKEKLEKQQQMHIVDMLSKEIQELQSKPDRSAEESDRLRKLMLEWQFQKRLQESKQKDEDDEEEEDDDVDTMLIMQRLEAERRARDEERRRQQQLEEMRKREAEDRARQEEERRRQEEERTKRDAEEKVMVL

SEQ ID NO: 54078 - protein, 1743 aa, Homo sapiens
  Payload ID: 10687
  Gene Symbol: MLLT4
  Gene Name: myeloid/lymphoid or mixed-lineage leukemia
  translocated to, 4
  Uniprot ID: P55196
  ENSP ID: ENSP00000375960
MSAGGRDEERRKLADIIHHWNANRLDLFEISQPTEDLEFHGVMRFYFQDKAAGNFATKCIRVSSTATTQDVIETLAEKFRPDMRMLSSPKYSLYEVHVSGERRLDIDEKPLVVQLNWNKDDREGRFVLKNENDAIPPKAQSNGPEKQEKEGVIQNFKRTLSKKEKKEKKKREKEALRQASDKDDRPFQGEDVENSRLAAEVYKDMPETSFTRTISNPEVVMKRRRQQKLEKRMQEFRSSDGRPDSGGTLRIYADSLKPNIPYKTILLSTTDPADFAVAEALEKYGLEKENPKDYCIARVMLPPGAQHSDEKGAKEIILDDDECPLQIFREWPSDKGILVFQLKRRPPDHIPKKTKKHLEGKTPKGKERADGSGYGSTLPPEKLPYLVELSPDGSDSRDKPKLYRLQLSVTEVGTEKLDDNSIQLFGPGIQPHHCDLTNMDGVVTVTPRSMDAETYVEGQRISETTMLQSGMKVQFGASHVFKFVDPSQDHALAKRSVDGGLMVKGPRHKPGIVQETTFDLGGDIHSGTALPTSKSTTRLDSDRVSSASSTAERGMVKPMIRVEQQPDYRRQESRTQDASGPELILPASIEFRESSEDSFLSAIINYTNSSTVHFKLSPTYVLYMACRYVLSNQYRPDISPTERTHKVIAVVNKMVSMMEGVIQKQKNIAGALAFWMANASELLNFIKQDRDLSRITLDAQDVLAHLVQMAFKYLVHCLQSELNNYMPAFLDDPEENSLQRPKIDDVLHTLTGAMSLLRRCRVNAALTIQLFSQLFHFINMWLFNRLVTDPDSGLCSHYWGAIIRQQLGHIEAWAEKQGLELAADCHLSRIVQATTLLTMDKYAPDDIPNINSTCFKLNSLQLQALLQNYHCAPDEPFIPTDLIENVVTVAENTADELARSDGREVQLEEDPDLQLPFLLPEDGYSCDVVRNIPNGLQEFLDPLCQRGFCRLIPHTRSPGTWTIYFEGADYESHLLRENTELAQPLRKEPEIITVTLKKQNGMGLSIVAAKGAGQDKLGIYVKSVVKGGAADDGRLAAGDQLLSVDGRSLVGLSQERAAELMTRTSSVVTLEVAKQGAIYHGLATLLNQPSPMMQRISDRRGSGKPRPKSEGFELYNNSTQNGSPESPQLPWAEYSEPKKLPGDDRLMKNRADHRSSPNVANQPPSPGGKSAYASGTTAKITSVSTGNLCTEEQTPPPRPEAYPIPTQTYTREYFTFPASKSQDRMAPPQNQWPNYEEKPHMHTDSNHSSIAIQRVTRSQEELREDKAYQLERHRIEAAMDRKSDSDMWINQSSSLDSSTSSQEHLNHSSKSVTPASTLTKSGPGRWKTPAAIPATPVAVSQPIRTDLPPPPPPPPVHYAGDFDGMSMDLPLPPPPSANQIGLPSAQVAAAERRKREEHQRWYEKEKARLEEERERKRREQERKLGQMRTQSLNPAPFSPLTAQQMKPEKPSTLQRPQETVIRELQPQQQPRTIERRDLQYITVSKEELSSGDSLSPDPWKRDAKEKLEKQQQMHIVDMLSKEIQELQSKPDRSAEESDRLRKLMLEWQFQKRLQESKQKDEDDEEEEDDDVDTMLIMQRLEAERRARLQDEERRRQQQLEEMRKREAEDRARQEEERRRQEEERTKRDAEEKRRQEEGYYSRLEAERRRQHDEAARRLLEPEAPGPNSYPGSTGAAVGAHDACRDAKEKRSKSQDADSPGSSGAPENLTFKERQRLFSQGQDVSNKVKASRKLTELENELNTK

SEQ ID NO: 54079 - protein, 1834 aa, Homo sapiens
  Payload ID: 10687
  Gene Symbol: MLLT4
  Gene Name: myeloid/lymphoid or mixed-lineage leukemia
  translocated to, 4
  Uniprot ID: P55196
  ENSP ID: ENSP00000383623
MSAGGRDEERRKLADIIHHWNANRLDLFEISQPTEDLEFHGVMRFYFQDKAAGNFATKCIRVSSTATTQDVIETLAEKFRPDMRMLSSPKYSLYEVHVSGERRLDIDEKPLVVQLNWNKDDREGRFVLKNENDAIPPKAQSNGPEKQEKEGVIQNFKRTLSKKEKKEKKKREKEALRQASDKDDRPFQGEDVENSRLAAEVYKDMPETSFTRTISNPEVVMKRRRQQKLEKRMQEFRSSDGRPDSGGTLRIYADSLKPNIPYKTILLSTTDPADFAVAEALEKYGLEKENPKDYCIARVMLPPGAQHSDEKGAKEIILDDDECPLQIFREWPSDKGILVFQLKRRPPDHIPKKTKKHLEGKTPKGKERADGSGYGSTLPPEKLPYLVELSPGRRNHFAYYNYHTYEDGSDSRDKPKLYRLQLSVTEVGTEKLDDNSIQLFGPGIQPHHCDLTNMDGVVTVTPRSMDAETYVEGQRISETTMLQSGMKVQFGASHVFKFVDPSQDHALAKRSVDGGLMVKGPRHKPGIVQETTFDLGGDIHSGTALPTSKSTTRLDSDRVSSASSTAERGMVKPMIRVEQQPDYRRQESRTQDASGPELILPASIEFRESSEDSFLSAIINYTNSSTVHFKLSPTYVLYMACRYVLSNQYRPDISPTERTHKVIAVVNKMVSMMEGVIQKQKNIAGALAFWMANASELLNFIKQDRDLSRITLDAQDVLAHLVQMAFKYLVHCLQSELNNYMPAFLDDPEENSLQRPKIDDVLHTLTGAMSLLRRCRVNAALTIQLFSQLFHFINMWLFNRLVTDPDSGLCSHYWGAIIRQQLGHIEAWAEKQGLELAADCHLSRIVQATTLLTMDKYAPDDIPNINSTCFKLNSLQLQALLQNYHCAPDEPFIPTDLIENVVTVAENTADELARSDGREVQLEEDPDLQLPFLLPEDGYSCDVVRNIPNGLQEFLDPLCQRGFCRLIPHTRSPGTWTIYFEGADYESHLLRENTELAQPLRKEPEIITVTLKKQNGMGLSIVAAKGAGQDKLGIYVKSVVKGGAADVDGRLAAGDQLLSVDGRSLVGLSQERAAELMTRTSSVVTLEVAKQGAIYHGLATLLNQPSPMMQRISDRRGSGKPRPKSEGFELYNNSTQNGSPESPQLPWAEYSEPKKLPGDDRLMKNRADHRSSPNVANQPPSPGGKSAYASGTTAKITSVSTGNLCTEEQTPPPRPEAYPIPTQTYTREYFTFPASKSQDRMAPPQNQWPNYEEKPHMHTDSNHSSIAIQRVTRSQEELREDKAYQLERHRIEAAMDRKSDSDMWINQSSSLDSSTSSQEHLNHSSKSVTPASTLTKSGPGRWKTPAAIPATPVAVSQPIRTDLPPPPPPPPVHYAGDFDGMSMDLPLPPPPSANQIGLPSAQVAAAERRKREEHQRWYEKEKARLEEERERKRREQERKLGQMRTQSLNPAPFSPLTAQQMKPEKPSTLQRPQETVIRELQPQQQPRTIERRDLQYITVSKEELSSGDSLSPDPWKRDAKEKLEKQQQMHIVDMLSKEIQELQSKPDRSAEESDRLRKLMLEWQFQKRLQESKQKDEDDEEEEDDDVDTMLIMQRLEAERRARTAMPAISVLDLLQDEERRRQQQLEEMRKREAEDRARQEEERRRQEEERTKRDAEEKRRQEEGYYSRLEAERRRQHDEAARRLLEPEAPGLCRPPLPRDYEPPSPSPAPGAPPPPPQRNASYLKTQVLSPDSLFTAKFVAYNEEEEEEDCSLAGPNSYPGSTGAAVGAHDACRDAKEKRSKSQDADSPGSSGAPENLTFKERQRLFSQGQDVSNKVKASRKLTELENELNTK

SEQ ID NO: 54080 - protein, 247 aa, Homo sapiens
  Payload ID: 10687
  Gene Symbol: MLLT4
  Gene Name: myeloid/lymphoid or mixed-lineage leukemia
  translocated to, 4
  ENSP ID: ENSP00000383625
MSAGGRDEERRKLADIIHHWNANRLDLFEISQPTEDLEFHGVMRFYFQDKAAGNFATKCIRVSSTATTQDVIETLAEKFRPDMRMLSSPKYSLYEVHVSGEERRLDIDEKPLVVQLNWNKDDREGRFVLKNENDAIPPKKAQSNGPEKQEKEGVIQNFKRTLSKKEKKEKKKREKEALRQASDKDDRPFQGEDVENSRLAAEVYKDMPETSFTRTISNPEVVMKRRRQQKLEKRMQEFRSSDGRPDS

SEQ ID NO: 54081 - protein, 250 aa, Homo sapiens
  Payload ID: 10687
  Gene Symbol: MLLT4
  Gene Name: myeloid/lymphoid or mixed-lineage leukemia
  translocated to, 4
  ENSP ID: ENSP00000383626
MSAGGRDEERRKLADIIHHWNANRLDLFEISQPTEDLEFHGVMRFYFQDKAAGNFATKCIRVSSTATTQDVIETLAEKFRPDMRMLSSPKYSLYEVHVSGEERRLDIDEKPLVVQLNWNKDDREGRFVLKNENDAIPPKAQSNGPEKQEKEGVIQNFKRTLSKKEKKEKKKREKEALRQASDKDDRPFQGEDVENSRLAAEVYKDMPETSFTRTISNPEVVMKRRRQQKLEKRMQEFRSSDGRPDSGGTL

SEQ ID NO: 54082 - protein, 1824 aa, Homo sapiens
  Payload ID: 10687
  Gene Symbol: MLLT4
  Gene Name: myeloid/lymphoid or mixed-lineage leukemia
  translocated to, 4
  Uniprot ID: P55196
  ENSP ID: ENSP00000404595
MSAGGRDEERRKLADIIHHWNANRLDLFEISQPTEDLEFHGVMRFYFQDKAAGNFATKCIRVSSTATTQDVIETLAEKFRPDMRMLSSPKYSLYEVHVSGERRLDIDEKPLVVQLNWNKDDREGRFVLKNENDAIPPKKAQSNGPEKQEKEGVIQNFKRTLSKKEKKEKKKREKEALRQASDKDDRPFQGEDVENSRLAAEVYKDMPETSFTRTISNPEVVMKRRRQQKLEKRMQEFRSSDGRPDSGGTLRIYADSLKPNIPYKTILLSTTDPADFAVAEALEKYGLEKENPKDYCIARVMLPPGAQHSDEKGAKEIILDDDECPLQIFREWPSDKGILVFQLKRRPPDHIPKKTKKHLEGKTPKGKERADGSGYGSTLPPEKLPYLVELSPGRRNHFAYYNYHTYEDGSDSRDKPKLYRLQLSVTEVGTEKLDDNSIQLFGPGIQPHHCDLTNMDGVVTVTPRSMDAETYVEGQRISETTMLQSGMKVQFGASHVFKFVDPSQDHALAKRSVDGGLMVKGPRHKPGIVQETTFDLGGDIHSGTALPTSKSTTRLDSDRVSSASSTAERGMVKPMIRVEQQPDYRRQESRTQDASGPELILPASIEFRESSEDSFLSAIINYTNSSTVHFKLSPTYVLYMACRYVLSNQYRPDISPTERTHKVIAVVNKMVSMMEGVIQKQKNIAGALAFWMANASELLNFIKQDRDLSRITLDAQDVLAHLVQMAFKYLVHCLQSELNNYMPAFLDDPEENSLQRPKIDDVLHTLTGAMSLLRRCRVNAALTIQLFSQLFHFINMWLFNRLVTDPDSGLCSHYWGAIIRQQLGHIEAWAEKQGLELAADCHLSRIVQATTLLTMDKYAPDDIPNINSTCFKLNSLQLQALLQNYHCAPDEPFIPTDLIENVVTVAENTADELARSDGREVQLEEDPDLQLPFLLPEDGYSCDVVRNIPNGLQEFLDPLCQRGFCRLIPHTRSPGTWTIYFEGADYESHLLRENTELAQPLRKEPEIITVTLKKQNGMGLSIVAAKGAGQDKLGIYVKSVVKGGAADVDGRLAAGDQLLSVDGRSLVGLSQERAAELMTRTSSVVTLEVAKQGAIYHGLATLLNQPSPMMQRISDRRGSGKPRPKSEGFELYNNSTQNGSPESPQLPWAEYSEPKKLPGDDRLMKNRADHRSSPNVANQPPSPGGKSAYASGTTAKITSVSTGNLCTEEQTPPPRPEAYPIPTQTYTREYFTFPASKSQDRMAPPQNQWPNYEEKPHMHTDSNHSSIAIQRVTRSQEELREDKAYQLERHRIEAAMDRKSDSDMWINQSSSLDSSTSSQEHLNHSSKSVTPASTLTKSGPGRWKTPAAIPATPVAVSQPIRTDLPPPPPPPPVHYAGDFDGMSMDLPLPPPPSANQIGLPSAQVAAAERRKREEHQRWYEKEKARLEEERERKRREQERKLGQMRTQSLNPAPFSPLTAQQMKPEKPSTLQRPQETVIRELQPQQQPRTIERRDLQYITVSKEELSSGDSLSPDPWKRDAKEKLEKQQQMHIVDMLSKEIQELQSKPDRSAEESDRLRKLMLEWQFQKRLQESKQKDEDDEEEEDDDVDTMLIMQRLEAERRARLQDEERRRQQQLEEMRKREAEDRARQEEERRRQEEERTKRDAEEKRRQEEGYYSRLEAERRRQHDEAARRLLEPEAPGLCRPPLPRDYEPPSPSPAPGAPPPPPQRNASYLKTQVLSPDSLFTAKFVAYNEEEEEEDCSLAGPNSYPGSTGAAVGAHDACRDAKEKRSKSQDADSPGSSGAPENLTFKERQRLFSQGQDVSNKVKASRKLTELENELNTK

SEQ ID NO: 54083 - protein, 389 aa, Homo sapiens
  Payload ID: 10687
  Gene Symbol: MLLT4
  Gene Name: myeloid/lymphoid or mixed-lineage leukemia
  translocated to, 4
  ENSP ID: ENSP00000414675
  MOD_RES (1)..(1): Any amino acid
XEKENPKDYCIARVMLPPGAQHSDEKGAKEIILDDDECPLQIFREWPSDKGILVFQLKRRPPDHIPKKTKKHLEGKTPKGKERADGSGYGSTLPPEKLPYLVELSPDGSDSRDKPKLYRLQLSVTEVGTEKLDDNSIQLFGPGIQPHHCDLTNMDGVVTVTPRSMDAETYVEGQRISETTMLQSGMKVQFGASHVFKFVDPSQDHALAKRSVDGGLMVKGPRHKPGIVQETTFDLGGDIHSGTALPTSKSTTRLDSDRVSSASSTAERGMVKPMIRVEQQPDYRRQESRTQDASGPELILPASIEFRESSEDSFLSAIINYTNSSTVHFKLSPTYVLYMACRYVLSNQYRPDISPTERTHKVIAVVNKMVSMMEGVIQVRSSRPAMLLQ

SEQ ID NO: 54084 - protein, 313 aa, Homo sapiens
  Payload ID: 10687
  Gene Symbol: MLLT4
  Gene Name: myeloid/lymphoid or mixed-lineage leukemia
  translocated to, 4
  ENSP ID: ENSP00000421441
  MOD_RES (1)..(1): Any amino acid
XLSPDPWKRDAKEKLEKQQQMHIVDMLSKEIQELQSKPDRSAEESDRLRKLMLEWQFQKRLQESKQKDEDDEEEEDDDVDTMLIMQRLEAERRARDEERRRQQQLEEMRKREAEDRARQEEERRRQEEERTKRDAEEKRRQEEGYYSRLEAERRRQHDEAARRLLEPEAPGLCRPPLPRDYEPPSPSPAPGAPPPPPQRNASYLKTQVLSPDSLFTAKFVAYNEEEEEEDCSLAGPNSYPGSTGAAVGAHDACRDAKEKRSKSQDADSPGSSGAPENLTFKERQRLFSQGQDVSNKVKASRKLTELENELNTK

SEQ ID NO: 54085 - protein, 124 aa, Homo sapiens
  Payload ID: 10687
  Gene Symbol: MLLT4
  Gene Name: myeloid/lymphoid or mixed-lineage leukemia
  translocated to, 4
  ENSP ID: ENSP00000422166
  MOD_RES (1)..(1): Any amino acid
XDGVFLSNSFQPPSAKANSTAHKKGQPLPPPKKSSSYHPSHCKGRGPNSYPGSTGAAVGAHDACRDAKEKRSKSQDADSPGSSGAPENLTFKERQRLFSQGQDVSNKVKASRKLTELENELNTK

SEQ ID NO: 54086 - protein, 191 aa, Homo sapiens
  Payload ID: 10687
  Gene Symbol: MLLT4
  Gene Name: myeloid/lymphoid or mixed-lineage leukemia
  translocated to, 4
  ENSP ID: ENSP00000423035
  MOD_RES (1)..(1): Any amino acid
XRNASYLKTQVLSPDSLFTAKFVAYNEEEEEEDCSLAGQDKYSSTRKSHGDLLPAPLKPRPPPCQPRPASDGVFLSNSFQPPSAKANSTAHKKGQPLPPPKKSSSYHPSHCKGPNSYPGSTGAAVGAHDACRDAKEKRSKSQDADSPGSSGAPENLTFKERQRLFSQGQDVSNKVKASRKLTELENELNTK

SEQ ID NO: 54087 - protein, 129 aa, Homo sapiens
  Payload ID: 10687
  Gene Symbol: MLLT4
  Gene Name: myeloid/lymphoid or mixed-lineage leukemia
  translocated to, 4
  ENSP ID: ENSP00000424188
  MOD_RES (1)..(1): Any amino acid
XKQQQMHIVDMLSKEIQELQSKPDRSAEESDRLRKLMLEWQFQKRLQESKQKDEDDEEEEDDDVDTMLIMQRLEAERRARLQDEERRRQQQLEEMRKREAEDRARQEEERRRQEEERTKRDAEEKVMVL

SEQ ID NO: 54088 - protein, 167 aa, Homo sapiens
  Payload ID: 10687
  Gene Symbol: MLLT4
  Gene Name: myeloid/lymphoid or mixed-lineage leukemia
  translocated to, 4
  ENSP ID: ENSP00000426462
AADCHLSRIVQATTLLTMDKYAPDDIPNINSTCFKLNSLQLQALLQNYHCAPDEPFIPTDLIENVVTVAENTADELARSDGREVQLEEDPDLQLPFLLPEDGYSCDVVRNIPNGLQEFLDPLCQRGFCRLIPHTRSPGTWTIYFEGADYESHLLRENTELASILRVP

SEQ ID NO: 54089 - protein, 1093 aa, Homo sapiens
  Payload ID: 10688
  Gene Symbol: MLLT6
  Gene Name: myeloid/lymphoid or mixed-lineage leukemia
  translocated to, 6
  ENSP ID: ENSP00000477969
MKEMVGGCCVCSDERGWAENPLVYCDGHACSVAVHQACYGIVQVPTGPWFCRKCESQERAARVRCELCPHKDGALKRTDNGGWAHVVCALYIPEVQFANVLTMEPIVLQYVPHDRFNKTCYICEEQGRESKAASGACMTCNRHGCRQAFHVTCAQMAGLLCEEEVLEVDNVKYCGYCKYHFSKMKTSRHSSGGGGGGAGGGGGSMGGGGSGFISGRRSRSASPSTQQEKHPTHHERGQKKSRKDKERLKQKHKKRPESPPSILTPPVVPTADKVSSSASSSSHHEASTQETSESSRESKGKKSSSHSLSHKGKKLSSGKGVSSFTSASSSSSSSSSSSGGPFQPAVSSLQSSPDFSAFPKLEQPEEDKYSKPTAPAPSAPPSPSAPEPPKADLFEQKVVFSGFGPIMRFSTTTSSSGRARAPSPGDYKSPHVTGSGASAGTHKRMPALSATPVPADETPETGLKEKKHKASKRSRHGPGRPKGSRNKEGTGGPAAPSLPSAQLAGFTATAASPFSGGSLVSSGLGGLSSRTFGPSGSLPSLSLESPLLGAGIYTSNKDPISHSGGMLRAVCSTPLSSSLLGPPGTSALPRLSRSPFTSTLPSSSASISTTQVFSLAGSTFSLPSTHIFGTPMGAVNPLLSQAESSHTEPDLEDCSFRCRGTSPQESLSSMSPISSLPALFDQTASAPCGGGQLDPAAPGTTNMEQLLEKQGDGEAGVNIVEMLKALHALQKENQRLQEQILSLTAKKERLQILNVQLSVPFPALPAALPAANGPVPGPYGLPPQAGSSDSLSTSKSPPGKSSLGLDNSLSTSSEDPHSGCPSRSSSSLSFHSTPPPLPLLQQSPATLPLALPGAPAPLPPQPQNGLGRAPGAAGLGAMPMAEGLLGGLAGSGGLPLNGLLGGLNGAAAPNPASLSQAGGAPTLQLPGCLNSLTEQQRHLLQQQEQQLQQLQQLLASPQLTPEHQTVVYQMIQQIQQKRELQRLQMAGGSQLPMASLLAGSSTPLLSAGTPGLLPTASAPPLLPAGALVAPSLGNNTSLMAAAAAAAAVAAAGGPPVLTAQTNPFLSLSGAEGSGGGPKGGTADKGASANQEKG

SEQ ID NO: 54090 - protein, 325 aa, Homo sapiens
  Payload ID: 10688
  Gene Symbol: MLLT6
  Gene Name: myeloid/lymphoid or mixed-lineage leukemia
  translocated to, 6
  ENSP ID: ENSP00000479605
MKEMVGGCCVCSDERGWAENPLVYCDGHACSVAVHQACYGIVQVPTGPWFCRKCESQERAARVRCELCPHKDGALKRTDNGGWAHVVCALYIPEVQFANVLTMEPIVLQYVPHDRFNKTCYICEEQGRESKAASGACMTCNRHGCRQAFHVTCAQMAGLLCEEEVLEVDNVKYCGYCKYHFSKMKTSRHSSGGGGGGAGGGGGSMGGGGSGFISGRRSRSASPSTQQEKHPTHHERGQKKSRKDKERLKQKHKKRPESPPSILTPPVVPTADKPRRGHQSPTNHGIGSLGCCLPDTPICLCPEGLSPGLLSAESGGRHSGLLSKF

SEQ ID NO: 54091 - protein, 302 aa, Homo sapiens
  Payload ID: 10688
  Gene Symbol: MLLT6
  Gene Name: myeloid/lymphoid or mixed-lineage leukemia
  translocated to, 6
  ENSP ID: ENSP00000479766
  MOD_RES (1)..(1): Any amino acid
XPAGIYTSNKDPISHSGGMLRAVCSTPLSSSLLGPPGTSALPRLSRSPFTSTLPSSSASISTTQVFSLAGSTFSLPSTHIFGTPMGAVNPLLSQAESSHTEPDLEDCSFRCRGTSPQESLSSMSPISSLPALFDQTASAPCGGGQLDPAAPGTTNMEQLLEKQGDGEAGVNIVEMLKALHALQKENQRLQEQILSLTAKKERLQILNVQLSVPFPALPAALPAANGPVPGPYGLPPQAGSSDSLSTSKSPPGKSSLGLDNSLSTSSEVGATRSGAGRRGRLKALLVPSLPRSYWRLGNEVTD

SEQ ID NO: 54092 - protein, 1093 aa, Homo sapiens; identical to SEQ ID NO: 54089
  Payload ID: 10688
  Gene Symbol: MLLT6
  Gene Name: myeloid/lymphoid or mixed-lineage leukemia
  translocated to, 6
  ENSP ID: ENSP00000479910

SEQ ID NO: 54093 - protein, 325 aa, Homo sapiens; identical to SEQ ID NO: 54090
  Payload ID: 10688
  Gene Symbol: MLLT6
  Gene Name: myeloid/lymphoid or mixed-lineage leukemia
  translocated to, 6
  ENSP ID: ENSP00000482928

SEQ ID NO: 54094 - protein, 302 aa, Homo sapiens; identical to SEQ ID NO: 54091
  Payload ID: 10688
  Gene Symbol: MLLT6
  Gene Name: myeloid/lymphoid or mixed-lineage leukemia
  translocated to, 6
  ENSP ID: ENSP00000487881
  MOD_RES (1)..(1): Any amino acid

SEQ ID NO: 54095 - protein, 322 aa, Homo sapiens
  Payload ID: 10689
  Gene Symbol: MYADM
  Gene Name: myeloid-associated differentiation marker
  Uniprot ID: Q96S97
  ENSP ID: ENSP00000337222
MPVTVTRTTITTTTTSSSGLGSPMIVGSPRALTQPLGLLRLLQLVSTCVAFSLVASVGAWTGSMGNWSMFTWCFCFSVTLIILIVELCGLQARFPLSWRNFPITFACYAALFCLSASIIYPTTYVQFLSHGRSRDHAIAATFFSCIACVAYATEVAWTRARPGEITGYMATVPGLLKVLETFVACIIFAFISDPNLYQHQPALEWCVAVYAICFILAAIAILLNLGECTNVLPIPFPSFLSGLALLSVLLYATALVLWPLYQFDEKYGGQPRRSRDVSCSRSHAYYVCAWDRRLAVAILTAINLLAYVADLVHSAHLVFVKV

SEQ ID NO: 54096 - protein, 322 aa, Homo sapiens; identical to SEQ ID NO: 54095
  Payload ID: 10689
  Gene Symbol: MYADM
  Gene Name: myeloid-associated differentiation marker
  Uniprot ID: Q96S97
  ENSP ID: ENSP00000375648

SEQ ID NO: 54097 - protein, 322 aa, Homo sapiens; identical to SEQ ID NO: 54095
  Payload ID: 10689
  Gene Symbol: MYADM
  Gene Name: myeloid-associated differentiation marker
  Uniprot ID: Q96S97
  ENSP ID: ENSP00000375649

SEQ ID NO: 54098 - protein, 322 aa, Homo sapiens; identical to SEQ ID NO: 54095
  Payload ID: 10689
  Gene Symbol: MYADM
  Gene Name: myeloid-associated differentiation marker
  Uniprot ID: Q96S97
  ENSP ID: ENSP00000375650

SEQ ID NO: 54099 - protein, 322 aa, Homo sapiens; identical to SEQ ID NO: 54095
  Payload ID: 10689
  Gene Symbol: MYADM
  Gene Name: myeloid-associated differentiation marker
  Uniprot ID: Q96S97
  ENSP ID: ENSP00000375651

SEQ ID NO: 54100 - protein, 242 aa, Homo sapiens
  Payload ID: 10689
  Gene Symbol: MYADM
  Gene Name: myeloid-associated differentiation marker
  ENSP ID: ENSP00000398269
MPVTVTRTTITTTTTSSSGLGSPMIVGSPRALTQPLGLLRLLQLVSTCVAFSLVASVGAWTGSMGNWSMFTWCFCFSVTLIILIVELCGLQARFPLSWRNFPITFACYAALFCLSASIIYPTTYVQFLSHGRSRDHAIAATFFSCIACVAYATEVAWTRARPGEITGYMATVPGLLKVLETFVACIIFAFISDPNLYQHQPALEWCVAVYAICFILAAIAILLNLGECTNVLPIPFPSFLSG

SEQ ID NO: 54101 - protein, 188 aa, Homo sapiens
  Payload ID: 10689
  Gene Symbol: MYADM
  Gene Name: myeloid-associated differentiation marker
  ENSP ID: ENSP00000399722
MPVTVTRTTITTTTTSSSGLGSPMIVGSPRALTQPLGLLRLLQLVSTCVAFSLVASVGAWTGSMGNWSMFTWCFCFSVTLIILIVELCGLQARFPLSWRNFPITFACYAALFCLSASIIYPTTYVQFLSHGRSRDHAIAATFFSCIACVAYATEVAWTRARPGEITGYMATVPGLLKVLETFVACIIF

SEQ ID NO: 54102 - protein, 146 aa, Homo sapiens
  Payload ID: 10689
  Gene Symbol: MYADM
  Gene Name: myeloid-associated differentiation marker
  ENSP ID: ENSP00000404958
MPVTVTRTTITTTTTSSSGLGSPMIVGSPRALTQPLGLLRLLQLVSTCVAFSLVASVGAWTGSMGNWSMFTWCFCFSVTLIILIVELCGLQARFPLSWRNFPITFACYAALFCLSASIIYPTTYVQFLSHGRSRDHAIAATFFSCI

SEQ ID NO: 54103 - protein, 259 aa, Homo sapiens
  Payload ID: 10689
  Gene Symbol: MYADM
  Gene Name: myeloid-associated differentiation marker
  ENSP ID: ENSP00000416919
MPVTVTRTTITTTTTSSSGLGSPMIVGSPRALTQPLGLLRLLQLVSTCVAFSLVASVGAWTGSMGNWSMFTWCFCFSVTLIILIVELCGLQARFPLSWRNFPITFACYAALFCLSASIIYPTTYVQFLSHGRSRDHAIAATFFSCIACVAYATEVAWTRARPGEITGYMATVPGLLKVLETFVACIIFAFISDPNLYQHQPALEWCVAVYAICFILAAIAILLNLGECTNVLPIPFPSFLSGLALLSVLLYATALVLWP

SEQ ID NO: 54104 - protein, 307 aa, Homo sapiens
  Payload ID: 10690
  Gene Symbol: MYADML2
  Gene Name: myeloid-associated differentiation marker-like 2
  Uniprot ID: A6NDP7
  ENSP ID: ENSP00000327718
MGSTMEPPGGAYLHLGAVTSPVGTARVLQLAFGCTTFSLVAHRGGFAGVQGTFCMAAWGFCFAVSALVVACEFTRLHGCLRLSWGNFTAAFAMLATLLCATAAVLYPLYFARRECSPEPAGCAARDFRLAASVFAGLLFLAYAVEVALTRARPGQVSSYMATVSGLLKIVQAFVACIIFGALVHDSRYGRYVATQWCVAVYSLCFLATVAVVALSVMGHTGGLGCPFDRLVVVYTFLAVLLYLSAAVIWPVFCFDPKYGEPKRPPNCARGSCPWDSQLVVAIFTYVNLLLYVVDLAYSQRIRFVPSL

SEQ ID NO: 54105 - protein, 307 aa, Homo sapiens; identical to SEQ ID NO: 54104
  Payload ID: 10690
  Gene Symbol: MYADML2
  Gene Name: myeloid-associated differentiation marker-like 2
  Uniprot ID: A6NDP7
  ENSP ID: ENSP00000386702

SEQ ID NO: 54106 - protein, 173 aa, Homo sapiens
  Payload ID: 10691
  Gene Symbol: MYDGF
  Gene Name: myeloid-derived growth factor
  Uniprot ID: Q969H8
  ENSP ID: ENSP00000262947
MAAPSGGWNGVGASLWAALLLGAVALRPAEAVSEPTTVAFDVRPGGVVHSFSHNVGPGDKYTCMFTYASQGGTNEQWQMSLGTSEDHQHFTCTIWRPQGKSYLYFTQFKAEVRGAEIEYAMAYSKAAFERESDVPLKTEEFEVTKTAVAHRPGAFKAELSKLVIVAKASRTEL

SEQ ID NO: 54107 - protein, 84 aa, Homo sapiens
  Payload ID: 10691
  Gene Symbol: MYDGF
  Gene Name: myeloid-derived growth factor
  ENSP ID: ENSP00000469136
  MOD_RES (1)..(1): Any amino acid
XHQHFTCTIWRPQGKSYLYFTQFKAEVRGAEIEYAMAYSKAAFERESDVPLKTEEFEVTKTAVISAPQEKGDDQPHWTDGETEA

SEQ ID NO: 54108 - protein, 189 aa, Homo sapiens
  Payload ID: 10691
  Gene Symbol: MYDGF
  Gene Name: myeloid-derived growth factor
  ENSP ID: ENSP00000469945
MAAPSGGWNGVGASLWAALLLGAVALRPAEAVSEPTTVAFDVRPGGVVHSFSHNVGPGDKYTCMFTYASQGGTNEQWQMSLGTSEDHQHFTCTIWRPQGKSYLYFTQFKAEVRGAEIEYAMAYSKAAFERESDVPLKTEEFEVTKTAGTERWGWGRGDATPIQGWAIGAVWRGGSAIGVLETVDQASTN

SEQ ID NO: 54109 - protein, 313 aa, Homo sapiens
  Payload ID: 10692
  Gene Symbol: MYEOV
  Gene Name: myeloma overexpressed
  Uniprot ID: Q96EZ4
  ENSP ID: ENSP00000308330
MALRICVTYTPALPIGLCTRCCLCLEQSPSWCHCLRGVSFLTFHLHQSVPLGDRDSLLMFTRQAGHFVEGSKAGRSRGRLCLSQALRVAVRGAFVSLWFAAGAGDRERNKGDKGAQTGAGLSQEAEDVDVSRARRVTDAPQGTLCGTGNRNSGSQSARVVGVAHLGEAFRVGVEQAISSCPEEVHGRHGLSMEIMWARMDVALRSPGRGLLAGAGALCMTLAESSCPDYERGRRACLTLHRHPTPHCSTWGLPLRVAGSWLTVVTVEALGGWRMGVRRTGQVGPTMHPPPVSGASPLLLHHLLLLLLIIILTC

SEQ ID NO: 54110 - protein, 313 aa, Homo sapiens; identical to SEQ ID NO: 54109
  Payload ID: 10692
  Gene Symbol: MYEOV
  Gene Name: myeloma overexpressed
  Uniprot ID: Q96EZ4
  ENSP ID: ENSP00000412482

SEQ ID NO: 54111 - protein, 255 aa, Homo sapiens
  Payload ID: 10692
  Gene Symbol: MYEOV
  Gene Name: myeloma overexpressed
  ENSP ID: ENSP00000438100
MFTRQAGHFVEGSKAGRSRGRLCLSQALRVAVRGAFVSLWFAAGAGDRERNKGDKGAQTGAGLSQEAEDVDVSRARRVTDAPQGTLCGTGNRNSGSQSARVVGVAHLGEAFRVGVEQAISSCPEEVHGRHGLSMEIMWARMDVALRSPGRGLLAGAGALCMTLAESSCPDYERGRRACLTLHRHPTPHCSTWGLPLRVAGSWLTVVTVEALGGWRMGVRRTGQVGPTMHPPPVSGASPLLLHHLLLLLLIIILTC

SEQ ID NO: 54112 - protein, 252 aa, Homo sapiens
  Payload ID: 10693
  Gene Symbol: MYEOV2
  Gene Name: myeloma overexpressed 2
  Uniprot ID: Q8WXC6
  ENSP ID: ENSP00000304147
MWRAPEAALRPEVSLERRGPEMKPAVDEMFPEGAGPYVDLDEVARARRESPSAGGSTGLLMDLAANEKAVHADFFNDFEDLFDDDDIHSSGLPRTSQQSSMVPALQRGQSEHGVRGKAAERPVVSEERCELNGREVAALDRAFGSTGHGQGAEALMFTRCREHPLCGTNKATSEGKMGTGRLRNSLRKNQSKWLGSYLEVLRTTRSRREVSEDSTISVSTHWRGKCFKSDETPSVAGGEEGKKTTQPCIDVR

SEQ ID NO: 54113 - protein, 49 aa, Homo sapiens
  Payload ID: 10693
  Gene Symbol: MYEOV2
  Gene Name: myeloma overexpressed 2
  ENSP ID: ENSP00000383946
MWRAPEAALRPEVSLERRGPEMKPAVDEMFPEGAGPYVDLDEAGGSTGL

SEQ ID NO: 54114 - protein, 57 aa, Homo sapiens
  Payload ID: 10693
  Gene Symbol: MYEOV2
  Gene Name: myeloma overexpressed 2
  Uniprot ID: Q8WXC6
  ENSP ID: ENSP00000475979
MKPAVDEMFPEGAGPYVDLDEAGGSTGLLMDLAANEKAVHADFFNDFEDLFDDDDIQ

SEQ ID NO: 54115 - protein, 745 aa, Homo sapiens
  Payload ID: 10694
  Gene Symbol: MPO
  Gene Name: myeloperoxidase
  Uniprot ID: P05164
  ENSP ID: ENSP00000225275
MGVPFFSSLRCMVDLGPCWAGGLTAEMKLLLALAGLLAILATPQPSEGAAPAVLGEVDTSLVLSSMEEAKQLVDKAYKERRESIKQRLRSGSASPMELLSYFKQPVAATRTAVRAADYLHVALDLLERKLRSLWRRPFNVTDVLTPAQLNVLSKSSGCAYQDVGVTCPEQDKYRTITGMCNNRRSPTLGASNRAFVRWLPAEYEDGFSLPYGWTPGVKRNGFPVALARAVSNEIVRFPTDQLTPDQERSLMFMQWGQLLDHDLDFTPEPAARASFVTGVNCETSCVQQPPCFPLKIPPNDPRIKNQADCIPFFRSCPACPGSNITIRNQINALTSFVDASMVYGSEEPLARNLRNMSNQLGLLAVNQRFQDNGRALLPFDNLHDDPCLLTNRSARIPCFLAGDTRSSEMPELTSMHTLLLREHNRLATELKSLNPRWDGERLYQEARKIVGAMVQIITYRDYLPLVLGPTAMRKYLPTYRSYNDSVDPRIANVFTNAFRYGHTLIQPFMFRLDNRYQPMEPNPRVPLSRVFFASWRVVLEGGIDPILRGLMATPAKLNRQNQIAVDEIRERLFEQVMRIGLDLPALNMQRSRDHGLPGYNAWRRFCGLPQPETVGQLGTVLRNLKLARKLMEQYGTPNNIDIWMGGVSEPLKRKGRVGPLLACIIGTQFRKLRDGDRFWWENEGVFSMQQRQALAQISLPRIICDNTGITTVSKNNIFMSNSYPRDFVNCSTLPALNLASWREAS

SEQ ID NO: 54116 - protein, 86 aa, Homo sapiens
  Payload ID: 10694
  Gene Symbol: MPO
  Gene Name: myeloperoxidase
  ENSP ID: ENSP00000464668
RYQPMEPNPRVPLSRVFFASWRVVLEGGIDPILRGLMATPAKLNRQNQIAVDEIRERLFEQISLPRIICDNTGITTVSKNNIFMSN

SEQ ID NO: 54117 - protein, 1858 aa, Homo sapiens
  Payload ID: 10695
  Gene Symbol:
  Gene Name: MYO16
  ENSP ID: ENSP00000488918
MEIDQCLLESLPLGQRQRLVKRMRCEQIKAYYEREKAFQKQEGFLKRLKHAKNPKVHFNLTDMLQDAIIHHNDKEVLRLLKEGADPHTLVSSGGSLLHLCARYDNAFIAEILIDRGVNVNHQDEDFWTPMHIACACDNPDIVLLLVLAGANVLLQDVNGNIPLDYAVEGTESSSILLTYLDENGVDLTSLRQMKLQRPMSMLTDVKHFLSSGGNVNEKNDEGVTLLHMACASGYKEVVSLILEHGGDLNIVDDQYWTPLHLAAKYGQTNLVKLLLMHQANPHLVNCNEEKASDIAASEFIEEMLLKAEIAWEEKMKEPLSASTLAQEEPYEEIIHDLPVLSSKLSPLVLPIAKQDSLLEKDIMFKDATKGLCKQQSQDSIPENPMMSGSTKPEQVKLMPPAPNDDLATLSELNDGSLLYEIQKRFGNNQIYTFIGDILLLVNPYKELPIYSSMVSQLYFSSSGKLCSSLPPHLFSCVERAFHQLFREQRPQCFILSGERGSGKSEASKQIIRHLTCRAGASRATLDSRFKHVVCILEAFGHAKTTLNDLSSCFIKYFELQFCERKQQLTGARIYTYLLEKSRLVSQPLGQSNFLIFYLLMDGLSAEEKYGLHLNNLCAHRYLNQTIQDDASTGERSLNREKLAVLKRALNVVGFSSLEVENLFVILAAILHLGDIRFTALNEGNSAFVSDLQLLEQVAGMLQVSTDELASALTTDIQYFKGDMIIRRHTIQIAEFFRDLLAKSLYSRLFSFLVNTMNSCLHSQDEQKSMQTLDIGILDIFGFEEFQKNEFEQLCVNMTNEKMHHYINEVLFLHEQVECVQEGVTMETAYSPGNQNGVLDFFFQKPSGFLTLLDEESQMIWSVESNFPKKLQSLLESSNTNAVYSPMKDGNGNVALKDHGTAFTIMHYAGRVMYDVVGAIEKNKDSLSQNLLFVMKTSENVVINHLFQSKLSQTGSLVSAYPSFKFRGHKSALLSKKMTASSIIGENKNYLELSKLLKKKGTSTFLQRLERGDPVTIASQLRKSLMDIIGKLQKCTPHFIHCIRPNNSKLPDTFDNFYVSAQLQYIGVLEMVKIFRYGYPVRLSFSDFLSRYKPLADTFLREKKEQSAAERCRLVLQQCKLQGWQMGVRKVFLKYWHADQLNDLCLQLQRKIITCQKVIRGFLARQHLLQRISIRQQEVTSINSFLQNTEDMGLKTYDALVIQNASDIARENDRLRSEMNAPYHKEKLEVRNMQEEGSKRTDDKSGPRHFHPSSMSVCAAVDGLGQCLVGPSIWSPSLHSVFSMDDSSSLPSPRKQPPPKPKRDPNTRLSASYEAVSACLSAAREAANEALARPRPHSDDYSTMKKIPPRKPKRSPNTKLSGSYEEISGSRPGDARPAGAPGAAARVLTPGTPQCALPPAAPPGDEDDSEPVYIEMLGHAARPDSPDPGESVYEEMKCCLPDDGGPGAGSFLLHGASPPLLHRAPEDEAAGPPGDACDIPPPFPNLLPHRPPLLVFPPTPVTCSPASDESPLTPLEVKKLPVLETNLKYPVQPEGSSPLSPQYSKSQKGDGDRPASPGLALFNGSGRASPPSTPPPPPPPPGPPPAPYRPCAHLAFPPEPAPVNAGKAGPSAEAPKVHPKPNSAPVAGPCSSFPKIPYSPVKATRADARKAGSSASPPAPYSPPSSRPLSSPLDELASLFNSGRSVLRKSAAGRKIREAEGFETNMNISSRDDPSTSEITSETQDRNANNHGIQLSNSLSSAITAENGNSISNGLPEEDGYSRLSISGTGTSTFQRHRDSHTTQVIHQLRLSENESVALQELLDWRRKLCEEGQDWQQILHHAEPRVPPPPPCKKPSLLKKPEGASCNRLPSELWDTTI

SEQ ID NO: 54118 - protein, 1880 aa, Homo sapiens
  Payload ID: 10695
  Gene Symbol:
  Gene Name: MYO16
  ENSP ID: ENSP00000488923
MSHYHFIKCCCFQLCNVFRSHEMEIDQCLLESLPLGQRQRLVKRMRCEQIKAYYEREKAFQKQEGFLKRLKHAKNPKVHFNLTDMLQDAIIHHNDKEVLRLLKEGADPHTLVSSGGSLLHLCARYDNAFIAEILIDRGVNVNHQDEDFWTPMHIACACDNPDIVLLLVLAGANVLLQDVNGNIPLDYAVEGTESSSILLTYLDENGVDLTSLRQMKLQRPMSMLTDVKHFLSSGGNVNEKNDEGVTLLHMACASGYKEVVSLILEHGGDLNIVDDQYWTPLHLAAKYGQTNLVKLLLMHQANPHLVNCNEEKASDIAASEFIEEMLLKAEIAWEEKMKEPLSASTLAQEEPYEEIIHDLPVLSSKLSPLVLPIAKQDSLLEKDIMFKDATKGLCKQQSQDSIPENPMMSGSTKPEQVKLMPPAPNDDLATLSELNDGSLLYEIQKRFGNNQIYTFIGDILLLVNPYKELPIYSSMVSQLYFSSSGKLCSSLPPHLFSCVERAFHQLFREQRPQCFILSGERGSGKSEASKQIIRHLTCRAGASRATLDSRFKHVVCILEAFGHAKTTLNDLSSCFIKYFELQFCERKQQLTGARIYTYLLEKSRLVSQPLGQSNFLIFYLLMDGLSAEEKYGLHLNNLCAHRYLNQTIQDDASTGERSLNREKLAVLKRALNVVGFSSLEVENLFVILAAILHLGDIRFTALNEGNSAFVSDLQLLEQVAGMLQVSTDELASALTTDIQYFKGDMIIRRHTIQIAEFFRDLLAKSLYSRLFSFLVNTMNSCLHSQDEQKSMQTLDIGILDIFGFEEFQKNEFEQLCVNMTNEKMHHYINEVLFLHEQVECVQEGVTMETAYSPGNQNGVLDFFFQKPSGFLTLLDEESQMIWSVESNFPKKLQSLLESSNTNAVYSPMKDGNGNVALKDHGTAFTIMHYAGRVMYDVVGAIEKNKDSLSQNLLFVMKTSENVVINHLFQSKLSQTGSLVSAYPSFKFRGHKSALLSKKMTASSIIGENKNYLELSKLLKKKGTSTFLQRLERGDPVTIASQLRKSLMDIIGKLQKCTPHFIHCIRPNNSKLPDTFDNFYVSAQLQYIGVLEMVKIFRYGYPVRLSFSDFLSRYKPLADTFLREKKEQSAAERCRLVLQQCKLQGWQMGVRKVFLKYWHADQLNDLCLQLQRKIITCQKVIRGFLARQHLLQRISIRQQEVTSINSFLQNTEDMGLKTYDALVIQNASDIARENDRLRSEMNAPYHKEKLEVRNMQEEGSKRTDDKSGPRHFHPSSMSVCAAVDGLGQCLVGPSIWSPSLHSVFSMDDSSSLPSPRKQPPPKPKRDPNTRLSASYEAVSACLSAAREAANEALARPRPHSDDYSTMKKIPPRKPKRSPNTKLSGSYEEISGSRPGDARPAGAPGAAARVLTPGTPQCALPPAAPPGDEDDSEPVYIEMLGHAARPDSPDPGESVYEEMKCCLPDDGGPGAGSFLLHGASPPLLHRAPEDEAAGPPGDACDIPPPFPNLLPHRPPLLVFPPTPVTCSPASDESPLTPLEVKKLPVLETNLKYPVQPEGSSPLSPQYSKSQKGDGDRPASPGLALFNGSGRASPPSTPPPPPPPPGPPPAPYRPCAHLAFPPEPAPVNAGKAGPSAEAPKVHPKPNSAPVAGPCSSFPKIPYSPVKATRADARKAGSSASPPAPYSPPSSRPLSSPLDELASLFNSGRSVLRKSAAGRKIREAEGFETNMNISSRDDPSTSEITSETQDRNANNHGIQLSNSLSSAITAENGNSISNGLPEEDGYSRLSISGTGTSTFQRHRDSHTTQVIHQLRLSENESVALQELLDWRRKLCEEGQDWQQILHHAEPRVPPPPPCKKPSLLKKPEGASCNRLPSELWDTTI

SEQ ID NO: 54119 - protein, 940 aa, Homo sapiens
  Payload ID: 10695
  Gene Symbol:
  Gene Name: MYO16
  ENSP ID: ENSP00000489279
MEIDQCLLESLPLGQRQRLVKRMRCEQIKAYYEREKAFQKQEGFLKRLKHAKNPKVHFNLTDMLQDAIIHHNDKEVLRLLKEGADPHTLVSSGGSLLHLCARYDNAFIAEILIDRGVNVNHQDEDFWTPMHIACACDNPDIVLLLVLAGANVLLQDVNGNIPLDYAVEGTESSSILLTYLDENGVDLTSLRQMKLQRPMSMLTDVKHFLSSGGNVNEKNDEGVTLLHMACASGYKEVVSLILEHGGDLNIVDDQYWTPLHLAAKYGQTNLVKLLLMHQANPHLVNCNEEKASDIAASEFIEEMLLKAEIAWEEKMKEPLSASTLAQEEPYEEIIHDLPVLSSKLSPLVLPIAKQDSLLEKDIMFKDATKGLCKQQSQDSIPENPMMSGSTKPEQVKLMPPAPNDDLATLSELNDGSLLYEIQKRFGNNQIYTFIGDILLLVNPYKELPIYSSMVSQLYFSSSGKLCSSLPPHLFSCVERAFHQLFREQRPQCFILSGERGSGKSEASKQIIRHLTCRAGASRATLDSRFKHVVCILEAFGHAKTTLNDLSSCFIKYFELQFCERKQQLTGARIYTYLLEKSRLVSQPLGQSNFLIFYLLMDGLSAEEKYGLHLNNLCAHRYLNQTIQDDASTGERSLNREKLAVLKRALNVVGFSSLEVENLFVILAAILHLGDIRFTALNEGNSAFVSDLQLLEQVAGMLQVSTDELASALTTDIQYFKGDMIIRRHTIQIAEFFRDLLAKSLYSRLFSFLVNTMNSCLHSQDEQKSMQTLDIGILDIFGFEEFQKNEFEQLCVNMTNEKMHHYINEVLFLHEQVECVQEGVTMETAYSPGNQNGVLDFFFQKPSGFLTLLDEESQMIWSVESNFPKKLQSLLESSNTNAVYSPMKDGNGNVALKDHGTAFTIMHYAGRVMYDVVGAIEKNKDSLSQNLLFVMKRGRCF

SEQ ID NO: 54120 - protein, 1858 aa, Homo sapiens; identical to SEQ ID NO: 54117
  Payload ID: 10695
  Gene Symbol:
  Gene Name: MYO16
  ENSP ID: ENSP00000489329

SEQ ID NO: 54121 - protein, 466 aa, Homo sapiens; identical to SEQ ID NO: 36341
  Payload ID: 10696
  Gene Symbol: MYZAP
  Gene Name: myocardial zonula adherens protein
  Uniprot ID: P0CAP1
  ENSP ID: ENSP00000267853

SEQ ID NO: 54122 - protein, 438 aa, Homo sapiens; identical to SEQ ID NO: 36347
  Payload ID: 10696
  Gene Symbol: MYZAP
  Gene Name: myocardial zonula adherens protein
  Uniprot ID: P0CAP1
  ENSP ID: ENSP00000369939

SEQ ID NO: 54123 - protein, 122 aa, Homo sapiens
  Payload ID: 10696
  Gene Symbol: MYZAP
  Gene Name: myocardial zonula adherens protein
  ENSP ID: ENSP00000431396
QAAEISLEEKDQRIGELDRLIERMEKERHQLQLQLLEHETEMSGELTDSDKERYQQLEEASASLRERIRHLDDMVHCQQKKVKQMVEEIESLKKKLQQKQLLILQLLEKISFLEGEPNRQDS

SEQ ID NO: 54124 - protein, 132 aa, Homo sapiens
  Payload ID: 10696
  Gene Symbol: MYZAP
  Gene Name: myocardial zonula adherens protein
  ENSP ID: ENSP00000457126
MEISLVKCSEANVCRLRLTVPPESPVPEQCEKKIERKEQLLDLSNGEPTRKLPQGVVYGVVRRSDQNQQKEMVVYGWSTSQLKEEMNYIKDVRATLEKVRKRMYGDYDEMRQKIRQLTQELSVSHAQQEYLE

SEQ ID NO: 54125 - protein, 938 aa, Homo sapiens
  Payload ID: 10697
  Gene Symbol: MYOCD
  Gene Name: myocardin
  Uniprot ID: Q8IZQ8
  ENSP ID: ENSP00000341835
MTLLGSEHSLLIRSKFRSVLQLRLQQRRTQEQLANQGIIPPLKRPAEFHEQRKHLDSDKAKNSLKRKARNRCNSADLVNMHILQASTAERSIPTAQMKLKRARLADDLNEKIALRPGPLELVEKNILPVDSAVKEAIKGNQVSFSKSTDAFAFEEDSSSDGLSPDQTRSEDPQNSAGSPPDAKASDTPSTGSLGTNQDLASGSENDRNDSASQPSHQSDAGKQGLGPPSTPIAVHAAVKSKSLGDSKNRHKKPKDPKPKVKKLKYHQYIPPDQKAEKSPPPMDSAYARLLQQQQLFLQLQILSQQQQQQQHRFSYLGMHQAQLKEPNEQMVRNPNSSSTPLSNTPLSPVKNSFSGQTGVSSFKPGPLPPNLDDLKVSELRQQLRIRGLPVSGTKTALMDRLRPFQDCSGNPVPNFGDITTVTFPVTPNTLPNYQSSSSTSALSNGFYHFGSTSSSPPISPASSDLSVAGSLPDTFNDASPSFGLHPSPVHVCTEESLMSSLNGGSVPSELDGLDSEKDKMLVEKQKVINELTWKLQQEQRQVEELRMQLQKQKRNNCSEKKPLPFLAASIKQEEAVSSCPFASQVPVKRQSSSSECHPPACEAAQLQPLGNAHCVESSDQTNVLSSTFLSPQCSPQHSPLGAVKSPQHISLPPSPNNPHFLPSSSGAQGEGHRVSSPISSQVCTAQMAGLHSSDKVGPKFSIPSPTFSKSSSAISEVTQPPSYEDAVKQQMTRSQQMDELLDVLIESGEMPADAREDHSCLQKVPKIPRSSRSPTAVLTKPSASFEQASSGSQIPFDPYATDSDEHLEVLLNSQSPLGKMSDVTLLKIGSEEPHFDGIMDGFSGKAAEDLFNAHEILPGPLSPMQTQFSPSSVDSNGLQLSFTESPWETMEWLDLTPPNSTPGFSALTTSSPSIFNIDFLDVTDLNLNSSMDLHLQQW

SEQ ID NO: 54126 - protein, 648 aa, Homo sapiens
  Payload ID: 10697
  Gene Symbol: MYOCD
  Gene Name: myocardin
  ENSP ID: ENSP00000400148
FLQLQILSQQQQQQQHRFSYLGMHQAQLKEPNEQMVRNPNSSSTPLSNTPLSPVKNSFSGQTGVSSFKPGPLPPNLDDLKVSELRQQLRIRGLPVSGTKTALMDRLRPFQDCSGNPVPNFGDITTVTFPVTPNTLPNYQSSSSTSALSNGFYHFGSTSSSPPISPASSDLSVAGSLPDTFNDASPSFGLHPSPVHVCTEESLMSSLNGGSVPSELDGLDSEKDKMLVEKQKVINELTWKLQQEQRQVEELRMQLQKQKRNNCSEKKPLPFLAASIKQEEAVSSCPFASQVPVKRQSSSSECHPPACEAAQLQPLGNAHCVESSDQTNVLSSTFLSPQCSPQHSPLGAVKSPQHISLPPSPNNPHFLPSSSGAQGEGHRVSSPISSQVCTAQNSGAHDGHPPSFSPHSSSLHPPFSGAQADSSHGAGGNPCPKSPCVQQKQMTRSQQMDELLDVLIESGEMPADAREDHSCLQKVPKIPRSSRSPTAVLTKPSASFEQASSGSQIPFDPYATDSDEHLEVLLNSQSPLGKMSDVTLLKIGSEEPHFDGIMDGFSGKAAEDLFNAHEILPGPLSPMQTQFSPSSVDSNGLQLSFTESPWETMEWLDLTPPNSTPGFSALTTSSPSIFNIDFLDVTDLNLNSSMDLHLQQW

SEQ ID NO: 54127 - protein, 986 aa, Homo sapiens
  Payload ID: 10697
  Gene Symbol: MYOCD
  Gene Name: myocardin
  Uniprot ID: Q8IZQ8
  ENSP ID: ENSP00000401678
MTLLGSEHSLLIRSKFRSVLQLRLQQRRTQEQLANQGIIPPLKRPAEFHEQRKHLDSDKAKNSLKRKARNRCNSADLVNMHILQASTAERSIPTAQMKLKRARLADDLNEKIALRPGPLELVEKNILPVDSAVKEAIKGNQVSFSKSTDAFAFEEDSSSDGLSPDQTRSEDPQNSAGSPPDAKASDTPSTGSLGTNQDLASGSENDRNDSASQPSHQSDAGKQGLGPPSTPIAVHAAVKSKSLGDSKNRHKKPKDPKPKVKKLKYHQYIPPDQKAEKSPPPMDSAYARLLQQQQLFLQLQILSQQQQQQQHRFSYLGMHQAQLKEPNEQMVRNPNSSSTPLSNTPLSPVKNSFSGQTGVSSFKPGPLPPNLDDLKVSELRQQLRIRGLPVSGTKTALMDRLRPFQDCSGNPVPNFGDITTVTFPVTPNTLPNYQSSSSTSALSNGFYHFGSTSSSPPISPASSDLSVAGSLPDTFNDASPSFGLHPSPVHVCTEESLMSSLNGGSVPSELDGLDSEKDKMLVEKQKVINELTWKLQQEQRQVEELRMQLQKQKRNNCSEKKPLPFLAASIKQEEAVSSCPFASQVPVKRQSSSSECHPPACEAAQLQPLGNAHCVESSDQTNVLSSTFLSPQCSPQHSPLGAVKSPQHISLPPSPNNPHFLPSSSGAQGEGHRVSSPISSQVCTAQNSGAHDGHPPSFSPHSSSLHPPFSGAQADSSHGAGGNPCPKSPCVQQKMAGLHSSDKVGPKFSIPSPTFSKSSSAISEVTQPPSYEDAVKQQMTRSQQMDELLDVLIESGEMPADAREDHSCLQKVPKIPRSSRSPTAVLTKPSASFEQASSGSQIPFDPYATDSDEHLEVLLNSQSPLGKMSDVTLLKIGSEEPHFDGIMDGFSGKAAEDLFNAHEILPGPLSPMQTQFSPSSVDSNGLQLSFTESPWETMEWLDLTPPNSTPGFSALTTSSPSIFNIDFLDVTDLNLNSSMDLHLQQW

SEQ ID NO: 54128 - protein, 41 aa, Homo sapiens
  Payload ID: 10697
  Gene Symbol: MYOCD
  Gene Name: myocardin
  ENSP ID: ENSP00000462694
MTLLGSEHSLLIRSKFRSVLQLRLQQRRTQEQLANQGIIPH

SEQ ID NO: 54129 - protein, 504 aa, Homo sapiens
  Payload ID: 10698
  Gene Symbol: MYOC
  Gene Name: myocilin, trabecular meshwork inducible glucocorticoid response
  Uniprot ID: Q99972
  ENSP ID: ENSP00000037502
MRFFCARCCSFGPEMPAVQLLLLACLVWDVGARTAQLRKANDQSGRCQYTFSVASPNESSCPEQSQAMSVIHNLQRDSSTQRLDLEATKARLSSLESLLHQLTLDQAARPQETQEGLQRELGTLRRERDQLETQTRELETAYSNLLRDKSVLEEEKKRLRQENENLARRLESSSQEVARLRRGQCPQTRDTARAVPPGSREVSTWNLDTLAFQELKSELTEVPASRILKESPSGYLRSGEGDTGCGELVWVGEPLTLRTAETITGKYGVWMRDPKPTYPYTQETTWRIDTVGTDVRQVFEYDLISQFMQGYPSKVHILPRPLESTGAVVYSGSLYFQGAESRTVIRYELNTETVKAEKEIPGAGYHGQFPYSWGGYTDIDLAVDEAGLWVIYSTDEAKGAIVLSKLNPENLELEQTWETNIRKQSVANAFIICGTLYTVSSYTSADATVNFAYDTGTGISKTLTIPFKNRYKYSSMIDYNPLEKKLFAWDNLNMVTYDIKLSKM

SEQ ID NO: 54130 - protein, 344 aa, Homo sapiens
  Payload ID: 10698
  Gene Symbol: MYOC
  Gene Name: myocilin, trabecular meshwork inducible glucocorticoid response
  ENSP ID: ENSP00000478680
MRFFCARCCSFGPEMPAVQLLLLACLVWDVGARTAQLRKANDQSGRCQYTFSVASPNESSCPEQSQAMSVIHNLQRDSSTQRLDLEATKARLSSLESLLHQLTLDQAARPQETQEGLQRELGTLRRERDQLETQTRELETAYSNLLRDKSVLEEEKKRLRQENENLARRLESSSQEVARLRRGQCPQTRDTARAVPPGSREVSTWNLDTLAFQELKSELTEVPASRILKESPSGYLRSGEGDTGCGELVWVGEPLTLRTAETITGKYGVWMRDPKPTYPYTQETTWRIDTVGTDVRQVFEYDLISQFMQGYPSKVHILPRPLESTGAVVYSGSLYFRALSPELS

SEQ ID NO: 54131 - protein, 497 aa, Homo sapiens
  Payload ID: 10699
  Gene Symbol: MEF2A
  Gene Name: myocyte enhancer factor 2A
  Uniprot ID: Q02078
  ENSP ID: ENSP00000337202
MGRKKIQITRIMDERNRQVTFTKRKFGLMKKAYELSVLCDCEIALIIFNSSNKLFQYASTDMDKVLLKYTEYNEPHESRTNSDIVETLRKKGLNGCESPDADDYFEHSPLSEDRFSKLNEDSDFIFKRGPPGLPPQNFSMSVTVPVTSPNALSYTNPGSSLVSPSLAASSTLTDSSMLSPPQTTLHRNVSPGAPQRPPSTGNAGGMLSTTDLTVPNGAGSSPVGNGFVNSRASPNLIGATGANSLGKVMPTKSPPPPGGGNLGMNSRKPDLRVVIPPSSKGMMPPLNTQRISSSQATQPLATPVVSVTTPSLPPQGLVYSAMPTAYNTDYSLTSADLSALQGFNSPGMLSLGQVSAWQQHHLGQAALSSLVAGGQLSQGSNLSINTNQNISIKSEPISPPRDRMTPSGFQQQQQQQQQQQPPPPPQPQPQPPQPQPRQEMGRSPVDSLSSSSSSYDGSDREDPRGDFHSPIVLGRPPNTEDRESPSVKRMRMDAWVT

SEQ ID NO: 54132 - protein, 499 aa, Homo sapiens
  Payload ID: 10699
  Gene Symbol: MEF2A
  Gene Name: myocyte enhancer factor 2A
  Uniprot ID: Q02078
  ENSP ID: ENSP00000346389
MGRKKIQITRIMDERNRQVTFTKRKFGLMKKAYELSVLCDCEIALIIFNSSNKLFQYASTDMDKVLLKYTEYNEPHESRTNSDIVEALNKKEHRGCDSPDPDTSYVLTPHTEEKYKKINEEFDNMMRNHKIAPGLPPQNFSMSVTVPVTSPNALSYTNPGSSLVSPSLAASSTLTDSSMLSPPQTTLHRNVSPGAPQRPPSTGNAGGMLSTTDLTVPNGAGSSPVGNGFVNSRASPNLIGATGANSLGKVMPTKSPPPPGGGNLGMNSRKPDLRVVIPPSSKGMMPPLNTQRISSSQATQPLATPVVSVTTPSLPPQGLVYSAMPTAYNTDYSLTSADLSALQGFNSPGMLSLGQVSAWQQHHLGQAALSSLVAGGQLSQGSNLSINTNQNISIKSEPISPPRDRMTPSGFQQQQQQQQQQQPPPPPQPQPQPPQPQPRQEMGRSPVDSLSSSSSSYDGSDREDPRGDFHSPIVLGRPPNTEDRESPSVKRMRMDAWVT

SEQ ID NO: 54133 - protein, 429 aa, Homo sapiens
  Payload ID: 10699
  Gene Symbol: MEF2A
  Gene Name: myocyte enhancer factor 2A
  Uniprot ID: Q02078
  ENSP ID: ENSP00000399460
MGRKKIQITRIMDERNRQTLRKKGLNGCESPDADDYFEHSPLSEDRFSKLNEDSDFIFKRGPPGLPPQNFSMSVTVPVTSPNALSYTNPGSSLVSPSLAASSTLTDSSMLSPPQTTLHRNVSPGAPQRPPSTGNAGGMLSTTDLTVPNGAGSSPVGNGFVNSRASPNLIGATGANSLGKVMPTKSPPPPGGGNLGMNSRKPDLRVVIPPSSKGMMPPLNTQRISSSQATQPLATPVVSVTTPSLPPQGLVYSAMPTAYNTDYSLTSADLSALQGFNSPGMLSLGQVSAWQQHHLGQAALSSLVAGGQLSQGSNLSINTNQNISIKSEPISPPRDRMTPSGFQQQQQQQQQQQPPPPPQPQPQPPQPQPRQEMGRSPVDSLSSSSSSYDGSDREDPRGDFHSPIVLGRPPNTEDRESPSVKRMRMDAWVT

SEQ ID NO: 54134 - protein, 77 aa, Homo sapiens
  Payload ID: 10699
  Gene Symbol: MEF2A
  Gene Name: myocyte enhancer factor 2A
  ENSP ID: ENSP00000452989
MGRKKIQITRIMDERNRQVTFTKRKFGLMKKAYELSVLCDCEIALIIFNSSNKLFQYASTDMDKVLLKYTEYNEPHE

SEQ ID NO: 54135 - protein, 505 aa, Homo sapiens
  Payload ID: 10699
  Gene Symbol: MEF2A
  Gene Name: myocyte enhancer factor 2A
  Uniprot ID: Q02078
  ENSP ID: ENSP00000453095
MGRKKIQITRIMDERNRQVTFTKRKFGLMKKAYELSVLCDCEIALIIFNSSNKLFQYASTDMDKVLLKYTEYNEPHESRTNSDIVETLRKKGLNGCESPDADDYFEHSPLSEDRFSKLNEDSDFIFKRGPPGLPPQNFSMSVTVPVTSPNALSYTNPGSSLVSPSLAASSTLTDSSMLSPPQTTLHRNVSPGAPQRPPSTGNAGGMLSTTDLTVPNGAGSSPVGNGFVNSRASPNLIGATGANSLGKVMPTKSPPPPGGGNLGMNSRKPDLRVVIPPSSKGMMPPLSEEEELELNTQRISSSQATQPLATPVVSVTTPSLPPQGLVYSAMPTAYNTDYSLTSADLSALQGFNSPGMLSLGQVSAWQQHHLGQAALSSLVAGGQLSQGSNLSINTNQNISIKSEPISPPRDRMTPSGFQQQQQQQQQQQPPPPPQPQPQPPQPQPRQEMGRSPVDSLSSSSSSYDGSDREDPRGDFHSPIVLGRPPNTEDRESPSVKRMRMDAWVT

SEQ ID NO: 54136 - protein, 497 aa, Homo sapiens; identical to SEQ ID NO: 54131
  Payload ID: 10699
  Gene Symbol: MEF2A
  Gene Name: myocyte enhancer factor 2A
  Uniprot ID: Q02078
  ENSP ID: ENSP00000453441

SEQ ID NO: 54137 - protein, 85 aa, Homo sapiens
  Payload ID: 10699
  Gene Symbol: MEF2A
  Gene Name: myocyte enhancer factor 2A
  ENSP ID: ENSP00000453478
MGRKKIQITRIMDERNRQVTFTKRKFGLMKKAYELSVLCDCEIALIIFNSSNKLFQYASTDMDKVLLKYTEYNEPHESRTNSDIV

SEQ ID NO: 54138 - protein, 38 aa, Homo sapiens
  Payload ID: 10699
  Gene Symbol: MEF2A
  Gene Name: myocyte enhancer factor 2A
  ENSP ID: ENSP00000454023
MGRKKIQITRIMDERNRQVTFTKRKFGLMKKAYELSVL

SEQ ID NO: 54139 - protein, 437 aa, Homo sapiens
  Payload ID: 10699
  Gene Symbol: MEF2A
  Gene Name: myocyte enhancer factor 2A
  Uniprot ID: Q02078
  ENSP ID: ENSP00000454120
MGRKKIQITRIMDERNRQTLRKKGLNGCESPDADDYFEHSPLSEDRFSKLNEDSDFIFKRGPPGLPPQNFSMSVTVPVTSPNALSYTNPGSSLVSPSLAASSTLTDSSMLSPPQTTLHRNVSPGAPQRPPSTGNAGGMLSTTDLTVPNGAGSSPVGNGFVNSRASPNLIGATGANSLGKVMPTKSPPPPGGGNLGMNSRKPDLRVVIPPSSKGMMPPLSEEEELELNTQRISSSQATQPLATPVVSVTTPSLPPQGLVYSAMPTAYNTDYSLTSADLSALQGFNSPGMLSLGQVSAWQQHHLGQAALSSLVAGGQLSQGSNLSINTNQNISIKSEPISPPRDRMTPSGFQQQQQQQQQQQPPPPPQPQPQPPQPQPRQEMGRSPVDSLSSSSSSYDGSDREDPRGDFHSPIVLGRPPNTEDRESPSVKRMRMDAWVT

SEQ ID NO: 54140 - protein, 375 aa, Homo sapiens
  Payload ID: 10700
  Gene Symbol: MEF2B
  Gene Name: myocyte enhancer factor 2B
  ENSP ID: ENSP00000386374
MGRKKIQISRILDQRNRQVTFTKRKFGLMKKAYELSVLCDCEIALIIFNSANRLFQYASTDMDRVLLKYTEYSEPHESRTNTDILETLKRRGIGLDGPELEPDEGPEEPGEKFRRLAGEGGDPALPRPRLYPAAPAMPSPDVVYGALPPPGCDPSGLGEALPAQSRPSPFRPAAPKAGPPGLVHPLFSPSHLTSKTPPPLYLPTEGRRSDLPGGLAGPRGGLNTSRSLYSGLQNPCSTATPGPPLGSFPFLPGGPPAPNSCPPEYGLGDPPPPPGLLQPPTLAPWQPSRGDGPPAVSSQPSGGRSLGEEGPPTRGASPPTPPVSIKSERLSPAPGGPGDFPKTFPYPLLLARSLAEPLRPGPALRRLPLADGWPR

SEQ ID NO: 54141 - protein, 297 aa, Homo sapiens
  Payload ID: 10700
  Gene Symbol: MEF2B
  Gene Name: myocyte enhancer factor 2B
  ENSP ID: ENSP00000386480
MGRKKIQISRILDQRNRQVTFTKRKFGLMKKAYELSVLCDCEIALIIFNSANRLFQYASTDMDRVLLKYTEYSEPHESRTNTDILEVPQTLKRRGIGLDGPELEPDEGPEEPGEKFRRLAGEGGDPALPRPRLYPAAPAMPSPDVVYGALPPPGCDPSGLGEALPAQSRPSPFRPAAPKAGPPGLVHPLFSPSHLTSKTPPPLYLPTEGRRSDLPGGLAGPRGGLNTSRSLYSGLQNPCSTATPGPPLGSFPFLPGGPPEYGLGDPPPPPGLLQPPTLAPWQPSRGDGPPAVSSQPR

SEQ ID NO: 54142 - protein, 286 aa, Homo sapiens
  Payload ID: 10700
  Gene Symbol: MEF2B
  Gene Name: myocyte enhancer factor 2B
  ENSP ID: ENSP00000386784
MGRKKIQISRILDQRNRQVTFTKRKFGLMKKAYELSVLCDCEIALIIFNSANRLFQYASTDMDRVLLKYTEYSEPHESRTNTDILETLKRRGIGLDGPELEPDEGPEEPGEKFRRLAGEGGDPALPRPRLYPAAPAMPSPDVVYGALPPPGCDPSGLGEALPAQSRPSPFRPAAPKAGPPEKPLQWPAEPLLHCNSRTPTGELPLPPRRPPSGGRSLGEEGPPTRGASPPTPPVSIKSERLSPAPGGPGDFPKTFPYPLLLARSLAEPLRPGPALRRLPLADGWPR

SEQ ID NO: 54143 - protein, 368 aa, Homo sapiens
  Payload ID: 10700
  Gene Symbol: MEF2B
  Gene Name: myocyte enhancer factor 2B
  Uniprot ID: Q02080
  ENSP ID: ENSP00000402154
MGRKKIQISRILDQRNRQVTFTKRKFGLMKKAYELSVLCDCEIALIIFNSANRLFQYASTDMDRVLLKYTEYSEPHESRTNTDILETLKRRGIGLDGPELEPDEGPEEPGEKFRRLAGEGGDPALPRPRLYPAAPAMPSPDVVYGALPPPGCDPSGLGEALPAQSRPSPFRPAAPKAGPPGLVHPLFSPSHLTSKTPPPLYLPTEGRRSDLPGGLAGPRGGLNTSRSLYSGLQNPCSTATPGPPLGSFPFLPGGPPEYGLGDPPPPPGLLQPPTLAPWQPSRGDGPPAVSSQPSGGRSLGEEGPPTRGASPPTPPVSIKSERLSPAPGGPGDFPKTFPYPLLLARSLAEPLRPGPALRRLPLADGWPR

SEQ ID NO: 54144 - protein, 483 aa, Homo sapiens
  Payload ID: 10701
  Gene Symbol: MEF2C
  Gene Name: myocyte enhancer factor 2C
  Uniprot ID: Q06413
  ENSP ID: ENSP00000340874
MGRKKIQITRIMDERNRQVTFTKRKFGLMKKAYELSVLCDCEIALIIFNSTNKLFQYASTDMDKVLLKYTEYNEPHESRTNSDIVETLRKKGLNGCDSPDPDADDSALNKKENKGCESPDPDSSYALTPRTEEKYKKINEEFDNMIKSHKIPAVPPPNFEMPVSIPVSSHNSLVYSNPVSSLGNPNLLPLAHPSLQRNSMSPGVTHRPPSAGNTGGLMGGDLTSGAGTSAGNGYGNPRNSPGLLVSPGNLNKNMQAKSPPPMNLGMNNRKPDLRVLIPPGSKNTMPSVNQRINNSQSAQSLATPVVSVATPTLPGQGMGGYPSAISTTYGTEYSLSSADLSSLSGFNTASALHLGSVTGWQQQHLHNMPPSALSQLGACTSTHLSQSSNLSLPSTQSLNIKSEPVSPPRDRTTTPSRYPQHTRHEAGRSPVDSLSSCSSSYDGSDREDHRNEFHSPIGLTRPSPDERESPSVKRMRLSEGWAT

SEQ ID NO: 54145 - protein, 463 aa, Homo sapiens
  Payload ID: 10701
  Gene Symbol: MEF2C
  Gene Name: myocyte enhancer factor 2C
  Uniprot ID: Q06413
  ENSP ID: ENSP00000389610
MGRKKIQITRIMDERNRQVTFTKRKFGLMKKAYELSVLCDCEIALIIFNSTNKLFQYASTDMDKVLLKYTEYNEPHESRTNSDIVEALNKKENKGCESPDPDSSYALTPRTEEKYKKINEEFDNMIKSHKIPAVPPPNFEMPVSIPVSSHNSLVYSNPVSSLGNPNLLPLAHPSLQRNSMSPGVTHRPPSAGNTGGLMGGDLTSGAGTSAGNGYGNPRNSPGLLVSPGNLNKNMQAKSPPPMNLGMNNRKPDLRVLIPPGSKNTMPSVNQRINNSQSAQSLATPVVSVATPTLPGQGMGGYPSAISTTYGTEYSLSSADLSSLSGFNTASALHLGSVTGWQQQHLHNMPPSALSQLGACTSTHLSQSSNLSLPSTQSLNIKSEPVSPPRDRTTTPSRYPQHTRHEAGRSPVDSLSSCSSSYDGSDREDHRNEFHSPIGLTRPSPDERESPSVKRMRLSEGWAT

SEQ ID NO: 54146 - protein, 473 aa, Homo sapiens
  Payload ID: 10701
  Gene Symbol: MEF2C
  Gene Name: myocyte enhancer factor 2C
  Uniprot ID: Q06413
  ENSP ID: ENSP00000396219
MGRKKIQITRIMDERNRQVTFTKRKFGLMKKAYELSVLCDCEIALIIFNSTNKLFQYASTDMDKVLLKYTEYNEPHESRTNSDIVETLRKKGLNGCDSPDPDADDSVGHSPESEDKYRKINEDIDLMISRQRLCAVPPPNFEMPVSIPVSSHNSLVYSNPVSSLGNPNLLPLAHPSLQRNSMSPGVTHRPPSAGNTGGLMGGDLTSGAGTSAGNGYGNPRNSPGLLVSPGNLNKNMQAKSPPPMNLGMNNRKPDLRVLIPPGSKNTMPSVSEDVDLLLNQRINNSQSAQSLATPVVSVATPTLPGQGMGGYPSAISTTYGTEYSLSSADLSSLSGFNTASALHLGSVTGWQQQHLHNMPPSALSQLGACTSTHLSQSSNLSLPSTQSLNIKSEPVSPPRDRTTTPSRYPQHTRHEAGRSPVDSLSSCSSSYDGSDREDHRNEFHSPIGLTRPSPDERESPSVKRMRLSEGWAT

SEQ ID NO: 54147 - protein, 473 aa, Homo sapiens; identical to SEQ ID NO: 54146
  Payload ID: 10701
  Gene Symbol: MEF2C
  Gene Name: myocyte enhancer factor 2C
  Uniprot ID: Q06413
  ENSP ID: ENSP00000421925

SEQ ID NO: 54148 - protein, 433 aa, Homo sapiens
  Payload ID: 10701
  Gene Symbol: MEF2C
  Gene Name: myocyte enhancer factor 2C
  ENSP ID: ENSP00000422390
MGRKKIQITRIMDERNRQVTFTKRKFGLMKKAYELSVLCDCEIALIIFNSTNKLFQYASTDMDKVLLKYTEYNEPHESRTNSDIVETLRKKGLNGCDSPDPDADDSVGHSPESEDKYRKINEDIDLMISRQRLCAVPPPNFEMPVSIPVSSHNSLVYSNPVSSLGNPNLLPLAHPSLQRNSMSPGVTHRPPSAGNTGGLMGGDLTSGAGTSAGNGYGNPRNSPGLLVSPGNLNKNMQAKSPPPMNLGMNNRKPDLRVLIPPGSKNTMPSVNQRINNSQSAQSLATPVVSVATPTLPGQGMGGYPSAISTTYGTEYSLSSADLSSLSGFNTASALHLGSVTGWQQQHLHNMPPSALSQLGDRTTTPSRYPQHTRHEAGRSPVDSLSSCSSSYDGSDREDHRNEFHSPIGLTRPSPDERESPSVKRMRLSEGWAT

SEQ ID NO: 54149 - protein, 465 aa, Homo sapiens
  Payload ID: 10701
  Gene Symbol: MEF2C
  Gene Name: myocyte enhancer factor 2C
  Uniprot ID: Q06413
  ENSP ID: ENSP00000423597
MGRKKIQITRIMDERNRQVTFTKRKFGLMKKAYELSVLCDCEIALIIFNSTNKLFQYASTDMDKVLLKYTEYNEPHESRTNSDIVETLRKKGLNGCDSPDPDADDSVGHSPESEDKYRKINEDIDLMISRQRLCAVPPPNFEMPVSIPVSSHNSLVYSNPVSSLGNPNLLPLAHPSLQRNSMSPGVTHRPPSAGNTGGLMGGDLTSGAGTSAGNGYGNPRNSPGLLVSPGNLNKNMQAKSPPPMNLGMNNRKPDLRVLIPPGSKNTMPSVNQRINNSQSAQSLATPVVSVATPTLPGQGMGGYPSAISTTYGTEYSLSSADLSSLSGFNTASALHLGSVTGWQQQHLHNMPPSALSQLGACTSTHLSQSSNLSLPSTQSLNIKSEPVSPPRDRTTTPSRYPQHTRHEAGRSPVDSLSSCSSSYDGSDREDHRNEFHSPIGLTRPSPDERESPSVKRMRLSEGWAT

SEQ ID NO: 54150 - protein, 227 aa, Homo sapiens
  Payload ID: 10701
  Gene Symbol: MEF2C
  Gene Name: myocyte enhancer factor 2C
  ENSP ID: ENSP00000423656
MGRKKIQITRIMDERNRQVTFTKRKFGLMKKAYELSVLCDCEIALIIFNSTNKLFQYASTDMDKVLLKYTEYNEPHESRTNSDIVEALNKKENKGCESPDPDSSYALTPRTEEKYKKINEEFDNMIKSHKIPAVPPPNFEMPVSIPVSSHNSLVYSNPVSSLGNPNLLPLAHPSLQRNSMSPGVTHRPPSAGNTGGLMGGDLTSGAGTSAGNGYGNPRNSPGLLVSP

SEQ ID NO: 54151 - protein, 242 aa, Homo sapiens
  Payload ID: 10701
  Gene Symbol: MEF2C
  Gene Name: myocyte enhancer factor 2C
  ENSP ID: ENSP00000423826
MGRKKIQITRIMDERNRQVTFTKRKFGLMKKAYELSVLCDCEIALIIFNSTNKLFQYASTDMDKVLLKYTEYNEPHESRTNSDIVEALNKKENKGCESPDPDSSYALTPRTEEKYKKINEEFDNMIKSHKIPAVPPPNFEMPVSIPVSSHNSLVYSNPVSSLGNPNLLPLAHPSLQRNSMSPGVTHRPPSAGNTGGLMGGDLTSGAGTSAGNGYGNPRNSPGLLVSPGNLNKNMQAKSPPPM

SEQ ID NO: 54152 - protein, 120 aa, Homo sapiens
  Payload ID: 10701
  Gene Symbol: MEF2C
  Gene Name: myocyte enhancer factor 2C
  ENSP ID: ENSP00000424331
MGRKKIQITRIMDERNRQVTFTKRKFGLMKKAYELSVLCDCEIALIIFNSTNKLFQYASTDMDKVLLKYTEYNEPHESRTNSDIVEALNKKENKGCESPDPDSSYALTPRTEEKYKKINE

SEQ ID NO: 54153 - protein, 441 aa, Homo sapiens
  Payload ID: 10701
  Gene Symbol: MEF2C
  Gene Name: myocyte enhancer factor 2C
  Uniprot ID: Q06413
  ENSP ID: ENSP00000424606
MGRKKIQITRIMDERNRQVTFTKRKFGLMKKAYELSVLCDCEIALIIFNSTNKLFQYASTDMDKVLLKYTEYNEPHESRTNSDIVETLRKKGLNGCDSPDPDADDSVGHSPESEDKYRKINEDIDLMISRQRLCAVPPPNFEMPVSIPVSSHNSLVYSNPVSSLGNPNLLPLAHPSLQRNSMSPGVTHRPPSAGNTGGLMGGDLTSGAGTSAGNGYGNPRNSPGLLVSPGNLNKNMQAKSPPPMNLGMNNRKPDLRVLIPPGSKNTMPSVSEDVDLLLNQRINNSQSAQSLATPVVSVATPTLPGQGMGGYPSAISTTYGTEYSLSSADLSSLSGFNTASALHLGSVTGWQQQHLHNMPPSALSQLGDRTTTPSRYPQHTRHEAGRSPVDSLSSCSSSYDGSDREDHRNEFHSPIGLTRPSPDERESPSVKRMRLSEGWAT

SEQ ID NO: 54154 - protein, 399 aa, Homo sapiens
  Payload ID: 10701
  Gene Symbol: MEF2C
  Gene Name: myocyte enhancer factor 2C
  ENSP ID: ENSP00000425636
MGRKKIQITRIMDERNRQVTFTKRKFGLMKKAYELSVLCDCEIALIIFNSTNKLFQYASTDMDKVLLKYTEYNEPHESRTNSDIVETLRKKGLNGCDSPDPDADDSVGHSPESEDKYRKINEDIDLMISRQRLCAVPPPNFEMPVSIPVSSHNSLVYSNPVSSLGNPNLLPLAHPSLQRNSMSPGVTHRPPSAGNTGGLMGGDLTSGAGTSAGNGYGNPRNSPGLLVSPGNLNKNMQAKSPPPMNLGMNNRKPDLRVLIPPGSKNTMPSVSEDVDLLLNQRINNSQSAQSLATPVVSVATPTLPGQGMGGYPSAISTTYGTEYSLSSADLSSLSGFNTASALHLGSVTGWQQQHLHNMPPSALSQLGQNLFLLLETVPPPLRDTHNTRATRRGDLLLTA

SEQ ID NO: 54155 - protein, 126 aa, Homo sapiens
  Payload ID: 10701
  Gene Symbol: MEF2C
  Gene Name: myocyte enhancer factor 2C
  ENSP ID: ENSP00000426442
MGRKKIQITRIMDERNRQVTFTKRKFGLMKKAYELSVLCDCEIALIIFNSTNKLFQYASTDMDKVLLKYTEYNEPHESRTNSDIVETLRKKGLNGCDSPDPDADDSVGHSPESEDKYRKINEDIDL

SEQ ID NO: 54156 - protein, 87 aa, Homo sapiens
  Payload ID: 10701
  Gene Symbol: MEF2C
  Gene Name: myocyte enhancer factor 2C
  ENSP ID: ENSP00000426465
MGRKKIQITRIMDERNRQVTFTKRKFGLMKKAYELSVLCDCEIALIIFNSTNKLFQYASTDMDKVLLKYTEYNEPHESRTNSDIVET

SEQ ID NO: 54157 - protein, 441 aa, Homo sapiens; identical to SEQ ID NO: 54153
  Payload ID: 10701
  Gene Symbol: MEF2C
  Gene Name: myocyte enhancer factor 2C
  Uniprot ID: Q06413
  ENSP ID: ENSP00000426665

SEQ ID NO: 54158 - protein, 129 aa, Homo sapiens
  Payload ID: 10701
  Gene Symbol: MEF2C
  Gene Name: myocyte enhancer factor 2C
  ENSP ID: ENSP00000427163
MGRKKIQITRIMDERNRQVTFTKRKFGLMKKAYELSVLCDCEIALIIFNSTNKLFQYASTDMDKVLLKYTEYNEPHESRTNSDIVETLRKKGLNGCDSPDPDADDSVGHSPESEDKYRKINEDIDLMIS

SEQ ID NO: 54159 - protein, 194 aa, Homo sapiens
  Payload ID: 10701
  Gene Symbol: MEF2C
  Gene Name: myocyte enhancer factor 2C
  ENSP ID: ENSP00000427286
MGRKKIQITRIMDERNRQVTFTKRKFGLMKKAYELSVLCDCEIALIIFNSTNKLFQYASTDMDKVLLKYTEYNEPHESRTNSDIVETLRKKGLNGCDSPDPDADDSVGHSPESEDKYRKINEDIDLMISRQRLCAVPPPNFEMPVSIPVSSHNSLVYSNPVSSLGNPNLLPLAHPSLQRNSMSPGVTHRPPSAG

SEQ ID NO: 54160 - protein, 28 aa, Homo sapiens
  Payload ID: 10701
  Gene Symbol: MEF2C
  Gene Name: myocyte enhancer factor 2C
  ENSP ID: ENSP00000427309
MGRKKIQITRIMDERNRQVTFTKRKFGL

SEQ ID NO: 54161 - protein, 205 aa, Homo sapiens
  Payload ID: 10701
  Gene Symbol: MEF2C
  Gene Name: myocyte enhancer factor 2C
  ENSP ID: ENSP00000485972
MGRKKIQITRIMDERNRQVTFTKRKFGLMKKAYELSVLCDCEIALIIFNSTNKLFQYASTDMDKVLLKYTEYNEPHESRTNSDIVEALNKKENKGCESPDPDSSYALTPRTEEKYKKINEEFDNMIKSHKIPAVPPPNFEMPVSIPVSSHNSLVYSNPVSSLGNPNLLPLAHPSLQRNSMSPGVTHRPPSAGNTGGLMGGDLTSG

SEQ ID NO: 54162 - protein, 431 aa, Homo sapiens
  Payload ID: 10701
  Gene Symbol: MEF2C
  Gene Name: myocyte enhancer factor 2C
  ENSP ID: ENSP00000486490
MGRKKIQITRIMDERNRQVTFTKRKFGLMKKAYELSVLCDCEIALIIFNSTNKLFQYASTDMDKVLLKYTEYNEPHESRTNSDIVEALNKKENKGCESPDPDSSYALTPRTEEKYKKINEEFDNMIKSHKIPAVPPPNFEMPVSIPVSSHNSLVYSNPVSSLGNPNLLPLAHPSLQRNSMSPGVTHRPPSAGNTGGLMGGDLTSGAGTSAGNGYGNPRNSPGLLVSPGNLNKNMQAKSPPPMNLGMNNRKPDLRVLIPPGSKNTMPSVNQRINNSQSAQSLATPVVSVATPTLPGQGMGGYPSAISTTYGTEYSLSSADLSSLSGFNTASALHLGSVTGWQQQHLHNMPPSALSQLGDRTTTPSRYPQHTRHEAGRSPVDSLSSCSSSYDGSDREDHRNEFHSPIGLTRPSPDERESPSVKRMRLSEGWAT

SEQ ID NO: 54163 - protein, 465 aa, Homo sapiens; identical to SEQ ID NO: 54149
  Payload ID: 10701
  Gene Symbol: MEF2C
  Gene Name: myocyte enhancer factor 2C
  Uniprot ID: Q06413
  ENSP ID: ENSP00000486554

SEQ ID NO: 54164 - protein, 183 aa, Homo sapiens
  Payload ID: 10701
  Gene Symbol: MEF2C
  Gene Name: myocyte enhancer factor 2C
  ENSP ID: ENSP00000486932
GLMGGDLTSGAGTSAGNGYGNPRNSPGLLVSPGNLNKNMQAKSPPPMNLGMNNRKPDLRVLIPPGSKNTMPSVNQRINNSQSAQSLATPVVSVATPTLPGQGMGGYPSAISTTYGTEYSLSSADLSSLSGFNTASALHLGSVTGWQQQHLHNMPPSALSQLGPYHHPFEIPTTHAPRGGEISC

SEQ ID NO: 54165 - protein, 151 aa, Homo sapiens
  Payload ID: 10701
  Gene Symbol: MEF2C
  Gene Name: myocyte enhancer factor 2C
  ENSP ID: ENSP00000487157
AKSPPPMNLGMNNRKPDLRVLIPPGSKNTMPSVSEDVDLLLNQRINNSQSAQSLATPVVSVATPTLPGQGMGGYPSAISTTYGTEYSLSSADLSSLSGFNTASALHLGSVTGWQQQHLHNMPPSALSQLGPYHHPFEIPTTHAPRGGEISC

SEQ ID NO: 54166 - protein, 393 aa, Homo sapiens
  Payload ID: 10701
  Gene Symbol: MEF2C
  Gene Name: myocyte enhancer factor 2C
  ENSP ID: ENSP00000487184
MGRKKIQITRIMDERNRQVTFTKRKFGLMKKAYELSVLCDCEIALIIFNSTNKLFQYASTDMDKVLLKYTEYNEPHESRTNSDIVEAVPPPNFEMPVSIPVSSHNSLVYSNPVSSLGNPNLLPLAHPSLQRNSMSPGVTHRPPSAGNTGGLMGGDLTSGAGTSAGNGYGNPRNSPGLLVSPGNLNKNMQAKSPPPMNLGMNNRKPDLRVLIPPGSKNTMPSVSEDVDLLLNQRINNSQSAQSLATPVVSVATPTLPGQGMGGYPSAISTTYGTEYSLSSADLSSLSGFNTASALHLGSVTGWQQQHLHNMPPSALSQLGDRTTTPSRYPQHTRHEAGRSPVDSLSSCSSSYDGSDREDHRNEFHSPIGLTRPSPDERESPSVKRMRLSEGWAT

SEQ ID NO: 54167 - protein, 417 aa, Homo sapiens
  Payload ID: 10701
  Gene Symbol: MEF2C
  Gene Name: myocyte enhancer factor 2C
  Uniprot ID: Q06413
  ENSP ID: ENSP00000487311
MGRKKIQITRIMDERNRQVTFTKRKFGLMKKAYELSVLCDCEIALIIFNSTNKLFQYASTDMDKVLLKYTEYNEPHESRTNSDIVEAVPPPNFEMPVSIPVSSHNSLVYSNPVSSLGNPNLLPLAHPSLQRNSMSPGVTHRPPSAGNTGGLMGGDLTSGAGTSAGNGYGNPRNSPGLLVSPGNLNKNMQAKSPPPMNLGMNNRKPDLRVLIPPGSKNTMPSVNQRINNSQSAQSLATPVVSVATPTLPGQGMGGYPSAISTTYGTEYSLSSADLSSLSGFNTASALHLGSVTGWQQQHLHNMPPSALSQLGACTSTHLSQSSNLSLPSTQSLNIKSEPVSPPRDRTTTPSRYPQHTRHEAGRSPVDSLSSCSSSYDGSDREDHRNEFHSPIGLTRPSPDERESPSVKRMRLSEGWAT

SEQ ID NO: 54168 - protein, 463 aa, Homo sapiens; identical to SEQ ID NO: 54145
  Payload ID: 10701
  Gene Symbol: MEF2C
  Gene Name: myocyte enhancer factor 2C
  Uniprot ID: Q06413
  ENSP ID: ENSP00000487430

SEQ ID NO: 54169 - protein, 102 aa, Homo sapiens
  Payload ID: 10701
  Gene Symbol: MEF2C
  Gene Name: myocyte enhancer factor 2C
  ENSP ID: ENSP00000487437
MISRQRLCAVPPPNFEMPVSIPVSSHNSLVYSNPVSSLGNPNLLPLAHPSLQRNSMSPGVTHRPPSAGNTGGLMGGDLTSGAGTSAGNGYGNPRNSPGLLVS

SEQ ID NO: 54170 - protein, 471 aa, Homo sapiens
  Payload ID: 10701
  Gene Symbol: MEF2C
  Gene Name: myocyte enhancer factor 2C
  ENSP ID: ENSP00000487538
MGRKKIQITRIMDERNRQVTFTKRKFGLMKKAYELSVLCDCEIALIIFNSTNKLFQYASTDMDKVLLKYTEYNEPHESRTNSDIVEALNKKENKGCESPDPDSSYALTPRTEEKYKKINEEFDNMIKSHKIPAVPPPNFEMPVSIPVSSHNSLVYSNPVSSLGNPNLLPLAHPSLQRNSMSPGVTHRPPSAGNTGGLMGGDLTSGAGTSAGNGYGNPRNSPGLLVSPGNLNKNMQAKSPPPMNLGMNNRKPDLRVLIPPGSKNTMPSVSEDVDLLLNQRINNSQSAQSLATPVVSVATPTLPGQGMGGYPSAISTTYGTEYSLSSADLSSLSGFNTASALHLGSVTGWQQQHLHNMPPSALSQLGACTSTHLSQSSNLSLPSTQSLNIKSEPVSPPRDRTTTPSRYPQHTRHEAGRSPVDSLSSCSSSYDGSDREDHRNEFHSPIGLTRPSPDERESPSVKRMRLSEGWAT

SEQ ID NO: 54171 - protein, 521 aa, Homo sapiens
  Payload ID: 10702
  Gene Symbol: MEF2D
  Gene Name: myocyte enhancer factor 2D
  Uniprot ID: Q14814
  ENSP ID: ENSP00000271555
MGRKKIQIQRITDERNRQVTFTKRKFGLMKKAYELSVLCDCEIALIIFNHSNKLFQYASTDMDKVLLKYTEYNEPHESRTNADIIETLRKKGFNGCDSPEPDGEDSLEQSPLLEDKYRRASEELDGLFRRYGSTVPAPNFAMPVTVPVSNQSSLQFSNPSGSLVTPSLVTSSLTDPRLLSPQQPALQRNSVSPGLPQRPASAGAMLGGDLNSANGACPSPVGNGYVSARASPGLLPVANGNSLNKVIPAKSPPPPTHSTQLGAPSRKPDLRVITSQAGKGLMHHLTEDHLDLNNAQRLGVSQSTHSLTTPVVSVATPSLLSQGLPFSSMPTAYNTDYQLTSAELSSLPAFSSPGGLSLGNVTAWQQPQQPQQPQQPQPPQQQPPQPQQPQPQQPQQPQQPPQQQSHLVPVSLSNLIPGSPLPHVGAALTVTTHPHISIKSEPVSPSRERSPAPPPPAVFPAARPEPGDGLSSPAGGSYETGDRDDGRGDFGPTLGLLRPAPEPEAEGSAVKRMRLDTWTLK

SEQ ID NO: 54172 - protein, 514 aa, Homo sapiens
  Payload ID: 10702
  Gene Symbol: MEF2D
  Gene Name: myocyte enhancer factor 2D
  Uniprot ID: Q14814
  ENSP ID: ENSP00000353803
MGRKKIQIQRITDERNRQVTFTKRKFGLMKKAYELSVLCDCEIALIIFNHSNKLFQYASTDMDKVLLKYTEYNEPHESRTNADIIETLRKKGFNGCDSPEPDGEDSLEQSPLLEDKYRRASEELDGLFRRYGSTVPAPNFAMPVTVPVSNQSSLQFSNPSGSLVTPSLVTSSLTDPRLLSPQQPALQRNSVSPGLPQRPASAGAMLGGDLNSANGACPSPVGNGYVSARASPGLLPVANGNSLNKVIPAKSPPPPTHSTQLGAPSRKPDLRVITSQAGKGLMHHLNNAQRLGVSQSTHSLTTPVVSVATPSLLSQGLPFSSMPTAYNTDYQLTSAELSSLPAFSSPGGLSLGNVTAWQQPQQPQQPQQPQPPQQQPPQPQQPQPQQPQQPQQPPQQQSHLVPVSLSNLIPGSPLPHVGAALTVTTHPHISIKSEPVSPSRERSPAPPPPAVFPAARPEPGDGLSSPAGGSYETGDRDDGRGDFGPTLGLLRPAPEPEAEGSAVKRMRLDTWTLK

SEQ ID NO: 54173 - protein, 139 aa, Homo sapiens
  Payload ID: 10702
  Gene Symbol: MEF2D
  Gene Name: myocyte enhancer factor 2D
  ENSP ID: ENSP00000357223
MGRKKIQIQRITDERNRQVTFTKRKFGLMKKAYELSVLCDCEIALIIFNHSNKLFQYASTDMDKVLLKYTEYNEPHESRTNADIIETLRKKGFNGCDSPEPDGEDSLEQSPLLEDKYRRASEELDGLFRRYGGPCWGVT

SEQ ID NO: 54174 - protein, 513 aa, Homo sapiens
  Payload ID: 10702
  Gene Symbol: MEF2D
  Gene Name: myocyte enhancer factor 2D
  Uniprot ID: Q14814
  ENSP ID: ENSP00000476788
MGRKKIQIQRITDERNRQVTFTKRKFGLMKKAYELSVLCDCEIALIIFNHSNKLFQYASTDMDKVLLKYTEYNEPHESRTNADIIEALHKKHRECESPEVDEVFALTPQTEEKYKKIDEEFDKMMQSYRLASTVPAPNFAMPVTVPVSNQSSLQFSNPSGSLVTPSLVTSSLTDPRLLSPQQPALQRNSVSPGLPQRPASAGAMLGGDLNSANGACPSPVGNGYVSARASPGLLPVANGNSLNKVIPAKSPPPPTHSTQLGAPSRKPDLRVITSQAGKGLMHHLNNAQRLGVSQSTHSLTTPVVSVATPSLLSQGLPFSSMPTAYNTDYQLTSAELSSLPAFSSPGGLSLGNVTAWQQPQQPQQPQQPQPPQQQPPQPQQPQPQQPQQPQQPPQQQSHLVPVSLSNLIPGSPLPHVGAALTVTTHPHISIKSEPVSPSRERSPAPPPPAVFPAARPEPGDGLSSPAGGSYETGDRDDGRGDFGPTLGLLRPAPEPEAEGSAVKRMRLDTWTLK

SEQ ID NO: 54175 - protein, 10 aa, Homo sapiens
  Payload ID: 10702
  Gene Symbol: MEF2D
  Gene Name: myocyte enhancer factor 2D
  ENSP ID: ENSP00000477124
MGRKKIQIQR

SEQ ID NO: 54176 - protein, 139 aa, Homo sapiens; identical to SEQ ID NO: 54173
  Payload ID: 10702
  Gene Symbol: MEF2D
  Gene Name: myocyte enhancer factor 2D
  ENSP ID: ENSP00000477413

SEQ ID NO: 54177 - protein, 246 aa, Homo sapiens
  Payload ID: 10703
  Gene Symbol: MDFI
  Gene Name: MyoD family inhibitor
  Uniprot ID: Q99750
  ENSP ID: ENSP00000230321
MYQVSGQRPSGCDAPYGAPSAAPGPAQTLSLLPGLEVVTGSTHPAEAAPEEGSLEEAATPMPQGNGPGIPQGLDSTDLDVPTEAVTCQPQGNPLGCTPLLPNDSGHPSELGGTRRAGNGALGGPKAHRKLQTHPSLASQGSKKSKSSSKSTTSQIPLQAQEDCCVHCILSCLFCEFLTLCNIVLDCATCGSCSSEDSCLCCCCCGSGECADCDLPCDLDCGILDACCESADCLEICMECCGLCFSS

SEQ ID NO: 54178 - protein, 185 aa, Homo sapiens
  Payload ID: 10703
  Gene Symbol: MDFI
  Gene Name: MyoD family inhibitor
  ENSP ID: ENSP00000362141
MYQVSGQRPSGCDAPYGAPSAAPGPGQPQGNPLGCTPLLPNDSGHPSELGGTRRAGNGALGGPKAHRKLQTHPSLASQGSKKSKSSSKSTTSQIPLQAQEDCCVHCILSCLFCEFLTLCNIVLDCATCGSCSSEDSCLCCCCCGSGECADCDLPCDLDCGILDACCESADCLEICMECCGLCFSS

SEQ ID NO: 54179 - protein, 246 aa, Homo sapiens; identical to SEQ ID NO: 54177
  Payload ID: 10703
  Gene Symbol: MDFI
  Gene Name: MyoD family inhibitor
  Uniprot ID: Q99750
  ENSP ID: ENSP00000362142

SEQ ID NO: 54180 - protein, 231 aa, Homo sapiens
  Payload ID: 10703
  Gene Symbol: MDFI
  Gene Name: MyoD family inhibitor
  ENSP ID: ENSP00000393881
MYQVSGQRPSGCDAPYGAPSAAPGPAQTLSLLPGLEVVTGSTHPAEAAPEEGSLEEAATPMPQGNGPGIPQGLDSTDLDVPTEAVTCQPQGNPLGCTPLLPNDSGHPSELGGTRRAGNGALGGPKAHRKLQTHPSLASQGSKKSKSSSKSTTSQIPLQAQEDCCVHCILSCLFCEFLTLCNIVLDCATCGSCSSEDSCLCCCCCGSGECADCDLPCDLDCGILDACCESAD

SEQ ID NO: 54181 - protein, 142 aa, Homo sapiens
  Payload ID: 10703
  Gene Symbol: MDFI
  Gene Name: MyoD family inhibitor
  ENSP ID: ENSP00000403587
MYQVSGQRPSGCDAPYGAPSAAPGPGQPQGNPLGCTPLLPNDSGHPSELGGTRRAGNGALGGPKAHRKLQTHPSLASQGSKKSKSSSKSTTSQIPLQAQEDCCVHCILSCLFCEFLTLCNIVLDCATCGSCSSEDSCLCCCC

SEQ ID NO: 54182 - protein, 98 aa, Homo sapiens
  Payload ID: 10703
  Gene Symbol: MDFI
  Gene Name: MyoD family inhibitor
  ENSP ID: ENSP00000406600
MYQVSGQRPSGCDAPYGAPSAAPGPAQTLSLLPGLEVVTGSTHPAEAAPEEGSLEEAATPMPQGNGPGIPQGLDSTDLDVPTEAVTCQPQGNPLGCTP

SEQ ID NO: 54183 - protein, 128 aa, Homo sapiens
  Payload ID: 10703
  Gene Symbol: MDFI
  Gene Name: MyoD family inhibitor
  ENSP ID: ENSP00000411829
MYQVSGQRPSGCDAPYGAPSAAPGPAQTLSLLPGLEVVTGSTHPAEAAPEEGSLEEAATPMPQGNGPGIPQGLDSTDLDVPTEAVTCQPQGNPLGCTPLLPNDSGHPSELGGTRRAGNGALGGPKAHR

SEQ ID NO: 54184 - protein, 213 aa, Homo sapiens
  Payload ID: 10703
  Gene Symbol: MDFI
  Gene Name: MyoD family inhibitor
  ENSP ID: ENSP00000413226
MYQVSGQRPSGCDAPYGAPSAAPGPAQTLSLLPGLEVVTGSTHPAEAAPEEGSLEEAATPMPQGNGPGIPQGLDSTDLDVPTEAVTCQPQGNPLGCTPLLPNDSGHPSELGGTRRAGNGALGGPKAHRKLQTHPSLASQGSKKSKSSSKSTTSQIPLQAQEDCCVHCILSCLFCEFLTLCNIVLDCATCGSCSSEDSCLCCCCCGSGECADCD

SEQ ID NO: 54185 - protein, 355 aa, Homo sapiens
  Payload ID: 10704
  Gene Symbol: MDFIC
  Gene Name: MyoD family inhibitor domain containing
  ENSP ID: ENSP00000257724
VRGVRAATAAAVAATAASGLSRREAGGRAGAAAAVVRPPGRKCGRCRRLANFPGRKRRRRRRKGLGATTGGCGEAVSSLHPAPHSPSSVRPAGRRARRQRRGAGSAERPMSGAGEALAPGPVGPQRVAEAGGGQLGSTAQGKCDKDNTEKDITQATNSHFTHGEMQDQSIWGNPSDGELIRTQPQRLPQLQTSAQVPSGEEIGKIKNGHTGLSNGNGIHHGAKHGSADNRKLSAPVSQKMHRKIQSSLSVNSDISKKSKVNAVFSQKTGSSPEDCCVHCILACLFCEFLTLCNIVLGQASCGICTSEACCCCCGDEMGDDCNCPCDMDCGIMDACCESSDCLEICMECCGICFPS

SEQ ID NO: 54186 - protein, 246 aa, Homo sapiens
  Payload ID: 10704
  Gene Symbol: MDFIC
  Gene Name: MyoD family inhibitor domain containing
  Uniprot ID: Q9P1T7
  ENSP ID: ENSP00000377126
MSGAGEALAPGPVGPQRVAEAGGGQLGSTAQGKCDKDNTEKDITQATNSHFTHGEMQDQSIWGNPSDGELIRTQPQRLPQLQTSAQVPSGEEIGKIKNGHTGLSNGNGIHHGAKHGSADNRKLSAPVSQKMHRKIQSSLSVNSDISKKSKVNAVFSQKTGSSPEDCCVHCILACLFCEFLTLCNIVLGQASCGICTSEACCCCCGDEMGDDCNCPCDMDCGIMDACCESSDCLEICMECCGICFPS

SEQ ID NO: 54187 - protein, 156 aa, Homo sapiens
  Payload ID: 10704
  Gene Symbol: MDFIC
  Gene Name: MyoD family inhibitor domain containing
  ENSP ID: ENSP00000392098
PQRVAEAGGGQLGSTAQGKCDKDNTEKDITQATNSHFTHGEMQDQSIWGNPSDGELIRTQPQRLPQLQTSAQVPSGEEIGKIKNGHTGLSNGNGIHHGAKHGSADNRKLSAPVSQKMHRKIQSSLSVNSDISKKSKVNAVFSQKTGSSPEDKQEFW

SEQ ID NO: 54188 - protein, 43 aa, Homo sapiens
  Payload ID: 10704
  Gene Symbol: MDFIC
  Gene Name: MyoD family inhibitor domain containing
  ENSP ID: ENSP00000401623
MSGAGEALAPGPVGPQRVAEAGGGQLGSTAQGLFSRSRTAAAL

SEQ ID NO: 54189 - protein, 43 aa, Homo sapiens; identical to SEQ ID NO: 54188
  Payload ID: 10704
  Gene Symbol: MDFIC
  Gene Name: MyoD family inhibitor domain containing
  ENSP ID: ENSP00000412153

SEQ ID NO: 54190 - protein, 156 aa, Homo sapiens
  Payload ID: 10704
  Gene Symbol: MDFIC
  Gene Name: MyoD family inhibitor domain containing
  ENSP ID: ENSP00000416668
GPVGPQRVAEAGGGQLGSTAQGKCDKDNTEKDITQATNSHFTHGEMQDQSIWGNPSDGELIRTQPQRLPQLQTSAQVPSGEEIGKIKNGHTGLSNGNGIHHGAKHGSADNRKLSAPVSQKMHRKIQSSLSVNSDISKKSKVNAVFSQKTGSSPEVC

SEQ ID NO: 54191 - protein, 135 aa, Homo sapiens
  Payload ID: 10704
  Gene Symbol: MDFIC
  Gene Name: MyoD family inhibitor domain containing
  ENSP ID: ENSP00000418337
MQDQSIWGNPSDGELIRTQPQRLPQLQTSAQVPSGEEIGKIKNGHTGLSNGNGIHHGAKHGSADNRKLSAPVSQKMHRKIQSSLSVNSDISKKSKVNAVFSQKTGSSPEDCCVHCILACLFCEFLTLCNIVLGQA

SEQ ID NO: 54192 - protein, 355 aa, Homo sapiens; identical to SEQ ID NO: 54185
  Payload ID: 10704
  Gene Symbol: MDFIC
  Gene Name: MyoD family inhibitor domain containing
  ENSP ID: ENSP00000484656

SEQ ID NO: 54193 - protein, 2048 aa, Homo sapiens
  Payload ID: 10705
  Gene Symbol: MYOF
  Gene Name: myoferlin
  Uniprot ID: Q9NZM1
  ENSP ID: ENSP00000351094
MLRVIVESASNIPKTKFGKPDPIVSVIFKDEKKKTKKVDNELNPVWNEILEFDLRGIPLDFSSSLGIIVKDFETIGQNKLIGTATVALKDLTGDQSRSLPYKLISLLNEKGQDTGATIDLVIGYDPPSAPHPNDLSGPSVPGMGGDGEEDEGDEDRLDNAVRGPGPKGPVGTVSEAQLARRLTKVKNSRRMLSNKPQDFQIRVRVIEGRQLSGNNIRPVVKVHVCGQTHRTRIKRGNNPFFDELFFYNVNMTPSELMDEIISIRVYNSHSLRADCLMGEFKIDVGFVYDEPGHAVMRKWLLLNDPEDTSSGSKGYMKVSMFVLGTGDEPPPERRDRDNDSDDVESNLLLPAGIALRWVTFLLKIYRAEDIPQMDDAFSQTVKEIFGGNADKKNLVDPFVEVSFAGKKVCTNIIEKNANPEWNQVVNLQIKFPSVCEKIKLTIYDWDRLTKNDVVGTTYLHLSKIAASGGEVEVNTGETEVGFVPTFGPCYLNLYGSPREYTGFPDPYDELNTGKGEGVAYRGRILVELATFLEKTPPDKKLEPISNDDLLVVEKYQRRRKYSLSAVFHSATMLQDVGEAIQFEVSIGNYGNKFDTTCKPLASTTQYSRAVFDGNYYYYLPWAHTKPVVTLTSYWEDISHRLDAVNTLLAMAERLQTNIEALKSGIQGKIPANQLAELWLKLIDEVIEDTRYTLPLTEGKANVTVLDTQIRKLRSRSLSQIHEAAVRMRSEATDVKSTLAEIEDWLDKLMQLTEEPQNSMPDIIIWMIRGEKRLAYARIPAHQVLYSTSGENASGKYCGKTQTIFLKYPQEKNNGPKVPVELRVNIWLGLSAVEKKFNSFAEGTFTVFAEMYENQALMFGKWGTSGLVGRHKFSDVTGKIKLKREFFLPPKGWEWEGEWIVDPERSLLTEADAGHTEFTDEVYQNESRYPGGDWKPAEDTYTDANGDKAASPSELTCPPGWEWEDDAWSYDINRAVDEKGWEYGITIPPDHKPKSWVAAEKMYHTHRRRRLVRKRKKDLTQTASSTARAMEELQDQEGWEYASLIGWKFHWKQRSSDTFRRRRWRRKMAPSETHGAAAIFKLEGALGADTTEDGDEKSLEKQKHSATTVFGANTPIVSCNFDRVYIYHLRCYVYQARNLLALDKDSFSDPYAHICFLHRSKTTEIIHSTLNPTWDQTIIFDEVEIYGEPQTVLQNPPKVIMELFDNDQVGKDEFLGRSIFSPVVKLNSEMDITPKLLWHPVMNGDKACGDVLVTAELILRGKDGSNLPILPPQRAPNLYMVPQGIRPVVQLTAIEILAWGLRNMKNFQMASITSPSLVVECGGERVESVVIKNLKKTPNFPSSVLFMKVFLPKEELYMPPLVIKVIDHRQFGRKPVVGQCTIERLDRFRCDPYAGKEDIVPQLKASLLSAPPCRDIVIEMEDTKPLLASKLTEKEEEIVDWWSKFYASSGEHEKCGQYIQKGYSKLKIYNCELENVAEFEGLTDFSDTFKLYRGKSDENEDPSVVGEFKGSFRIYPLPDDPSVPAPPRQFRELPDSVPQECTVRIYIVRGLELQPQDNNGLCDPYIKITLGKKVIEDRDHYIPNTLNPVFGRMYELSCYLPQEKDLKISVYDYDTFTRDEKVGETIIDLENRFLSRFGSHCGIPEEYCVSGVNTWRDQLRPTQLLQNVARFKGFPQPILSEDGSRIRYGGRDYSLDEFEANKILHQHLGAPEERLALHILRTQGLVPEHVETRTLHSTFQPNISQGKLQMWVDVFPKSLGPPGPPFNITPRKAKKYYLRVIIWNTKDVILDEKSITGEEMSDIYVKGWIPGNEENKQKTDVHYRSLDGEGNFNWRFVFPFDYLPAEQLCIVAKKEHFWSIDQTEFRIPPRLIIQIWDNDKFSLDDYLGFLELDLRHTIIPAKSPEKCRLDMIPDLKAMNPLKAKTASLFEQKSMKGWWPCYAEKDGARVMAGKVEMTLEILNEKEADERPAGKGRDEPNMNPKLDLPNRPETSFLWFTNPCKTMKFIVWRRFKWVIIGLLFLLILLLFVAVLLYSLPNYLSMKIVKPNV

SEQ ID NO: 54194 - protein, 2061 aa, Homo sapiens
  Payload ID: 10705
  Gene Symbol: MYOF
  Gene Name: myoferlin
  Uniprot ID: Q9NZM1
  ENSP ID: ENSP00000352208
MLRVIVESASNIPKTKFGKPDPIVSVIFKDEKKKTKKVDNELNPVWNEILEFDLRGIPLDFSSSLGIIVKDFETIGQNKLIGTATVALKDLTGDQSRSLPYKLISLLNEKGQDTGATIDLVIGYDPPSAPHPNDLSGPSVPGMGGDGEEDEGDEDRLDNAVRGPGPKGPVGTVSEAQLARRLTKVKNSRRMLSNKPQDFQIRVRVIEGRQLSGNNIRPVVKVHVCGQTHRTRIKRGNNPFFDELFFYNVNMTPSELMDEIISIRVYNSHSLRADCLMGEFKIDVGFVYDEPGHAVMRKWLLLNDPEDTSSGSKGYMKVSMFVLGTGDEPPPERRDRDNDSDDVESNLLLPAGIALRWVTFLLKIYRAEDIPQMDDAFSQTVKEIFGGNADKKNLVDPFVEVSFAGKKVCTNIIEKNANPEWNQVVNLQIKFPSVCEKIKLTIYDWDRLTKNDVVGTTYLHLSKIAASGGEVEDFSSSGTGAASYTVNTGETEVGFVPTFGPCYLNLYGSPREYTGFPDPYDELNTGKGEGVAYRGRILVELATFLEKTPPDKKLEPISNDDLLVVEKYQRRRKYSLSAVFHSATMLQDVGEAIQFEVSIGNYGNKFDTTCKPLASTTQYSRAVFDGNYYYYLPWAHTKPVVTLTSYWEDISHRLDAVNTLLAMAERLQTNIEALKSGIQGKIPANQLAELWLKLIDEVIEDTRYTLPLTEGKANVTVLDTQIRKLRSRSLSQIHEAAVRMRSEATDVKSTLAEIEDWLDKLMQLTEEPQNSMPDIIIWMIRGEKRLAYARIPAHQVLYSTSGENASGKYCGKTQTIFLKYPQEKNNGPKVPVELRVNIWLGLSAVEKKFNSFAEGTFTVFAEMYENQALMFGKWGTSGLVGRHKFSDVTGKIKLKREFFLPPKGWEWEGEWIVDPERSLLTEADAGHTEFTDEVYQNESRYPGGDWKPAEDTYTDANGDKAASPSELTCPPGWEWEDDAWSYDINRAVDEKGWEYGITIPPDHKPKSWVAAEKMYHTHRRRRLVRKRKKDLTQTASSTARAMEELQDQEGWEYASLIGWKFHWKQRSSDTFRRRRWRRKMAPSETHGAAAIFKLEGALGADTTEDGDEKSLEKQKHSATTVFGANTPIVSCNFDRVYIYHLRCYVYQARNLLALDKDSFSDPYAHICFLHRSKTTEIIHSTLNPTWDQTIIFDEVEIYGEPQTVLQNPPKVIMELFDNDQVGKDEFLGRSIFSPVVKLNSEMDITPKLLWHPVMNGDKACGDVLVTAELILRGKDGSNLPILPPQRAPNLYMVPQGIRPVVQLTAIEILAWGLRNMKNFQMASITSPSLVVECGGERVESVVIKNLKKTPNFPSSVLFMKVFLPKEELYMPPLVIKVIDHRQFGRKPVVGQCTIERLDRFRCDPYAGKEDIVPQLKASLLSAPPCRDIVIEMEDTKPLLASKLTEKEEEIVDWWSKFYASSGEHEKCGQYIQKGYSKLKIYNCELENVAEFEGLTDFSDTFKLYRGKSDENEDPSVVGEFKGSFRIYPLPDDPSVPAPPRQFRELPDSVPQECTVRIYIVRGLELQPQDNNGLCDPYIKITLGKKVIEDRDHYIPNTLNPVFGRMYELSCYLPQEKDLKISVYDYDTFTRDEKVGETIIDLENRFLSRFGSHCGIPEEYCVSGVNTWRDQLRPTQLLQNVARFKGFPQPILSEDGSRIRYGGRDYSLDEFEANKILHQHLGAPEERLALHILRTQGLVPEHVETRTLHSTFQPNISQGKLQMWVDVFPKSLGPPGPPFNITPRKAKKYYLRVIIWNTKDVILDEKSITGEEMSDIYVKGWIPGNEENKQKTDVHYRSLDGEGNFNWRFVFPFDYLPAEQLCIVAKKEHFWSIDQTEFRIPPRLIIQIWDNDKFSLDDYLGFLELDLRHTIIPAKSPEKCRLDMIPDLKAMNPLKAKTASLFEQKSMKGWWPCYAEKDGARVMAGKVEMTLEILNEKEADERPAGKGRDEPNMNPKLDLPNRPETSFLWFTNPCKTMKFIVWRRFKWVIIGLLFLLILLLFVAVLLYSLPNYLSMKIVKPNV

SEQ ID NO: 54195 - protein, 160 aa, Homo sapiens
  Payload ID: 10705
  Gene Symbol: MYOF
  Gene Name: myoferlin
  Uniprot ID: Q9NZM1
  ENSP ID: ENSP00000360543
MLRVIVESASNIPKTKFGKPDPIVSVIFKDEKKKTKKVDNELNPVWNEILEFDLRGIPLDFSSSLGIIVKDFETIGQNKLIGTATVALKDLTGDQSRSLPYKLISLLNEKGQDTGATIDLVIGYDPPSAPHPNDLSGPSVPGMGGKLTLLKAQPPPGGGC

SEQ ID NO: 54196 - protein, 445 aa, Homo sapiens
  Payload ID: 10705
  Gene Symbol: MYOF
  Gene Name: myoferlin
  Uniprot ID: Q9NZM1
  ENSP ID: ENSP00000360544
MLRVIVESASNIPKTKFGKPDPIVSVIFKDEKKKTKKVDNELNPVWNEILEFDLRGIPLDFSSSLGIIVKDFETIGQNKLIGTATVALKDLTGDQSRSLPYKLISLLNEKGQDTGATIDLVIGYDPPSAPHPNDLSGPSVPGMGGDGEEDEGDEDRLDNAVRGPGPKGPVGTVSEAQLARRLTKVKNSRRMLSNKPQDFQIRVRVIEGRQLSGNNIRPVVKVHVCGQTHRTRIKRGNNPFFDELFFYNVNMTPSELMDEIISIRVYNSHSLRADCLMGEFKIDVGFVYDEPGHAVMRKWLLLNDPEDTSSGSKGYMKVSMFVLGTGDEPPPERRDRDNDSDDVESNLLLPAGIALRWVTFLLKIYRAEDIPQMDDAFSQTVKEIFGGNADKKNLVDPFVEVSFAGKKVCTNIIEKNANPEWNQVVNLQIKFPSVCEKIKLTIYDW

SEQ ID NO: 54197 - protein, 1177 aa, Homo sapiens
  Payload ID: 10705
  Gene Symbol: MYOF
  Gene Name: myoferlin
  ENSP ID: ENSP00000432708
  MOD_RES (1)..(1): Any amino acid
XNYYYYLPWAHTKPVVTLTSYWEDISHRLDAVNTLLAMAERLQTNIEALKSGIQGKIPANQLAELWLKLIDEVIEDTRYTLPLTEGKANVTVLDTQIRKLRSRSLSQIHEAAVRMRSEATDVKSTLAEIEDWLDKLMQLTEEPQNSMPDIIIWMIRGEKRLAYARIPAHQVLYSTSGENASGKYCGKTQTIFLKYPQEKNNGPKVPVELRVNIWLGLSAVEKKFNSFAEGTFTVFAEMYENQALMFGKWGTSGLVGRHKFSDVTGKIKLKREFFLPPKGWEWEGEWIVDPERSLLTEADAGHTEFTDEVYQNESRYPGGDWKPAEDTYTDANGDKAASPSELTCPPGWEWEDDAWSYDINRAVDEKGWEYGITIPPDHKPKSWVAAEKMYHTHRRRRLVRKRKKDLTQTASSTARAMEELQDQEGWEYASLIGWKFHWKQRSSDTFRRRRWRRKMAPSETHGAAAIFKLEGALGADTTEDGDEKSLEKQKHSATTVFGANTPIVSCNFDRVYIYHLRCYVYQARNLLALDKDSFSDPYAHICFLHRSKTTEIIHSTLNPTWDQTIIFDEVEIYGEPQTVLQNPPKVIMELFDNDQVGKDEFLGRSIFSPVVKLNSEMDITPKLLWHPVMNGDKACGDVLVTAELILRGKDGSNLPILPPQRAPNLYMVPQGIRPVVQLTAIEILAWGLRNMKNFQMASITSPSLVVECGGERVESVVIKNLKKTPNFPSSVLFMKVFLPKEELYMPPLVIKVIDHRQFGRKPVVGQCTIERLDRFRCDPYAGKEDIVPQLKASLLSAPPCRDIVIEMEDTKPLLASKCLSSMSTALSKMASPATVHLTEKEEEIVDWWSKFYASSGEHEKCGQYIQKGYSKLKIYNCELENVAEFEGLTDFSDTFKLYRGKSDENEDPSVVGEFKGSFRIYPLPDDPSVPAPPRQFRELPDSVPQECTVRIYIVRGLELQPQDNNGLCDPYIKITLGKKVIEDRDHYIPNTLNPVFGRMYELSCYLPQEKDLKISVYDYDTFTRDEKVGETIIDLENRFLSRFGSHCGIPEEYCVSGVNTWRDQLRPTQLLQNVARFKGFPQPILSEDGSRIRYGGRDYSLDEFEANKILHQHLGAPEERLALHILRTQGLVPEHVETRTLHSTFQPNISQILPACDHLEHQGRYLGREKHHRRGNE

SEQ ID NO: 54198 - protein, 320 aa, Homo sapiens
  Payload ID: 10706
  Gene Symbol: MYOD1
  Gene Name: myogenic differentiation 1
  Uniprot ID: P15172
  ENSP ID: ENSP00000250003
MELLSPPLRDVDLTAPDGSLCSFATTDDFYDDPCFDSPDLRFFEDLDPRLMHVGALLKPEEHSHFPAAVHPAPGAREDEHVRAPSGHHQAGRCLLWACKACKRKTTNADRRKAATMRERRRLSKVNEAFETLKRCTSSNPNQRLPKVEILRNAIRYIEGLQALLRDQDAAPPGAAAAFYAPGPLPPGRGGEHYSGDSDASSPRSNCSDGMMDYSGPPSGARRRNCYEGAYYNEAPSEPRPGKSAAVSSLDCLSSIVERISTESPAAPALLLADVPSESPPRRQEAAAPSEGESSGDPTQSPDAAPQCPAGANPNPIYQVL

SEQ ID NO: 54199 - protein, 255 aa, Homo sapiens
  Payload ID: 10707
  Gene Symbol: MYF5
  Gene Name: myogenic factor 5
  Uniprot ID: P13349
  ENSP ID: ENSP00000228644
MDVMDGCQFSPSEYFYDGSCIPSPEGEFGDEFVPRVAAFGAHKAELQGSDEDEHVRAPTGHHQAGHCLMWACKACKRKSTTMDRRKAATMRERRRLKKVNQAFETLKRCTTTNPNQRLPKVEILRNAIRYIESLQELLREQVENYYSLPGQSCSEPTSPTSNCSDGMPECNSPVWSRKSSTFDSIYCPDVSNVYATDKNSLSSLDCLSNIVDRITSSEQPGLPLQDLASLSPVASTDSQPATPGASSSRLIYHVL

SEQ ID NO: 54200 - protein, 242 aa, Homo sapiens
  Payload ID: 10708
  Gene Symbol: MYF6
  Gene Name: myogenic factor 6 (herculin)
  Uniprot ID: P23409
  ENSP ID: ENSP00000228641
MMMDLFETGSYFFYLDGENVTLQPLEVAEGSPLYPGSDGTLSPCQDQMPPEAGSDSSGEEHVLAPPGLQPPHCPGQCLIWACKTCKRKSAPTDRRKAATLRERRRLKKINEAFEALKRRTVANPNQRLPKVEILRSAISYIERLQDLLHRLDQQEKMQELGVDPFSYRPKQENLEGADFLRTCSSQWPSVSDHSRGLVITAKEGGASIDSSASSSLRCLSSIVDSISSEERKLPCVEEVVEK

SEQ ID NO: 54201 - protein, 224 aa, Homo sapiens
  Payload ID: 10709
  Gene Symbol: MYOG
  Gene Name: myogenin (myogenic factor 4)
  Uniprot ID: P15173
  ENSP ID: ENSP00000241651
MELYETSPYFYQEPRFYDGENYLPVHLQGFEPPGYERTELTLSPEAPGPLEDKGLGTPEHCPGQCLPWACKVCKRKSVSVDRRRAATLREKRRLKKVNEAFEALKRSTLLNPNQRLPKVEILRSAIQYIERLQALLSSLNQEERDLRYRGGGGPQPGVPSECSSHSASCSPEWGSALEFSANPGDHLLTADPTDAHNLHSLTSIVDSITVEDVSVAFPDETMPN

SEQ ID NO: 54202 - protein, 154 aa, Homo sapiens
  Payload ID: 10710
  Gene Symbol: MB
  Gene Name: myoglobin
  Uniprot ID: P02144
  ENSP ID: ENSP00000352835
MGLSDGEWQLVLNVWGKVEADIPGHGQEVLIRLFKGHPETLEKFDKFKHLKSEDEMKASEDLKKHGATVLTALGGILKKKGHHEAEIKPLAQSHATKHKIPVKYLEFISECIIQVLQSKHPGDFGADAQGAMNKALELFRKDMASNYKELGFQG

SEQ ID NO: 54203 - protein, 154 aa, Homo sapiens; identical to SEQ ID NO: 54202
  Payload ID: 10710
  Gene Symbol: MB
  Gene Name: myoglobin
  Uniprot ID: P02144
  ENSP ID: ENSP00000380489

SEQ ID NO: 54204 - protein, 154 aa, Homo sapiens; identical to SEQ ID NO: 54202
  Payload ID: 10710
  Gene Symbol: MB
  Gene Name: myoglobin
  Uniprot ID: P02144
  ENSP ID: ENSP00000380491

SEQ ID NO: 54205 - protein, 154 aa, Homo sapiens; identical to SEQ ID NO: 54202
  Payload ID: 10710
  Gene Symbol: MB
  Gene Name: myoglobin
  Uniprot ID: P02144
  ENSP ID: ENSP00000384239

SEQ ID NO: 54206 - protein, 99 aa, Homo sapiens
  Payload ID: 10710
  Gene Symbol: MB
  Gene Name: myoglobin
  ENSP ID: ENSP00000386060
MKASEDLKKHGATVLTALGGILKKKGHHEAEIKPLAQSHATKHKIPVKYLEFISECIIQVLQSKHPGDFGADAQGAMNKALELFRKDMASNYKELGFQG

SEQ ID NO: 54207 - protein, 106 aa, Homo sapiens
  Payload ID: 10710
  Gene Symbol: MB
  Gene Name: myoglobin
  ENSP ID: ENSP00000389263
MGLSDGEWQLVLNVWGKVEADIPGHGQEVLIRLFKGHPETLEKFDKFKHLKSEDEMKASEDLKKHGATVLTALGGILKKKGHHEAEIKPLAQSHATKHKIPVKYLE

SEQ ID NO: 54208 - protein, 106 aa, Homo sapiens; identical to SEQ ID NO: 54207
  Payload ID: 10710
  Gene Symbol: MB
  Gene Name: myoglobin
  ENSP ID: ENSP00000397944

SEQ ID NO: 54209 - protein, 143 aa, Homo sapiens
  Payload ID: 10710
  Gene Symbol: MB
  Gene Name: myoglobin
  ENSP ID: ENSP00000403351
MGLSDGEWQLVLNVWGKVEADIPGHGQEVLIRLFKGHPETLEKFDKFKHLKSEDEMKASEDLKKHGATVLTALGGILKKKGHHEAEIKPLAQSHATKHKIPVKYLEFISECIIQVLQSKHPGDFGADAQGAMNKALELFRKDM

SEQ ID NO: 54210 - protein, 74 aa, Homo sapiens
  Payload ID: 10710
  Gene Symbol: MB
  Gene Name: myoglobin
  ENSP ID: ENSP00000413309
MKASEDLKKHGATVLTALGGILKKKGHHEAEIKPLAQSHATKHKIPVKYLEFISECIIQVLQSKHPGDFGADAQ

SEQ ID NO: 54211 - protein, 77 aa, Homo sapiens
  Payload ID: 10710
  Gene Symbol: MB
  Gene Name: myoglobin
  ENSP ID: ENSP00000414243
MGLSDGEWQLVLNVWGKVEADIPGHGQEVLIRLFKGHPETLEKFDKFKHLKSEDEMKASEDLKKHGATVLTALGGIL

SEQ ID NO: 54212 - protein, 285 aa, Homo sapiens
  Payload ID: 10711
  Gene Symbol: MIOX
  Gene Name: myo-inositol oxygenase
  Uniprot ID: Q9UGB7
  ENSP ID: ENSP00000216075
MKVTVGPDPSLVYRPDVDPEVAKDKASFRNYTSGPLLDRVFTTYKLMHTHQTVDFVRSKHAQFGGFSYKKMTVMEAVDLLDGLVDESDPDVDFPNSFHAFQTAEGIRKAHPDKDWFHLVGLLHDLGKVLALFGEPQWAVVGDTFPVGCRPQASVVFCDSTFQDNPDLQDPRYSTELGMYQPHCGLDRVLMSWGHDEYMYQVMKFNKFSLPPEAFYMIRFHSFYPWHTGRDYQQLCSQQDLAMLPWVREFNKFDLYTKCPDLPDVDKLRPYYQGLIDKYCPGILSW

SEQ ID NO: 54213 - protein, 270 aa, Homo sapiens
  Payload ID: 10711
  Gene Symbol: MIOX
  Gene Name: myo-inositol oxygenase
  ENSP ID: ENSP00000379081
MKVTVGPDPSLVYRPDVDPEVAKDKASFRNYTSGPLLDRVFTTYKLMHTHQTVDFVRSKHAQFGGFSYKKMTVMEAVDLLDGLVDESDPDVDFPNSFHAFQTAEGIRKAHPDKDWFHLVGLLHDLGKVLALFGEPQWAVVGDTFPVGCRPQASVVFCDSTFQDNPDLQDPRYSTELGMYQPHCGLDRVLMSWGHDEYMYQVMKFNKFSLPPEAFYMIRFHSFYPWHTGRDYQQLCSQQDLAMLPWQVRPLHQVPGPAGRGQAAALLPGAH

SEQ ID NO: 54214 - protein, 231 aa, Homo sapiens
  Payload ID: 10711
  Gene Symbol: MIOX
  Gene Name: myo-inositol oxygenase
  Uniprot ID: Q9UGB7
  ENSP ID: ENSP00000379082
MKVTVGPDPSLVYRPDVDPEVAKDKASFRNYTSGPLLDRVFTTYKLMHTHQTVDFVRSKHAQFGGFSYKKMTVMEAVDLLDGLVDESDPDVDFPNSFHAFQTAEGIRKAHPDKVPNLPCPSPSQTGSTSSGSCTTWGRSWPCSGSPSGLSSATPSPSDAVRRPPWFSATPPSRTTLTSRILDTAQSSGCISPTVGSTGSSCPGAMMQVRPLHQVPGPAGRGQAAALLPGAH

SEQ ID NO: 54215 - protein, 265 aa, Homo sapiens
  Payload ID: 10711
  Gene Symbol: MIOX
  Gene Name: myo-inositol oxygenase
  ENSP ID: ENSP00000409894
GPDPSLVYRPDVDPEVAKDKASFRNYTSGPLLDRVFTTYKLMHTHQTVDFVRSKHAQFGGFSYKKMTVMEAVDLLDGLVDESDPDVDFPNSFHAFQTAEGIRKAHPDKDWFHLVGLLHDLGKVLALFGEPQASVVFCDSTFQDNPDLQDPRYSTELGMYQPHCGLDRVLMSWGHDEYMYQVMKFNKFSLPPEAFYMIRFHSFYPWHTGRDYQQLCSQQDLAMLPWVREFNKFDLYTKCPDLPDVDKLRPYYQGLIDKYCPGILSW

SEQ ID NO: 54216 - protein, 1589 aa, Homo sapiens
  Payload ID: 10712
  Gene Symbol: MYOM1
  Gene Name: myomesin 1
  Uniprot ID: P52179
  ENSP ID: ENSP00000261606
MSLPFYQRCHQHYDLSYRNKDVRSTVSHYQREKKRSAVYTQGSTAYSSRSSAAHRRESEAFRRASASSSQQQASQHALSSEVSRKAASAYDYGSSHGLTDSSLLLDDYSSKLSPKPKRAKHSLLSGEEKENLPSDYMVPIFSGRQKHVSGITDTEEERIKEAAAYIAQRNLLASEEGITTSKQSTASKQTTASKQSTASKQSTASKQSTASRQSTASRQSVVSKQATSALQQEETSEKKSRKVVIREKAERLSLRKTLEETETYHAKLNEDHLLHAPEFIIKPRSHTVWEKENVKLHCSIAGWPEPRVTWYKNQVPINVHANPGKYIIESRYGMHTLEINGCDFEDTAQYRASAMNVKGELSAYASVVVKRYKGEFDETRFHAGASTMPLSFGVTPYGYASRFEIHFDDKFDVSFGREGETMSLGCRVVITPEIKHFQPEIQWYRNGVPLSPSKWVQTLWSGERATLTFSHLNKEDEGLYTIRVRMGEYYEQYSAYVFVRDADAEIEGAPAAPLDVKCLEANKDYIIISWKQPAVDGGSPILGYFIDKCEVGTDSWSQCNDTPVKFARFPVTGLIEGRSYIFRVRAVNKMGIGFPSRVSEPVAALDPAEKARLKSRPSAPWTGQIIVTEEEPSEGIVPGPPTDLSVTEATRSYVVLSWKPPGQRGHEGIMYFVEKCEAGTENWQRVNTELPVKSPRFALFDLAEGKSYCFRVRCSNSAGVGEPSEATEVTVVGDKLDIPKAPGKIIPSRNTDTSVVVSWEESKDAKELVGYYIEASVAGSGKWEPCNNNPVKGSRFTCHGLVTGQSYIFRVRAVNAAGLSEYSQDSEAIEVKAAIAPPSPPCDITCLESFRDSMVLGWKQPDKIGGAEITGYYVNYREVIDGVPGKWREANVKAVSEEAYKISNLKENMVYQFQVAAMNMAGLGAPSAVSECFKCEEWTIAVPGPPHSLKCSEVRKDSLVLQWKPPVHSGRTPVTGYFVDLKEAKAKEDQWRGLNEAAIKNVYLKVRGLKEGVSYVFRVRAINQAGVGKPSDLAGPVVAETRPGTKEVVVNVDDDGVISLNFECDKMTPKSEFSWSKDYVSTEDSPRLEVESKGNKTKMTFKDLGMDDLGIYSCDVTDTDGIASSYLIDEEELKRLLALSHEHKFPTVPVKSELAVEILEKGQVRFWMQAEKLSGNAKVNYIFNEKEIFEGPKYKMHIDRNTGIIEMFMEKLQDEDEGTYTFQLQDGKATNHSTVVLVGDVFKKLQKEAEFQRQEWIRKQGPHFVEYLSWEVTGECNVLLKCKVANIKKETHIVWYKDEREISVDEKHDFKDGICTLLITEFSKKDAGIYEVILKDDRGKDKSRLKLVDEAFKELMMEVCKKIALSATDLKIQSTAEGIQLYSFVTYYVEDLKVNWSHNGSAIRYSDRVKTGVTGEQIWLQINEPTPNDKGKYVMELFDGKTGHQKTVDLSGQAYDEAYAEFQRLKQAAIAEKNRARVLGGLPDVVTIQEGKALNLTCNVWGDPPPEVSWLKNEKALASDDHCNLKFEAGRTAYFTINGVSTADSGKYGLVVKNKYGSETSDFTVSVFIPEEEARMAALESLKGGKKAK

SEQ ID NO: 54217 - protein, 1685 aa, Homo sapiens
  Payload ID: 10712
  Gene Symbol: MYOM1
  Gene Name: myomesin 1
  Uniprot ID: P52179
  ENSP ID: ENSP00000348821
MSLPFYQRCHQHYDLSYRNKDVRSTVSHYQREKKRSAVYTQGSTAYSSRSSAAHRRESEAFRRASASSSQQQASQHALSSEVSRKAASAYDYGSSHGLTDSSLLLDDYSSKLSPKPKRAKHSLLSGEEKENLPSDYMVPIFSGRQKHVSGITDTEEERIKEAAAYIAQRNLLASEEGITTSKQSTASKQTTASKQSTASKQSTASKQSTASRQSTASRQSVVSKQATSALQQEETSEKKSRKVVIREKAERLSLRKTLEETETYHAKLNEDHLLHAPEFIIKPRSHTVWEKENVKLHCSIAGWPEPRVTWYKNQVPINVHANPGKYIIESRYGMHTLEINGCDFEDTAQYRASAMNVKGELSAYASVVVKRYKGEFDETRFHAGASTMPLSFGVTPYGYASRFEIHFDDKFDVSFGREGETMSLGCRVVITPEIKHFQPEIQWYRNGVPLSPSKWVQTLWSGERATLTFSHLNKEDEGLYTIRVRMGEYYEQYSAYVFVRDADAEIEGAPAAPLDVKCLEANKDYIIISWKQPAVDGGSPILGYFIDKCEVGTDSWSQCNDTPVKFARFPVTGLIEGRSYIFRVRAVNKMGIGFPSRVSEPVAALDPAEKARLKSRPSAPWTGQIIVTEEEPSEGIVPGPPTDLSVTEATRSYVVLSWKPPGQRGHEGIMYFVEKCEAGTENWQRVNTELPVKSPRFALFDLAEGKSYCFRVRCSNSAGVGEPSEATEVTVVGDKLDIPKAPGKIIPSRNTDTSVVVSWEESKDAKELVGYYIEASVAGSGKWEPCNNNPVKGSRFTCHGLVTGQSYIFRVRAVNAAGLSEYSQDSEAIEVKAAIGGGVSPDVCPALSDEPGGLTASRGRVHEASPPTFQKDALLGSKPNKPSLPSSSQNLGQTEVSKVSETVQEELTPPPQKAAPQGKSKSDPLKKKTDRAPPSPPCDITCLESFRDSMVLGWKQPDKIGGAEITGYYVNYREVIDGVPGKWREANVKAVSEEAYKISNLKENMVYQFQVAAMNMAGLGAPSAVSECFKCEEWTIAVPGPPHSLKCSEVRKDSLVLQWKPPVHSGRTPVTGYFVDLKEAKAKEDQWRGLNEAAIKNVYLKVRGLKEGVSYVFRVRAINQAGVGKPSDLAGPVVAETRPGTKEVVVNVDDDGVISLNFECDKMTPKSEFSWSKDYVSTEDSPRLEVESKGNKTKMTFKDLGMDDLGIYSCDVTDTDGIASSYLIDEEELKRLLALSHEHKFPTVPVKSELAVEILEKGQVRFWMQAEKLSGNAKVNYIFNEKEIFEGPKYKMHIDRNTGIIEMFMEKLQDEDEGTYTFQLQDGKATNHSTVVLVGDVFKKLQKEAEFQRQEWIRKQGPHFVEYLSWEVTGECNVLLKCKVANIKKETHIVWYKDEREISVDEKHDFKDGICTLLITEFSKKDAGIYEVILKDDRGKDKSRLKLVDEAFKELMMEVCKKIALSATDLKIQSTAEGIQLYSFVTYYVEDLKVNWSHNGSAIRYSDRVKTGVTGEQIWLQINEPTPNDKGKYVMELFDGKTGHQKTVDLSGQAYDEAYAEFQRLKQAAIAEKNRARVLGGLPDVVTIQEGKALNLTCNVWGDPPPEVSWLKNEKALASDDHCNLKFEAGRTAYFTINGVSTADSGKYGLVVKNKYGSETSDFTVSVFIPEEEARMAALESLKGGKKAK

SEQ ID NO: 54218 - protein, 1452 aa, Homo sapiens
  Payload ID: 10712
  Gene Symbol: MYOM1
  Gene Name: myomesin 1
  ENSP ID: ENSP00000383413
MVPIFSGRQKHVSGITDTEEERIKEAAAYIAQRNLLASEEGITTSKQSTASKQTTASKQSTASKQSTASKQSTASRQSTASRQSVVSKQATSALQQEETSEKKSRKVVIREKAERLSLRKTLEETETYHAKLNEDHLLHAPEFIIKPRSHTVWEKENVKLHCSIAGWPEPRVTWYKNQVPINVHANPGKYIIESRYGMHTLEINGCDFEDTAQYRASAMNVKGELSAYASVVVKRYKGEFDETRFHAGASTMPLSFGVTPYGYASRFEIHFDDKFDVSFGREGETMSLGCRVVITPEIKHFQPEIQWYRNGVPLSPSKWVQTLWSGERATLTFSHLNKEDEGLYTIRVRMGEYYEQYSAYVFVRDADAEIEGAPAAPLDVKCLEANKDYIIISWKQPAVDGGSPILGYFIDKCEVGTDSWSQCNDTPVKFARFPVTGLIEGRSYIFRVRAVNKMGIGFPSRVSEPVAALDPAEKARLKSPLSTLDWTIIVTEEEPSEGIVPGPPTDLSVTEATRSYVVLSWKPPGQRGHEGIMYFVEKCEAGTENWQRVNTELPVKSPRFALFDLAEGKSYCFRVRCSNSAGVGEPSEATEVTVVGDKLDIPKAPGKIIPSRNTDTSVVVSWEESKDAKELVGYYIEASVAGSGKWEPCNNNPVKAHGFTCHGLVTGQSYIFRVRAVNAAGLSEYSQDSEAIEVKAAIAPPSPPCDITCLESFRDSMVLGWKQPDKIGGAEITGYYVNYREVIDGVPGKWREANVKAVSEEAYKISNLKENMVYQFQVAAMNMAGLGAPSAVSECFKCEEWTIAVPGPPHSLKCSEVRKDSLVLQWKPPVHSGRTPVTGYFVDLKEAKAKEDQWRGLNEAAIKNVYLKVRGLKEGVSYVFRVRAINQAGVGKPSDLAGPVVAETRPGTKEVVVNVDDDGVISLNFECDKMTPKSEFSWSKDYVSTEDSPRLEVESKGNKTKMTFKDLGMDDLGIYSCDVTDTDGIASSYLIDEEELKRLLALSHEHKFPTVPVKSELAVEILEKGQVRFWMQAEKLSGNAKVNYIFNEKEIFEGPKYKMHIDRNTGIIEMFMEKLQDEDEGTYTFQLQDGKATNHSTVVLVGDVFKKLQKEAEFQRQEWIRKQGPHFVEYLSWEVTGECNVLLKCKVANIKKETHIVWYKDEREISVDEKHDFKDGICTLLITEFSKKDAGIYEVILKDDRGKDKSRLKLVDEAFKELMMEVCKKIALSATDLKIQSTAEGIQLYSFVTYYVEDLKVNWSHNGSAIRYSDRVKTGVTGEQIWLQINEPTPNDKGKYVMELFDGKTGHQKTVDLSGQAYDEAYAEFQRLKQAAIAEKNRARVLGGLPDVVTIQEGKALNLTCNVWGDPPPEVSWLKNEKALASDDHCNLKFEAGRTAYFTINGVSTADSGKYGLVVKNKYGSETSDFTVSVFIPEEEARMAALESLKGGKKAK

SEQ ID NO: 54219 - protein, 121 aa, Homo sapiens
  Payload ID: 10712
  Gene Symbol: MYOM1
  Gene Name: myomesin 1
  ENSP ID: ENSP00000462039
IEMFMEKLQDEDEGTYTFQLQDGKATNHSTVVLVGDVFKKLQKEAEFQRQEWIRKQGPHFVEYLSWEVTGECNVLLKCKVANIKKETHIVWYKDEREISVDEKHDFKDGICTLLITEPLRN

SEQ ID NO: 54220 - protein, 1465 aa, Homo sapiens
  Payload ID: 10713
  Gene Symbol: MYOM2
  Gene Name: myomesin 2
  Uniprot ID: P54296
  ENSP ID: ENSP00000262113
MSLVTVPFYQKRHRHFDQSYRNIQTRYLLDEYASKKRASTQASSQKSLSQRSSSQRASSQTSLGGTICRVCAKRVSTQEDEEQENRSRYQSLVAAYGEAKRQRFLSELAHLEEDVHLARSQARDKLDKYAIQQMMEDKLAWERHTFEERISRAPEILVRLRSHTVWERMSVKLCFTVQGFPTPVVQWYKDGSLICQAAEPGKYRIESNYGVHTLEINRADFDDTATYSAVATNAHGQVSTNAAVVVRRFRGDEEPFRSVGLPIGLPLSSMIPYTHFDVQFLEKFGVTFRREGETVTLKCTMLVTPDLKRVQPRAEWYRDDVLLKESKWTKMFFGEGQASLSFSHLHKDDEGLYTLRIVSRGGVSDHSAFLFVRDADPLVTGAPGAPMDLQCHDANRDYVIVTWKPPNTTTESPVMGYFVDRCEVGTNNWVQCNDAPVKICKYPVTGLFEGRSYIFRVRAVNSAGISRPSRVSDAVAALDPLDLRRLQAVHLEGEKEIAIYQDDLEGDAQVPGPPTGVHASEISRNYVVLSWEPPTPRGKDPLMYFIEKSVVGSGSWQRVNAQTAVRSPRYAVFDLMEGKSYVFRVLSANRHGLSEPSEITSPIQAQDVTVVPSAPGRVLASRNTKTSVVVQWDRPKHEEDLLGYYVDCCVAGTNLWEPCNHKPIGYNRFVVHGLTTGEQYIFRVKAVNAVGMSENSQESDVIKVQAALTVPSHPYGITLLNCDGHSMTLGWKVPKFSGGSPILGYYLDKREVHHKNWHEVNSSPSKPTILTVDGLTEGSLYEFKIAAVNLAGIGEPSDPSEHFKCEAWTMPEPGPAYDLTFCEVRDTSLVMLWKAPVYSGSSPVSGYFVDFREEDAGEWITVNQTTTASRYLKVSDLQQGKTYVFRVRAVNANGVGKPSDTSEPVLVEARPGTKEISAGVDEQGNIYLGFDCQEMTDASQFTWCKSYEEISDDERFKIETVGDHSKLYLKNPDKEDLGTYSVSVSDTDGVSSSFVLDPEELERLMALSNEIKNPTIPLKSELAYEIFDKGRVRFWLQAEHLSPDASYRFIINDREVSDSEIHRIKCDKATGIIEMVMDRFSIENEGTYTVQIHDGKAKSQSSLVLIGDAFKTVLEEAEFQRKEFLRKQGPHFAEYLHWDVTEECEVRLVCKVANTKKETVFKWLKDDVLYETETLPNLERGICELLIPKLSKKDHGEYKATLKDDRGQDVSILEIAGKVYDDMILAMSRVCGKSASPLKVLCTPEGIRLQCFMKYFTDEMKVNWCHKDAKISSSEHMRIGGSEEMAWLQICEPTEKDKGKYTFEIFDGKDNHQRSLDLSGQAFDEAFAEFQQFKAAAFAEKNRGRLIGGLPDVVTIMEGKTLNLTCTVFGNPDPEVIWFKNDQDIQLSEHFSVKVEQAKYVSMTIKGVTSEDSGKYSINIKNKYGGEKIDVTVSVYKHGEKIPDMAPPQQAKPKLIPASASAAGQ

SEQ ID NO: 54221 - protein, 890 aa, Homo sapiens
  Payload ID: 10713
  Gene Symbol: MYOM2
  Gene Name: myomesin 2
  ENSP ID: ENSP00000428396
MEGKSYVFRVLSANRHGLSEPSEITSPIQAQDVTVVPSAPGRVLASRNTKTSVVVQWDRPKHEEDLLGYYVDCCVAGTNLWEPCNHKPIGYNRFVVHGLTTGEQYIFRVKAVNAVGMSENSQESDVIKVQAALTVPSHPYGITLLNCDGHSMTLGWKVPKFSGGSPILGYYLDKREVHHKNWHEVNSSPSKPTILTVDGLTEGSLYEFKIAAVNLAGIGEPSDPSEHFKCEAWTMPEPGPAYDLTFCEVRDTSLVMLWKAPVYSGSSPVSGYFVDFREEDAGEWITVNQTTTASRYLKVSDLQQGKTYVFRVRAVNANGVGKPSDTSEPVLVEARPGTKEISAGVDEQGNIYLGFDCQEMTDASQFTWCKSYEEISDDERFKIETVGDHSKLYLKNPDKEDLGTYSVSVSDTDGVSSSFVLDPEELERLMALSNEIKNPTIPLKSELAYEIFDKGRVRFWLQAEHLSPDASYRFIINDREVSDSEIHRIKCDKATGIIEMVMDRFSIENEGTYTVQIHDGKAKSQSSLVLIGDAFKTVLEEAEFQRKEFLRKQGPHFAEYLHWDVTEECEVRLVCKVANTKKETVFKWLKDDVLYETETLPNLERGICELLIPKLSKKDHGEYKATLKDDRGQDVSILEIAGKVYDDMILAMSRVCGKSASPLKVLCTPEGIRLQCFMKYFTDEMKVNWCHKDAKISSSEHMRIGGSEEMAWLQICEPTEKDKGKYTFEIFDGKDNHQRSLDLSGQAFDEAFAEFQQFKAAAFAEKNRGRLIGGLPDVVTIMEGKTLNLTCTVFGNPDPEVIWFKNDQDIQLSEHFSVKVEQAKYVSMTIKGVTSEDSGKYSINIKNKYGGEKIDVTVSVYKHGEKIPDMAPPQQAKPKLIPASASAAGQ

SEQ ID NO: 54222 - protein, 1465 aa, Homo sapiens
  Payload ID: 10713
  Gene Symbol: MYOM2
  Gene Name: myomesin 2
  Uniprot ID: P54296
  ENSP ID: ENSP00000478322
MSLVTVPFYQKRHRHFDQSYRNIQTRYLLDEYASKKRASTQASSQKSLSQRSSSQRASSQTSLGGTICRVCAKRVSTQEDEEQENRSRYQSLVAAYGEAKRQRFLSELAHLEEDVHLARSQARDKLDKYAIQQMMEDKLAWERHTFEERISRAPEILVRLRSHTVWERMSVKLCFTVQGFPTPVVQWYKDGSLICQAAEPGKYRIESNYGVHTLEINRADFDDTATYSAVATNAHGQVSTNAAVVVRRFRGDEEPFRSVGLPIGLPLSSMIPYTHFDVQFLEKFGVTFRREGETVTLKCTMLVTPDLKRVQPRAEWYRDDVLLKESKWTKMFFGEGQASLSFSHLHKDDEGLYTLRIVSRGGVSDHSAFLFVRDADPLVTGAPGAPMDLQCHDANRDYVIVTWKPPNTTTESPVMGYFVDRCEVGTNNWVQCNDAPVKICKYPVTGLFEGRSYIFRVRAVNSAGISRPSRVSDAVAALDPLDLRRLQAVHLEGEKEIAIYQDDLEGDAQVPGPPTGVHASEISRNYVVLSWEPPTPRGKDPLMYFIEKSVVGSGSWQRVNAQTAVRSPRYAVFDLMEGKSYVFRVLSANRHGLSEPSEITSPIQAQDVTVVPSAPGRVLASRNTKTSVVVQWDRPKHEEDLLGYYVDCCVAGTNLWEPCNHKPIGYNRFVVHGLTTGEQYIFRVKAVNAVGMSENSQESDVIKVQAALTVPSHPYGITLLNCDGHSMTLGWKVPKFSGGSPILGYYLDKREVHHKNWHEVNSSPSKPTILTVDGLTEGSLYEFKIAAVNLAGIGEPSDPSEHFKCEAWTMPEPGPAYDLTFCEVRDTSLVMLWKAPVYSGSSPVSGYFVDFREEDAGEWITVNQTTTANRYLKVSDLQQGKTYVFRVRAVNANGVGKPSDTSEPVLVEARPGTKEISAGVDEQGNIYLGFDCQEMTDASQFTWCKSYEEISDDERFKIETVGDHSKLYLKNPDKEDLGTYSVSVSDTDGVSSSFVLDPEELERLMALSNEIKNPTIPLKSELAYEIFDKGRVRFWLQAEHLSPDASYRFIINDREVSDSEIHRIKCDKATGIIEMVMDRFSIENEGTYTVQIHDGKAKSQSSLVLIGDAFKTVLEEAEFQRKEFLRKQGPHFAEYLHWDVTEECEVRLVCKVANTKKETVFKWLKDDVLYETETLPNLERGICELLIPKLSKKDHGEYKATLKDDRGQDVSILEIAGKVYDDMILAMSRVCGKSASPLKVLCTPEGIRLQCFMKYFTDEMKVNWCHKDAKISSSEHMRIGGSEEMAWLQICEPTEKDKGKYTFEIFDGKDNHQRSLDLSGQAFDEAFAEFQQFKAAAFAEKNRGRLIGGLPDVVTIMEGKTLNLTCTVFGNPDPEVIWFKNDQDIQLSEHFSVKVEQAKYVSMTIKGVTSEDSGKYSINIKNKYGGEKIDVTVSVYKHGEKIPDMAPPQQAKPKLIPASASAAGQ

SEQ ID NO: 54223 - protein, 890 aa, Homo sapiens
  Payload ID: 10713
  Gene Symbol: MYOM2
  Gene Name: myomesin 2
  ENSP ID: ENSP00000487697
MEGKSYVFRVLSANRHGLSEPSEITSPIQAQDVTVVPSAPGRVLASRNTKTSVVVQWDRPKHEEDLLGYYVDCCVAGTNLWEPCNHKPIGYNRFVVHGLTTGEQYIFRVKAVNAVGMSENSQESDVIKVQAALTVPSHPYGITLLNCDGHSMTLGWKVPKFSGGSPILGYYLDKREVHHKNWHEVNSSPSKPTILTVDGLTEGSLYEFKIAAVNLAGIGEPSDPSEHFKCEAWTMPEPGPAYDLTFCEVRDTSLVMLWKAPVYSGSSPVSGYFVDFREEDAGEWITVNQTTTANRYLKVSDLQQGKTYVFRVRAVNANGVGKPSDTSEPVLVEARPGTKEISAGVDEQGNIYLGFDCQEMTDASQFTWCKSYEEISDDERFKIETVGDHSKLYLKNPDKEDLGTYSVSVSDTDGVSSSFVLDPEELERLMALSNEIKNPTIPLKSELAYEIFDKGRVRFWLQAEHLSPDASYRFIINDREVSDSEIHRIKCDKATGIIEMVMDRFSIENEGTYTVQIHDGKAKSQSSLVLIGDAFKTVLEEAEFQRKEFLRKQGPHFAEYLHWDVTEECEVRLVCKVANTKKETVFKWLKDDVLYETETLPNLERGICELLIPKLSKKDHGEYKATLKDDRGQDVSILEIAGKVYDDMILAMSRVCGKSASPLKVLCTPEGIRLQCFMKYFTDEMKVNWCHKDAKISSSEHMRIGGSEEMAWLQICEPTEKDKGKYTFEIFDGKDNHQRSLDLSGQAFDEAFAEFQQFKAAAFAEKNRGRLIGGLPDVVTIMEGKTLNLTCTVFGNPDPEVIWFKNDQDIQLSEHFSVKVEQAKYVSMTIKGVTSEDSGKYSINIKNKYGGEKIDVTVSVYKHGEKIPDMAPPQQAKPKLIPASASAAGQ

SEQ ID NO: 54224 - protein, 330 aa, Homo sapiens
  Payload ID: 10714
  Gene Symbol: MYOM3
  Gene Name: myomesin 3
  Uniprot ID: Q5VTT5
  ENSP ID: ENSP00000342689
MDISKKNRVRQGSRGRGKTISKNSESRGQQRRHMVTNTKKETRFQWFFQRAEMPDGQYDPETGTGLLCIEELSKKDKGIYRAMVSDDRGEDDTILDLTGDALDAIFTELGRIGALSATPLKIQGTEEGIRIFSKVKYYNVEYMKTTWFHKDKRLESGDRIRTGTTLDEIWLHILDPKDSDKGKYTLEIAAGKEVRQLSTDLSGQAFEDAMAEHQRLKTLAIIEKNRAKVVRGLPDVATIMEDKTLCLTCIVSGDPTPEISWLKNDQPVTFLDRYRMEVRGTEVTITIEKVNSEDSGRYGVFVKNKYGSETGQVTISVFKHGDEPKELKSM

SEQ ID NO: 54225 - protein, 1437 aa, Homo sapiens
  Payload ID: 10714
  Gene Symbol: MYOM3
  Gene Name: myomesin 3
  Uniprot ID: Q5VTT5
  ENSP ID: ENSP00000363557
MTLPHSLGGAGDPRPPQAMEVHRLEHRQEEEQKEERQHSLRMGSSVRRRTFRSSEEEHEFSAADYALAAALALTASSELSWEAQLRRQTSAVELEERGQKRVGFGNDWERTEIAFLQTHRLLRQRRDWKTLRRRTEEKVQEAKELRELCYGRGPWFWIPLRSHAVWEHTTVLLTCTVQASPPPQVTWYKNDTRIDPRLFRAGKYRITNNYGLLSLEIRRCAIEDSATYTVRVKNAHGQASSFAKVLVRTYLGKDAGFDSEIFKRSTFGPSVEFTSVLKPVFAREKEPFSLSCLFSEDVLDAESIQWFRDGSLLRSSRRRKILYTDRQASLKVSCTYKEDEGLYMVRVPSPFGPREQSTYVLVRDAEAENPGAPGSPLNVRCLDVNRDCLILTWAPPSDTRGNPITAYTIERCQGESGEWIACHEAPGGTCRCPIQGLVEGQSYRFRVRAISRVGSSVPSKASELVVMGDHDAARRKTEIPFDLGNKITISTDAFEDTVTIPSPPTNVHASEIREAYVVLAWEEPSPRDRAPLTYSLEKSVIGSGTWEAISSESPVRSPRFAVLDLEKKKSYVFRVRAMNQYGLSDPSEPSEPIALRGPPATLPPPAQVQAFRDTQTSVSLTWDPVKDPELLGYYIYSRKVGTSEWQTVNNKPIQGTRFTVPGLRTGKEYEFCVRSVSEAGVGESSAATEPIRVKQALATPSAPYGFALLNCGKNEMVIGWKPPKRRGGGKILGYFLDQHDSEELDWHAVNQQPIPTRVCKVSDLHEGHFYEFRARAANWAGVGELSAPSSLFECKEWTMPQPGPPYDVRASEVRATSLVLQWEPPLYMGAGPVTGYHVSFQEEGSEQWKPVTPGPISGTHLRVSDLQPGKSYVFQVQAMNSAGLGQPSMPTDPVLLEDKPGAHEIEVGVDEEGFIYLAFEAPEAPDSSEFQWSKDYKGPLDPQRVKIEDKVNKSKVILKEPGLEDLGTYSVIVTDADEDISASHTLTEEELEKLKKLSHEIRNPVIKLISGWNIDILERGEVRLWLEVEKLSPAAELHLIFNNKEIFSSPNRKINFDREKGLVEVIIQNLSEEDKGSYTAQLQDGKAKNQITLTLVDDDFDKLLRKADAKRRDWKRKQGPYFERPLQWKVTEDCQVQLTCKVTNTKKETRFQWFFQRAEMPDGQYDPETGTGLLCIEELSKKDKGIYRAMVSDDRGEDDTILDLTGDALDAIFTELGRIGALSATPLKIQGTEEGIRIFSKVKYYNVEYMKTTWFHKDKRLESGDRIRTGTTLDEIWLHILDPKDSDKGKYTLEIAAGKEVRQLSTDLSGQAFEDAMAEHQRLKTLAIIEKNRAKVVRGLPDVATIMEDKTLCLTCIVSGDPTPEISWLKNDQPVTFLDRYRMEVRGTEVTITIEKVNSEDSGRYGVFVKNKYGSETGQVTISVFKHGDEPKELKSM

SEQ ID NO: 54226 - protein, 610 aa, Homo sapiens
  Payload ID: 10715
  Gene Symbol: MYNN
  Gene Name: myoneurin
  Uniprot ID: Q9NPC7
  ENSP ID: ENSP00000326240
MQYSHHCEHLLERLNKQREAGFLCDCTIVIGEFQFKAHRNVLASFSEYFGAIYRSTSENNVFLDQSQVKADGFQKLLEFIYTGTLNLDSWNVKEIHQAADYLKVEEVVTKCKIKMEDFAFIANPSSTEISSITGNIELNQQTCLLTLRDYNNREKSEVSTDLIQANPKQGALAKKSSQTKKKKKAFNSPKTGQNKTVQYPSDILENASVELFLDANKLPTPVVEQVAQINDNSELELTSVVENTFPAQDIVHTVTVKRKRGKSQPNCALKEHSMSNIASVKSPYEAENSGEELDQRYSKAKPMCNTCGKVFSEASSLRRHMRIHKGVKPYVCHLCGKAFTQCNQLKTHVRTHTGEKPYKCELCDKGFAQKCQLVFHSRMHHGEEKPYKCDVCNLQFATSSNLKIHARKHSGEKPYVCDRCGQRFAQASTLTYHVRRHTGEKPYVCDTCGKAFAVSSSLITHSRKHTGEKPYICGICGKSFISSGELNKHFRSHTGERPFICELCGNSYTDIKNLKKHKTKVHSGADKTLDSSAEDHTLSEQDSIQKSPLSETMDVKPSDMTLPLALPLGTEDHHMLLPVTDTQSPTSDTLLRSTVNGYSEPQLIFLQQLY

SEQ ID NO: 54227 - protein, 610 aa, Homo sapiens; identical to SEQ ID NO: 54226
  Payload ID: 10715
  Gene Symbol: MYNN
  Gene Name: myoneurin
  Uniprot ID: Q9NPC7
  ENSP ID: ENSP00000349150

SEQ ID NO: 54228 - protein, 581 aa, Homo sapiens
  Payload ID: 10715
  Gene Symbol: MYNN
  Gene Name: myoneurin
  Uniprot ID: Q9NPC7
  ENSP ID: ENSP00000440637
MQYSHHCEHLLERLNKQREAGFLCDCTIVIGEFQFKAHRNVLASFSEYFGAIYRSTSENNVFLDQSQVKADGFQKLLEFIYTGTLNLDSWNVKEIHQAADYLKVEEVVTKCKIKMEDFAFIANPSSTEISSITGNIELNQQTCLLTLRDYNNREKSEVSTDLIQANPKQGALAKKSSQTKKKKKAFNSPKTGQNKTVQYPSDILENASVELFLDANKLPTPVVEQVAQINDNSELELTSVVENTFPAQDIVHTVTVKRKRGKSQPNCALKEHSMSNIASVKSPYEAENSGEELDQRYSKAKPMCNTCGKVFSEASSLRRHMRIHKGVKPYVCHLCGKAFTQCNQLKTHVRTHTGEKPYKCELCDKGFAQKCQLVFHSRMHHGEEKPYKCDVCNLQFATSSNLKIHARKHSGEKPYVCDRCGQRFAQASTLTYHVRRHTGEKPYVCDTCGKAFAVSSSLITHSRKHTGEKPYICGICGKSFISSGELNKHFRSHTGADKTLDSSAEDHTLSEQDSIQKSPLSETMDVKPSDMTLPLALPLGTEDHHMLLPVTDTQSPTSDTLLRSTVNGYSEPQLIFLQQLY

SEQ ID NO: 54229 - protein, 238 aa, Homo sapiens
  Payload ID: 10715
  Gene Symbol: MYNN
  Gene Name: myoneurin
  ENSP ID: ENSP00000473335
  MOD_RES (1)..(1): Any amino acid
XQPNCALKEHSMSNIASVKSPYEAENSGEELDQRYSKAKPMCNTCGKVFSEASSLRRHMRIHKGVKPYVCHLCGKAFTQCNQLKTHVRTHTGEKPYKCELCDKGFAQKCQLVFHSRMHHGEEKPYKCDVCNLQFATSSNLKIHARKHSGEKPYVCDRCGQRFAQASTLTYHVRRHTGEKPYVCDTCGKAFAVSSSLITHSRKHTGEKPYICGICGKSFISSGELNKHFRSHTVVWSMN

SEQ ID NO: 54230 - protein, 91 aa, Homo sapiens
  Payload ID: 10715
  Gene Symbol: MYNN
  Gene Name: myoneurin
  Uniprot ID: Q9NPC7
  ENSP ID: ENSP00000473654
MQYSHHCEHLLERLNKQREAGFLCDCTIVIGEFQFKAHRNVLASFSEYFGAIYRSTSENNVFLDQSQVKADGFQKLLEFIYTGTLNLDRDI

SEQ ID NO: 54231 - protein, 1045 aa, Homo sapiens
  Payload ID: 10716
  Gene Symbol: MYPN
  Gene Name: myopalladin
  Uniprot ID: Q86TC9
  ENSP ID: ENSP00000346369
MLTVQVKTSSAIELPDSLAFLWIIPMWYCEGKELENSPDIHIVQAGNLHSLTIAEAFEEDTGRYSCFASNIYGTDSTSAEIYIEGVSSSDSEGDPNKEEMNRIQKPNEVSSPPTTSAVIPPAVPQAQHLVAQPRVATIQQCQSPTNYLQGLDGKPIIAAPVFTKMLQNLSASEGQLVVFECRVKGAPSPKVEWYREGTLIEDSPDFRILQKKPRSMAEPEEICTLVIAEVFAEDSGCFTCTASNKYGTVSSIAQLHVRGNEDLSNNGSLHSANSTTNLAAIEPQPSPPHSEPPSVEQPPKPKLEGVLVNHNEPRSSSRIGLRVHFNLPEDDKGSEASSEAGVVTTRQTRPDSFQERFNGQATKTPEPSSPVKEPPPVLAKPKLDSTQLQQLHNQVLLEQHQLQNPPPSSPKEFPFSMTVLNSNAPPAVTTSSKQVKAPSSQTFSLARPKYFFPSTNTTAATVAPSSSPVFTLSSTPQTIQRTVSKESLLVSHPSVQTKSPGGLSIQNEPLPPGPTEPTPPPFTFSIPSGNQFQPRCVSPIPVSPTSRIQNPVAFLSSVLPSLPAIPPTNAMGLPRSAPSMPSQGLAKKNTKSPQPVNDDNIRETKNAVIRDLGKKITFSDVRPNQQEYKISSFEQRLMNEIEFRLERTPVDESDDEIQHDEIPTGKCIAPIFDKRLKHFRVTEGSPVTFTCKIVGIPVPKVYWFKDGKQISKRNEHCKMRREGDGTCSLHIESTTSDDDGNYTIMAANPQGRISCSGHLMVQSLPIRSRLTSAGQSHRGRSRVQERDKEPLQERFFRPHFLQAPGDMVAHEGRLCRLDCKVSGLPPPELTWLLNGQPVLPDASHKMLVRETGVHSLLIDPLTQRDAGTYKCIATNKTGQNSFSLELSVVAKEVKKAPVILEKLQNCGVPEGHPVRLECRVIGMPPPVFYWKKDNETIPCTRERISMHQDTTGYACLLIQPAKKSDAGWYTLSAKNEAGIVSCTARLDIYAQWHHQIPPPMSVRPSGSRYGSLTSKGLDIFSAFSSMESTMVYSCSSRSVVESDEL

SEQ ID NO: 54232 - protein, 1320 aa, Homo sapiens
  Payload ID: 10716
  Gene Symbol: MYPN
  Gene Name: myopalladin
  Uniprot ID: Q86TC9
  ENSP ID: ENSP00000351790
MQDDSIEASTSISQLLRESYLAETRHRGNNERSRAEPSSNPCHFGSPSGAAEGGGGQDDLPDLSAFLSQEELDESVNLARLAINYDPLEKADETQARKRLSPDQMKHSPNLSFEPNFCQDNPRSPTSSKESPQEAKRPQYCSETQSKKVFLNKAADFIEELSSLFKSHSSKRIRPRACKNHKSKLESQNKVMQENSSSFSDLSERRERSSVPIPIPADTRDNEVNHALEQQEAKRREAEQAASEAAGGDTTPGSSPSSLYYEEPLGQPPRFTQKLRSREVPEGTRVQLDCIVVGIPPPQVRWYCEGKELENSPDIHIVQAGNLHSLTIAEAFEEDTGRYSCFASNIYGTDSTSAEIYIEGVSSSDSEGDPNKEEMNRIQKPNEVSSPPTTSAVIPPAVPQAQHLVAQPRVATIQQCQSPTNYLQGLDGKPIIAAPVFTKMLQNLSASEGQLVVFECRVKGAPSPKVEWYREGTLIEDSPDFRILQKKPRSMAEPEEICTLVIAEVFAEDSGCFTCTASNKYGTVSSIAQLHVRGNEDLSNNGSLHSANSTTNLAAIEPQPSPPHSEPPSVEQPPKPKLEGVLVNHNEPRSSSRIGLRVHFNLPEDDKGSEASSEAGVVTTRQTRPDSFQERFNGQATKTPEPSSPVKEPPPVLAKPKLDSTQLQQLHNQVLLEQHQLQNPPPSSPKEFPFSMTVLNSNAPPAVTTSSKQVKAPSSQTFSLARPKYFFPSTNTTAATVAPSSSPVFTLSSTPQTIQRTVSKESLLVSHPSVQTKSPGGLSIQNEPLPPGPTEPTPPPFTFSIPSGNQFQPRCVSPIPVSPTSRIQNPVAFLSSVLPSLPAIPPTNAMGLPRSAPSMPSQGLAKKNTKSPQPVNDDNIRETKNAVIRDLGKKITFSDVRPNQQEYKISSFEQRLMNEIEFRLERTPVDESDDEIQHDEIPTGKCIAPIFDKRLKHFRVTEGSPVTFTCKIVGIPVPKVYWFKDGKQISKRNEHCKMRREGDGTCSLHIESTTSDDDGNYTIMAANPQGRISCSGHLMVQSLPIRSRLTSAGQSHRGRSRVQERDKEPLQERFFRPHFLQAPGDMVAHEGRLCRLDCKVSGLPPPELTWLLNGQPVLPDASHKMLVRETGVHSLLIDPLTQRDAGTYKCIATNKTGQNSFSLELSVVAKEVKKAPVILEKLQNCGVPEGHPVRLECRVIGMPPPVFYWKKDNETIPCTRERISMHQDTTGYACLLIQPAKKSDAGWYTLSAKNEAGIVSCTARLDIYAQWHHQIPPPMSVRPSGSRYGSLTSKGLDIFSAFSSMESTMVYSCSSRSVVESDEL

SEQ ID NO: 54233 - protein, 507 aa, Homo sapiens
  Payload ID: 10716
  Gene Symbol: MYPN
  Gene Name: myopalladin
  Uniprot ID: Q86TC9
  ENSP ID: ENSP00000362779
MQDDSIEASTSISQLLRESYLAETRHRGNNERSRAEPSSNPCHFGSPSGAAEGGGGQDDLPDLSAFLSQEELDESVNLARLAINYDPLEKADETQARKRLSPDQMKHSPNLSFEPNFCQDNPRSPTSSKESPQEAKRPQYCSETQSKKVFLNKAADFIEELSSLFKSHSSKRIRPRACKNHKSKLESQNKVMQENSSSFSDLSERRERSSVPIPIPADTRDNEVNHALEQQEAKRREAEQAASEAAGGDTTPGSSPSSLYYEEPLGQPPRFTQKLRSREVPEGTRVQLDCIVVGIPPPQVRWYCEGKELENSPDIHIVQAGNLHSLTIAEAFEEDTGRYSCFASNIYGTDSTSAEIYIEGVSSSDSEGDPNKEEMNRIQKPNEVSSPPTTSAVIPPAVPQAQHLVAQPRVATIQQCQSPTNYLQGLDGKPIIAAPVFTKMLQNLSASEGQLVVFECRVKGAPSPKVEWYREGTLIEDSPDFRILQKKPRSMAEPGKDDFNFNLLVYE

SEQ ID NO: 54234 - protein, 1320 aa, Homo sapiens; identical to SEQ ID NO: 54232
  Payload ID: 10716
  Gene Symbol: MYPN
  Gene Name: myopalladin
  Uniprot ID: Q86TC9
  ENSP ID: ENSP00000441668

SEQ ID NO: 54235 - protein, 1026 aa, Homo sapiens
  Payload ID: 10716
  Gene Symbol: MYPN
  Gene Name: myopalladin
  ENSP ID: ENSP00000480757
MFPLSFWWYCEGKELENSPDIHIVQAGNLHSLTIAEAFEEDTGRYSCFASNIYGTDSTSAEIYIEGVSSSDSEGDPNKEEMNRIQKPNEVSSPPTTSAVIPPAVPQAQHLVAQPRVATIQQCQSPTNYLQGLDGKPIIAAPVFTKMLQNLSASEGQLVVFECRVKGAPSPKVEWYREGTLIEDSPDFRILQKKPRSMAEPEEICTLVIAEVFAEDSGCFTCTASNKYGTVSSIAQLHVRGNEDLSNNGSLHSANSTTNLAAIEPQPSPPHSEPPSVEQPPKPKLEGVLVNHNEPRSSSRIGLRVHFNLPEDDKGSEASSEAGVVTTRQTRPDSFQERFNGQATKTPEPSSPVKEPPPVLAKPKLDSTQLQQLHNQVLLEQHQLQNPPPSSPKEFPFSMTVLNSNAPPAVTTSSKQVKAPSSQTFSLARPKYFFPSTNTTAATVAPSSSPVFTLSSTPQTIQRTVSKESLLVSHPSVQTKSPGGLSIQNEPLPPGPTEPTPPPFTFSIPSGNQFQPRCVSPIPVSPTSRIQNPVAFLSSVLPSLPAIPPTNAMGLPRSAPSMPSQGLAKKNTKSPQPVNDDNIRETKNAVIRDLGKKITFSDVRPNQQEYKISSFEQRLMNEIEFRLERTPVDESDDEIQHDEIPTGKCIAPIFDKRLKHFRVTEGSPVTFTCKIVGIPVPKVYWFKDGKQISKRNEHCKMRREGDGTCSLHIESTTSDDDGNYTIMAANPQGRISCSGHLMVQSLPIRSRLTSAGQSHRGRSRVQERDKEPLQERFFRPHFLQAPGDMVAHEGRLCRLDCKVSGLPPPELTWLLNGQPVLPDASHKMLVRETGVHSLLIDPLTQRDAGTYKCIATNKTGQNSFSLELSVVAKEVKKAPVILEKLQNCGVPEGHPVRLECRVIGMPPPVFYWKKDNETIPCTRERISMHQDTTGYACLLIQPAKKSDAGWYTLSAKNEAGIVSCTARLDIYAQWHHQIPPPMSVRPSGSRYGSLTSKGLDIFSAFSSMESTMVYSCSSRSVVESDEL

SEQ ID NO: 54236 - protein, 1 aa, Homo sapiens
  Payload ID: 10717
  Gene Symbol: MRLN
  Gene Name: myoregulin
  ENSP ID: ENSP00000487738
M

SEQ ID NO: 54237 - protein, 46 aa, Homo sapiens
  Payload ID: 10717
  Gene Symbol: MRLN
  Gene Name: myoregulin
  Uniprot ID: P0DMT0
  ENSP ID: ENSP00000488299
MTGKNWILISTTTPKSLEDEIVGRLLKILFVIFVDLISIIYVVITS

SEQ ID NO: 54238 - protein, 46 aa, Homo sapiens; identical to SEQ ID NO: 54237
  Payload ID: 10717
  Gene Symbol: MRLN
  Gene Name: myoregulin
  Uniprot ID: P0DMT0
  ENSP ID: ENSP00000488429

SEQ ID NO: 54239 - protein, 46 aa, Homo sapiens; identical to SEQ ID NO: 54237
  Payload ID: 10717
  Gene Symbol: MRLN
  Gene Name: myoregulin
  Uniprot ID: P0DMT0
  ENSP ID: ENSP00000488584

SEQ ID NO: 54240 - protein, 1 aa, Homo sapiens
  Payload ID: 10717
  Gene Symbol: MRLN
  Gene Name: myoregulin
  ENSP ID: ENSP00000488673
M

SEQ ID NO: 54241 - protein, 46 aa, Homo sapiens; identical to SEQ ID NO: 54237
  Payload ID: 10717
  Gene Symbol: MRLN
  Gene Name: myoregulin
  Uniprot ID: P0DMT0
  ENSP ID: ENSP00000488748

SEQ ID NO: 54242 - protein, 1274 aa, Homo sapiens [sequence omitted]

SEQ ID NO: 54243 - protein, 1274 aa, Homo sapiens
  Payload ID: 10718
  Gene Symbol: MYBPC3
  Gene Name: myosin binding protein C, cardiac
  ENSP ID: ENSP00000382193
MPEPGKKPVSAFSKKPRSVEVAAGSPAVFEAETERAGVKVRWQRGGSDISASNKYGLATEGTRHTLTVREVGPADQGSYAVIAGSSKVKFDLKVIEAEKAEPMLAPAPAPAEATGAPGEAPAPAAELGESAPSPKGSSSAALNGPTPGAPDDPIGLFVMRPQDGEVTVGGSITFSARVAGASLLKPPVVKWFKGKWVDLSSKVGQHLQLHDSYDRASKVYLFELHITDAQPAFTGSYRCEVSTKDKFDCSNFNLTVHEAMGTGDLDLLSAFRRTSLAGGGRRISDSHEDTGILDFSSLLKKSSSFRTPRDSKLEAPAEEDVWEILRQAPPSEYERIAFQYGVTDLRGMLKRLKGMRRDEKKSTAFQKKLEPAYQVSKGHKIRLTVELADHDAEVKWLKNGQEIQMSGSKYIFESIGAKRTLTISQCSLADDAAYQCVVGGEKCSTELFVKEPPVLITRPLEDQLVMVGQRVEFECEVSEEGAQVKWLKDGVELTREETFKYRFKKDGQRHHLIINEAMLEDAGHYALCTSGGQALAELIVQEKKLEVYQSIADLMVGAKDQAVFKCEVSDENVRGVWLKNGKELVPDSRIKVSHIGRVHKLTIDDVTPADEADYSFVPEGFACNLSAKLHFMEVKIDFVPRQEPPKIHLDCPGRIPDTIVVVAGNKLRLDVPISGDPAPTVIWQKAITQGNKAPARPAPDAPEDTGDSDEWVFDKKLLCETEGRVRVETTKDRSIFTVEGAEKEDEGVYTVTVKNPVGEDQVNLTVKVIDVPDAPAAPKISNVGEDSCTVQWEPPAYDGGQPILGYILERKKKKSYRWMRLNFDLIQELSHEARRMIEGVVYEMRVYAVNAIGMSRPSPASQPFMPIGPPSEPTHLAVEDVSDTTVSLKWRPPERVGAGGLDGYSVEYCPEGCSEWVAALQGLTEHTSILVKDLPTGARLLFRVRAHNMAGPGAPVTTTEPVTVQEILQRPRLQLPRHLRQTIQKKVGEPVNLLIPFQGKPRPQVTWTKEGQPLAGEEVSIRNSPTDTILFIRAARRVHSGTYQVTVRIENMEDKATLVLQVVDKPSPPQDLRVTDAWGLNVALEWKPPQDVGNTELWGYTVQKADKKTMEWFTVLEHYRRTHCVVPELIIGNGYYFRVFSQNMVGFSDRAATTKEPVFIPRPGITYEPPNYKALDFSEAPSFTQPLVNRSVIAGYTAMLCCAVRGSPKPKISWFKNGLDLGEDARFRMFSKQGVLTLEIRKPCPFDGGIYVCRATNLQGEARCECRLEVRVPQ

SEQ ID NO: 54244 - protein, 1274 aa, Homo sapiens
  Payload ID: 10718
  Gene Symbol: MYBPC3
  Gene Name: myosin binding protein C, cardiac
  Uniprot ID: Q14896
  ENSP ID: ENSP00000442795
MPEPGKKPVSAFSKKPRSVEVAAGSPAVFEAETERAGVKVRWQRGGSDISASNKYGLATEGTRHTLTVREVGPADQGSYAVIAGSSKVKFDLKVIEAEKAEPMLAPAPAPAEATGAPGEAPAPAAELGESAPSPKGSSSAALNGPTPGAPDDPIGLFVMRPQDGEVTVGGSITFSARVAGASLLKPPVVKWFKGKWVDLSSKVGQHLQLHDSYDRASKVYLFELHITDAQPAFTGSYRCEVSTKDKFDCSNFNLTVHEAMGTGDLDLLSAFRRTSLAGGGRRISDSHEDTGILDFSSLLKKRDSFRTPRDSKLEAPAEEDVWEILRQAPPSEYERIAFQYGVTDLRGMLKRLKGMRRDEKKSTAFQKKLEPAYQVSKGHKIRLTVELADHDAEVKWLKNGQEIQMSGSKYIFESIGAKRTLTISQCSLADDAAYQCVVGGEKCSTELFVKEPPVLITRPLEDQLVMVGQRVEFECEVSEEGAQVKWLKDGVELTREETFKYRFKKDGQRHHLIINEAMLEDAGHYALCTSGGQALAELIVQEKKLEVYQSIADLMVGAKDQAVFKCEVSDENVRGVWLKNGKELVPDSRIKVSHIGRVHKLTIDDVTPADEADYSFVPEGFACNLSAKLHFMEVKIDFVPRQEPPKIHLDCPGRIPDTIVVVAGNKLRLDVPISGDPAPTVIWQKAITQGNKAPARPAPDAPEDTGDSDEWVFDKKLLCETEGRVRVETTKDRSIFTVEGAEKEDEGVYTVTVKNPVGEDQVNLTVKVIDVPDAPAAPKISNVGEDSCTVQWEPPAYDGGQPILGYILERKKKKSYRWMRLNFDLIQELSHEARRMIEGVVYEMRVYAVNAIGMSRPSPASQPFMPIGPPSEPTHLAVEDVSDTTVSLKWRPPERVGAGGLDGYSVEYCPEGCSEWVAALQGLTEHTSILVKDLPTGARLLFRVRAHNMAGPGAPVTTTEPVTVQEILQRPRLQLPRHLRQTIQKKVGEPVNLLIPFQGKPRPQVTWTKEGQPLAGEEVSIRNSPTDTILFIRAARRVHSGTYQVTVRIENMEDKATLVLQVVDKPSPPQDLRVTDAWGLNVALEWKPPQDVGNTELWGYTVQKADKKTMEWFTVLEHYRRTHCVVPELIIGNGYYFRVFSQNMVGFSDRAATTKEPVFIPRPGITYEPPNYKALDFSEAPSFTQPLVNRSVIAGYTAMLCCAVRGSPKPKISWFKNGLDLGEDARFRMFSKQGVLTLEIRKPCPFDGGIYVCRATNLQGEARCECRLEVRVPQ

SEQ ID NO: 54245 - protein, 808 aa, Homo sapiens
  Payload ID: 10718
  Gene Symbol: MYBPC3
  Gene Name: myosin binding protein C, cardiac
  ENSP ID: ENSP00000444259
MPEPGKKPVSAFSKKPRSVEVAAGSPAVFEAETERAGVKVRWQRGGSDISASNKYGLATEGTRHTLTVREVGPADQGSYAVIAGSSKVKFDLKVIEAEKAEPMLAPAPAPAEATGAPGEAPAPAAELGESAPSPKGSSSAALNGPTPGAPDDPIGLFVMRPQDGEVTVGGSITFSARVAGASLLKPPVVKWFKGKWVDLSSKVGQHLQLHDSYDRASKVYLFELHITDAQPAFTGSYRCEVSTKDKFDCSNFNLTVHEAMGTGDLDLLSAFRRTSLAGGGRRISDSHEDTGILDFSSLLKKRDSFRTPRDSKLEAPAEEDVWEILRQAPPSEYERIAFQYGVTDLRGMLKRLKGMRRDEKKSTAFQKKLEPAYQVSKGHKIRLTVELADHDAEVKWLKNGQEIQMSGSKYIFESIGAKRTLTISQCSLADDAAYQCVVGGEKCSTELFVKEPPVLITRPLEDQLVMVGQRVEFECEVSEEGAQVKWLKDGVELTREETFKYRFKKDGQRHHLIINEAMLEDAGHYALCTSGGQALAELIVQEKKLEVYQSIADLMVGAKDQAVFKCEVSDENVRGVWLKNGKELVPDSRIKVSHIGRVHKLTIDDVTPADEADYSFVPEGFACNLSAKLHFMEVKIDFVPRQEPPKIHLDCPGRIPDTIVVVAGNKLRLDVPISGDPAPTVIWQKAITQGNKAPARPAPDAPEDTGDSDEWVFDKKLLCETEGRVRVETTKDRSIFTVEGAEKEDEGVYTVTVKNPVGEDQVNLTVKVIDVPDAPAAPKISNVGEDSCTVQWEPPAYDGGQPILGAES

SEQ ID NO: 54246 - protein, 1141 aa, Homo sapiens
  Payload ID: 10719
  Gene Symbol: MYBPC2
  Gene Name: myosin binding protein C, fast type
  Uniprot ID: Q14324
  ENSP ID: ENSP00000350332
MPEAKPAAKKAPKGKDAPKGAPKEAPPKEAPAEAPKEAPPEDQSPTAEEPTGVFLKKPDSVSVETGKDAVVVAKVNGKELPDKPTIKWFKGKWLELGSKSGARFSFKESHNSASNVYTVELHIGKVVLGDRGYYRLEVKAKDTCDSCGFNIDVEAPRQDASGQSLESFKRTSEKKSDTAGELDFSGLLKKREVVEEEKKKKKKDDDDLGIPPEIWELLKGAKKSEYEKIAFQYGITDLRGMLKRLKKAKVEVKKSAAFTKKLDPAYQVDRGNKIKLMVEISDPDLTLKWFKNGQEIKPSSKYVFENVGKKRILTINKCTLADDAAYEVAVKDEKCFTELFVKEPPVLIVTPLEDQQVFVGDRVEMAVEVSEEGAQVMWMKDGVELTREDSFKARYRFKKDGKRHILIFSDVVQEDRGRYQVITNGGQCEAELIVEEKQLEVLQDIADLTVKASEQAVFKCEVSDEKVTGKWYKNGVEVRPSKRITISHVGRFHKLVIDDVRPEDEGDYTFVPDGYALSLSAKLNFLEIKVEYVPKQEPPKIHLDCSGKTSENAIVVVAGNKLRLDVSITGEPPPVATWLKGDEVFTTTEGRTRIEKRVDCSSFVIESAQREDEGRYTIKVTNPVGEDVASIFLQVVDVPDPPEAVRITSVGEDWAILVWEPPMYDGGKPVTGYLVERKKKGSQRWMKLNFEVFTETTYESTKMIEGILYEMRVFAVNAIGVSQPSMNTKPFMPIAPTSEPLHLIVEDVTDTTTTLKWRPPNRIGAGGIDGYLVEYCLEGSEEWVPANTEPVERCGFTVKNLPTGARILFRVVGVNIAGRSEPATLAQPVTIREIAEPPKIRLPRHLRQTYIRKVGEQLNLVVPFQGKPRPQVVWTKGGAPLDTSRVHVRTSDFDTVFFVRQAARSDSGEYELSVQIENMKDTATIRIRVVEKAGPPINVMVKEVWGTNALVEWQAPKDDGNSEIMGYFVQKADKKTMEWFNVYERNRHTSCTVSDLIVGNEYYFRVYTENICGLSDSPGVSKNTARILKTGITFKPFEYKEHDFRMAPKFLTPLIDRVVVAGYSAALNCAVRGHPKPKVVWMKNKMEIREDPKFLITNYQGVLTLNIRRPSPFDAGTYTCRAVNELGEALAECKLEVRVPQ

SEQ ID NO: 54247 - protein, 1148 aa, Homo sapiens
  Payload ID: 10720
  Gene Symbol: MYBPC1
  Gene Name: myosin binding protein C, slow type
  Uniprot ID: Q00872
  ENSP ID: ENSP00000354845
MPEPTKKEENEVPAPAPPPEEPSKEKEAGTTPAKDEEEVSPPSALPPGLGSRALERKDSDWTLVETPPGEEQAKQNANSQLSILFIEKPQGGTVKVGEDITFIAKVKAEDLLRKPTIKWFKGKWMDLASKAGKHLQLKETFERHSRVYTFEMQIIKAKDNFAGNYRCEVTYKDKFDSCSFDLEVHESTGTTPNIDIRSAFKRSGEGQEDAGELDFSGLLKRREVKQQEEEPQVDVWELLKNAKPSEYEKIAFQYGITDLRGMLKRLKRMRREEKKSAAFAKILDPAYQVDKGGRVRFVVELADPKLEVKWYKNGQEIRPSTKYIFEHKGCQRILFINNCQMTDDSEYYVTAGDEKCSTELFVREPPIMVTKQLEDTTAYCGERVELECEVSEDDANVKWFKNGEEIIPGPKSRYRIRVEGKKHILIIEGATKADAAEYSVMTTGGQSSAKLSVDLKPLKILTPLTDQTVNLGKEICLKCEISENIPGKWTKNGLPVQESDRLKVVHKGRIHKLVIANALTEDEGDYVFAPDAYNVTLPAKVHVIDPPKIILDGLDADNTVTVIAGNKLRLEIPISGEPPPKAMWSRGDKAIMEGSGRIRTESYPDSSTLVIDIAERDDSGVYHINLKNEAGEAHASIKVKVVDFPDPPVAPTVTEVGDDWCIMNWEPPAYDGGSPILGYFIERKKKQSSRWMRLNFDLCKETTFEPKKMIEGVAYEVRIFAVNAIGISKPSMPSRPFVPLAVTSPPTLLTVDSVTDTTVTMRWRPPDHIGAAGLDGYVLEYCFEGTEDWIVANKDLIDKTKFTITGLPTDAKIFVRVKAVNAAGASEPKYYSQPILVKEIIEPPKIRIPRHLKQTYIRRVGEAVNLVIPFQGKPRPELTWKKDGAEIDKNQINIRNSETDTIIFIRKAERSHSGKYDLQVKVDKFVETASIDIQIIDRPGPPQIVKIEDVWGENVALTWTPPKDDGNAAITGYTIQKADKKSMEWFTVIEHYHRTSATITELVIGNEYYFRVFSENMCGLSEDATMTKESAVIARDGKIYKNPVYEDFDFSEAPMFTQPLVNTYAIAGYNATLNCSVRGNPKPKITWMKNKVAIVDDPRYRMFSNQGVCTLEIRKPSPYDGGTYCCKAVNDLGTVEIECKLEVKVIAQ

SEQ ID NO: 54248 - protein, 1171 aa, Homo sapiens
  Payload ID: 10720
  Gene Symbol: MYBPC1
  Gene Name: myosin binding protein C, slow type
  Uniprot ID: Q00872
  ENSP ID: ENSP00000354849
MPEPTKKEENEVPAPAPPPEEPSKEKEAGTTPAKDEEEVSPPSALPPGLGSRALERKDSDWTLVETPPGEEQAKQNANSQLSILFIEKPQGGTVKVGEDITFIAKVKAEDLLRKPTIKWFKGKWMDLASKAGKHLQLKETFERHSRVYTFEMQIIKAKDNFAGNYRCEVTYKDKFDSCSFDLEVHESTGTTPNIDIRSAFKRSGEGQEDAGELDFSGLLKRREVKQQEEEPQVDVWELLKNAKPSEYEKIAFQYGITDLRGMLKRLKRMRREEKKSAAFAKILDPAYQVDKGGRVRFVVELADPKLEVKWYKNGQEIRPSTKYIFEHKGCQRILFINNCQMTDDSEYYVTAGDEKCSTELFVREPPIMVTKQLEDTTAYCGERVELECEVSEDDANVKWFKNGEEIIPGPKSRYRIRVEGKKHILIIEGATKADAAEYSVMTTGGQSSAKLSVDLKPLKILTPLTDQTVNLGKEICLKCEISENIPGKWTKNGLPVQESDRLKVVHKGRIHKLVIANALTEDEGDYVFAPDAYNVTLPAKVHVIDPPKIILDGLDADNTVTVIAGNKLRLEIPISGEPPPKAMWSRGDKAIMEGSGRIRTESYPDSSTLVIDIAERDDSGVYHINLKNEAGEAHASIKVKVVDFPDPPVAPTVTEVGDDWCIMNWEPPAYDGGSPILGYFIERKKKQSSRWMRLNFDLCKETTFEPKKMIEGVAYEVRIFAVNAIGISKPSMPSRPFVPLAVTSPPTLLTVDSVTDTTVTMRWRPPDHIGAAGLDGYVLEYCFEGTEDWIVANKDLIDKTKFTITGLPTDAKIFVRVKAVNAAGASEPKYYSQPILVKEIIEPPKIRIPRHLKQTYIRRVGEAVNLVIPFQGKPRPELTWKKDGAEIDKNQINIRNSETDTIIFIRKAERSHSGKYDLQVKVDKFVETASIDIQIIDRPGPPQIVKIEDVWGENVALTWTPPKDDGNAAITGYTIQKADKKSMEWFTVIEHYHRTSATITELVIGNEYYFRVFSENMCGLSEDATMTKESAVIARDGKIYKNPVYEDFDFSEAPMFTQPLVNTYAIAGYNATLNCSVRGNPKPKITWMKNKVAIVDDPRYRMFSNQGVCTLEIRKPSPYDGGTYCCKAVNDLGTVEIECKLEVKVIYQGVNTPGQPVFLEGQQQSLHNKDF

SEQ ID NO: 54249 - protein, 1139 aa, Homo sapiens
  Payload ID: 10720
  Gene Symbol: MYBPC1
  Gene Name: myosin binding protein C, slow type
  Uniprot ID: Q00872
  ENSP ID: ENSP00000376665
MPEPTKKEDEEEVSPPSALPPDWTLVETPPGEEQAKQNANSQLSILFIEKPQGGTVKVGEDITFIAKVKAEDLLRKPTIKWFKGKWMDLASKAGKHLQLKETFERHSRVYTFEMQIIKAKDNFAGNYRCEVTYKDKFDSCSFDLEVHESTGTTPNIDIRSAFKRSGEGQEDAGELDFSGLLKRREVKQQEEEPQVDVWELLKNAKPSEYEKIAFQYGITDLRGMLKRLKRMRREEKKSAAFAKILDPAYQVDKGGRVRFVVELADPKLEVKWYKNGQEIRPSTKYIFEHKGCQRILFINNCQMTDDSEYYVTAGDEKCSTELFVREPPIMVTKQLEDTTAYCGERVELECEVSEDDANVKWFKNGEEIIPGPKSRYRIRVEGKKHILIIEGATKADAAEYSVMTTGGQSSAKLSVDLKPLKILTPLTDQTVNLGKEICLKCEISENIPGKWTKNGLPVQESDRLKVVHKGRIHKLVIANALTEDEGDYVFAPDAYNVTLPAKVHVIDPPKIILDGLDADNTVTVIAGNKLRLEIPISGEPPPKAMWSRGDKAIMEGSGRIRTESYPDSSTLVIDIAERDDSGVYHINLKNEAGEAHASIKVKVVDFPDPPVAPTVTEVGDDWCIMNWEPPAYDGGSPILGYFIERKKKQSSRWMRLNFDLCKETTFEPKKMIEGVAYEVRIFAVNAIGISKPSMPSRPFVPLAVTSPPTLLTVDSVTDTTVTMRWRPPDHIGAAGLDGYVLEYCFEGTEDWIVANKDLIDKTKFTITGLPTDAKIFVRVKAVNAAGASEPKYYSQPILVKEIIEPPKIRIPRHLKQTYIRRVGEAVNLVIPFQGKPRPELTWKKDGAEIDKNQINIRNSETDTIIFIRKAERSHSGKYDLQVKVDKFVETASIDIQIIDRPGPPQIVKIEDVWGENVALTWTPPKDDGNAAITGYTIQKADKKSMEWFTVIEHYHRTSATITELVIGNEYYFRVFSENMCGLSEDATMTKESAVIARDGKIYKNPVYEDFDFSEAPMFTQPLVNTYAIAGYNATLNCSVRGNPKPKITWMKNKVAIVDDPRYRMFSNQGVCTLEIRKPSPYDGGTYCCKAVNDLGTVEIECKLEVKGGLSFCRLLLQGVPPNIIDSYLRDLHSSNPEEY

SEQ ID NO: 54250 - protein, 782 aa, Homo sapiens
  Payload ID: 10720
  Gene Symbol: MYBPC1
  Gene Name: myosin binding protein C, slow type
  ENSP ID: ENSP00000388989
MPEPTKKEENEVPAPAPPPEEPSKEKEAGTTPAKDEEEVSPPSALPPGLGSRALERKDSDWTLVETPPGEEQAKQNANSQLSILFIEKPQGGTVKVGEDITFIAKVKAEDLLRKPTIKWFKGKWMDLASKAGKHLQLKETFERHSRVYTFEMQIIKAKDNFAGNYRCEVTYKDKFDSCSFDLEVHESTGTTPNIDIRSAFKRSGEGQEDAGELDFSGLLKRREVKQQEEEPQVDVWELLKNAKPSEYEKIAFQYGITDLRGMLKRLKRMRREEKKSAAFAKILDPAYQVDKGGRVRFVVELADPKLEVKWYKNGQEIRPSTKYIFEHKGCQRILFINNCQMTDDSEYYVTAGDEKCSTELFVREPPIMVTKQLEDTTAYCGERVELECEVSEDDANVKWFKNGEEIIPGPKSRYRIRVEGKKHILIIEGATKADAAEYSVMTTGGQSSAKLSVDLKPLKILTPLTDQTVNLGKEICLKCEISENIPGKWTKNGLPVQESDRLKVVHKGRIHKLVIANALTEDEGDYVFAPDAYNVTLPAKVHVIDPPKIILDGLDADNTVTVIAGNKLRLEIPISGEPPPKAMWSRGDKAIMEGSGRIRTESYPDSSTLVIDIAERDDSGVYHINLKNEAGEAHASIKVKVVDFPDPPVAPTVTEVGDDWCIMNWEPPAYDGGSPILGYFIERKKKQSSRWMRLNFDLCKETTFEPKKMIEGVAYEVRIFAVNAIGISKPSMPSRPFVPLAVTSPPTLLTVDSVTDTTVTMRWRPRPHWCSRFRWLCARVLL

SEQ ID NO: 54251 - protein, 1173 aa, Homo sapiens
  Payload ID: 10720
  Gene Symbol: MYBPC1
  Gene Name: myosin binding protein C, slow type
  Uniprot ID: Q00872
  ENSP ID: ENSP00000400908
MPEPTKKEENEVPAPAPPPEEPSKEKEAGTTPAKDWTLVETPPGEEQAKQNANSQLSILFIEKPQGGTVKVGEDITFIAKVKAEDLLRKPTIKWFKGKWMDLASKAGKHLQLKETFERHSRVYTFEMQIIKAKDNFAGNYRCEVTYKDKFDSCSFDLEVHESTGTTPNIDIRSAFKRSGEGQEDAGELDFSGLLKRREVKQQEEEPQVDVWELLKNAKPSEYEKIAFQYGITDLRGMLKRLKRMRREEKKSAAFAKILDPAYQVDKGGRVRFVVELADPKLEVKWYKNGQEIRPSTKYIFEHKGCQRILFINNCQMTDDSEYYVTAGDEKCSTELFVREPPIMVTKQLEDTTAYCGERVELECEVSEDDANVKWFKNGEEIIPGPKSRYRIRVEGKKHILIIEGATKADAAEYSVMTTGGQSSAKLSVDLKPLKILTPLTDQTVNLGKEICLKCEISENIPGKWTKNGLPVQESDRLKVVHKGRIHKLVIANALTEDEGDYVFAPDAYNVTLPAKVHVIDPPKIILDGLDADNTVTVIAGNKLRLEIPISGEPPPKAMWSRGDKAIMEGSGRIRTESYPDSSTLVIDIAERDDSGVYHINLKNEAGEAHASIKVKVVDFPDPPVAPTVTEVGDDWCIMNWEPPAYDGGSPILGYFIERKKKQSSRWMRLNFDLCKETTFEPKKMIEGVAYEVRIFAVNAIGISKPSMPSRPFVPLAVTSPPTLLTVDSVTDTTVTMRWRPPDHIGAAGLDGYVLEYCFEGSTSAKQSDENGEAAYDLPAEDWIVANKDLIDKTKFTITGLPTDAKIFVRVKAVNAAGASEPKYYSQPILVKEIIEPPKIRIPRHLKQTYIRRVGEAVNLVIPFQGKPRPELTWKKDGAEIDKNQINIRNSETDTIIFIRKAERSHSGKYDLQVKVDKFVETASIDIQIIDRPGPPQIVKIEDVWGENVALTWTPPKDDGNAAITGYTIQKADKKSMEWFTVIEHYHRTSATITELVIGNEYYFRVFSENMCGLSEDATMTKESAVIARDGKIYKNPVYEDFDFSEAPMFTQPLVNTYAIAGYNATLNCSVRGNPKPKITWMKNKVAIVDDPRYRMFSNQGVCTLEIRKPSPYDGGTYCCKAVNDLGTVEIECKLEVKVIYQGVNTPGQPVFLEGQQQVGSPSADSSCKAYLQT

SEQ ID NO: 54252 - protein, 1146 aa, Homo sapiens
  Payload ID: 10720
  Gene Symbol: MYBPC1
  Gene Name: myosin binding protein C, slow type
  Uniprot ID: Q00872
  ENSP ID: ENSP00000440034
MPEPTKKEENEVPAPAPPPEEPSKEKEAGTTPAKDWTLVETPPGEEQAKQNANSQLSILFIEKPQGGTVKVGEDITFIAKVKAEDLLRKPTIKWFKGKWMDLASKAGKHLQLKETFERHSRVYTFEMQIIKAKDNFAGNYRCEVTYKDKFDSCSFDLEVHESTGTTPNIDIRSAFKRSGEGQEDAGELDFSGLLKRREVKQQEEEPQVDVWELLKNAKPSEYEKIAFQYGITDLRGMLKRLKRMRREEKKSAAFAKILDPAYQVDKGGRVRFVVELADPKLEVKWYKNGQEIRPSTKYIFEHKGCQRILFINNCQMTDDSEYYVTAGDEKCSTELFVREPPIMVTKQLEDTTAYCGERVELECEVSEDDANVKWFKNGEEIIPGPKSRYRIRVEGKKHILIIEGATKADAAEYSVMTTGGQSSAKLSVDLKPLKILTPLTDQTVNLGKEICLKCEISENIPGKWTKNGLPVQESDRLKVVHKGRIHKLVIANALTEDEGDYVFAPDAYNVTLPAKVHVIDPPKIILDGLDADNTVTVIAGNKLRLEIPISGEPPPKAMWSRGDKAIMEGSGRIRTESYPDSSTLVIDIAERDDSGVYHINLKNEAGEAHASIKVKVVDFPDPPVAPTVTEVGDDWCIMNWEPPAYDGGSPILGYFIERKKKQSSRWMRLNFDLCKETTFEPKKMIEGVAYEVRIFAVNAIGISKPSMPSRPFVPLAVTSPPTLLTVDSVTDTTVTMRWRPPDHIGAAGLDGYVLEYCFEGTEDWIVANKDLIDKTKFTITGLPTDAKIFVRVKAVNAAGASEPKYYSQPILVKEIIEPPKIRIPRHLKQTYIRRVGEAVNLVIPFQGKPRPELTWKKDGAEIDKNQINIRNSETDTIIFIRKAERSHSGKYDLQVKVDKFVETASIDIQIIDRPGPPQIVKIEDVWGENVALTWTPPKDDGNAAITGYTIQKADKKSMEWFTVIEHYHRTSATITELVIGNEYYFRVFSENMCGLSEDATMTKESAVIARDGKIYKNPVYEDFDFSEAPMFTQPLVNTYAIAGYNATLNCSVRGNPKPKITWMKNKVAIVDDPRYRMFSNQGVCTLEIRKPSPYDGGTYCCKAVNDLGTVEIECKLEVKVIYQGVNTPGQPVFLEGQQQSLHNKDF

SEQ ID NO: 54253 - protein, 1134 aa, Homo sapiens
  Payload ID: 10720
  Gene Symbol: MYBPC1
  Gene Name: myosin binding protein C, slow type
  Uniprot ID: Q00872
  ENSP ID: ENSP00000442847
MPEPTKKEEPSKEKEAGTTPAKDWTLVETPPGEEQAKQNANSQLSILFIEKPQGGTVKVGEDITFIAKVKAEDLLRKPTIKWFKGKWMDLASKAGKHLQLKETFERHSRVYTFEMQIIKAKDNFAGNYRCEVTYKDKFDSCSFDLEVHESTGTTPNIDIRSAFKRSGEGQEDAGELDFSGLLKRREVKQQEEEPQVDVWELLKNAKPSEYEKIAFQYGITDLRGMLKRLKRMRREEKKSAAFAKILDPAYQVDKGGRVRFVVELADPKLEVKWYKNGQEIRPSTKYIFEHKGCQRILFINNCQMTDDSEYYVTAGDEKCSTELFVREPPIMVTKQLEDTTAYCGERVELECEVSEDDANVKWFKNGEEIIPGPKSRYRIRVEGKKHILIIEGATKADAAEYSVMTTGGQSSAKLSVDLKPLKILTPLTDQTVNLGKEICLKCEISENIPGKWTKNGLPVQESDRLKVVHKGRIHKLVIANALTEDEGDYVFAPDAYNVTLPAKVHVIDPPKIILDGLDADNTVTVIAGNKLRLEIPISGEPPPKAMWSRGDKAIMEGSGRIRTESYPDSSTLVIDIAERDDSGVYHINLKNEAGEAHASIKVKVVDFPDPPVAPTVTEVGDDWCIMNWEPPAYDGGSPILGYFIERKKKQSSRWMRLNFDLCKETTFEPKKMIEGVAYEVRIFAVNAIGISKPSMPSRPFVPLAVTSPPTLLTVDSVTDTTVTMRWRPPDHIGAAGLDGYVLEYCFEGTEDWIVANKDLIDKTKFTITGLPTDAKIFVRVKAVNAAGASEPKYYSQPILVKEIIEPPKIRIPRHLKQTYIRRVGEAVNLVIPFQGKPRPELTWKKDGAEIDKNQINIRNSETDTIIFIRKAERSHSGKYDLQVKVDKFVETASIDIQIIDRPGPPQIVKIEDVWGENVALTWTPPKDDGNAAITGYTIQKADKKSMEWFTVIEHYHRTSATITELVIGNEYYFRVFSENMCGLSEDATMTKESAVIARDGKIYKNPVYEDFDFSEAPMFTQPLVNTYAIAGYNATLNCSVRGNPKPKITWMKNKVAIVDDPRYRMFSNQGVCTLEIRKPSPYDGGTYCCKAVNDLGTVEIECKLEVKVIYQGVNTPGQPVFLEGQQQSLHNKDF

SEQ ID NO: 54254 - protein, 1127 aa, Homo sapiens
  Payload ID: 10720
  Gene Symbol: MYBPC1
  Gene Name: myosin binding protein C, slow type
  Uniprot ID: Q00872
  ENSP ID: ENSP00000446128
MPEPTKKEENEVPAPAPPPEEPSKEKEAGTTPAKDWTLVETPPGEEQAKQNANSQLSILFIEKPQGGTVKVGEDITFIAKVKAEDLLRKPTIKWFKGKWMDLASKAGKHLQLKETFERHSRVYTFEMQIIKAKDNFAGNYRCEVTYKDKFDSCSFDLEVHESTGTTPNIDIRSAFKRREVKQQEEEPQVDVWELLKNAKPSEYEKIAFQYGITDLRGMLKRLKRMRREEKKSAAFAKILDPAYQVDKGGRVRFVVELADPKLEVKWYKNGQEIRPSTKYIFEHKGCQRILFINNCQMTDDSEYYVTAGDEKCSTELFVREPPIMVTKQLEDTTAYCGERVELECEVSEDDANVKWFKNGEEIIPGPKSRYRIRVEGKKHILIIEGATKADAAEYSVMTTGGQSSAKLSVDLKPLKILTPLTDQTVNLGKEICLKCEISENIPGKWTKNGLPVQESDRLKVVHKGRIHKLVIANALTEDEGDYVFAPDAYNVTLPAKVHVIDPPKIILDGLDADNTVTVIAGNKLRLEIPISGEPPPKAMWSRGDKAIMEGSGRIRTESYPDSSTLVIDIAERDDSGVYHINLKNEAGEAHASIKVKVVDFPDPPVAPTVTEVGDDWCIMNWEPPAYDGGSPILGYFIERKKKQSSRWMRLNFDLCKETTFEPKKMIEGVAYEVRIFAVNAIGISKPSMPSRPFVPLAVTSPPTLLTVDSVTDTTVTMRWRPPDHIGAAGLDGYVLEYCFEGTEDWIVANKDLIDKTKFTITGLPTDAKIFVRVKAVNAAGASEPKYYSQPILVKEIIEPPKIRIPRHLKQTYIRRVGEAVNLVIPFQGKPRPELTWKKDGAEIDKNQINIRNSETDTIIFIRKAERSHSGKYDLQVKVDKFVETASIDIQIIDRPGPPQIVKIEDVWGENVALTWTPPKDDGNAAITGYTIQKADKKSMEWFTVIEHYHRTSATITELVIGNEYYFRVFSENMCGLSEDATMTKESAVIARDGKIYKNPVYEDFDFSEAPMFTQPLVNTYAIAGYNATLNCSVRGNPKPKITWMKNKVAIVDDPRYRMFSNQGVCTLEIRKPSPYDGGTYCCKAVNDLGTVEIECKLEVKVIYQGVNTPGQPVFLEGQQQSLHNKDF

SEQ ID NO: 54255 - protein, 1024 aa, Homo sapiens
  Payload ID: 10720
  Gene Symbol: MYBPC1
  Gene Name: myosin binding protein C, slow type
  ENSP ID: ENSP00000447116
MDLASKAGKHLQLKETFERHSRVYTFEMQIIKAKDNFAGNYRCEVTYKDKFDSCSFDLEVHESTGTTPNIDIRSAFKRSGEGQEDAGELDFSGLLKRREVKQQEEEPQVDVWELLKNAKPSEYEKIAFQYGITDLRGMLKRLKRMRREEKKSAAFAKILDPAYQVDKGGRVRFVVELADPKLEVKWYKNGQEIRPSTKYIFEHKGCQRILFINNCQMTDDSEYYVTAGDEKCSTELFVREPPIMVTKQLEDTTAYCGERVELECEVSEDDANVKWFKNGEEIIPGPKSRYRIRVEGKKHILIIEGATKADAAEYSVMTTGGQSSAKLSVDLKPLKILTPLTDQTVNLGKEICLKCEISENIPGKWTKNGLPVQESDRLKVVHKGRIHKLVIANALTEDEGDYVFAPDAYNVTLPAKVHVIDPPKIILDGLDADNTVTVIAGNKLRLEIPISGEPPPKAMWSRGDKAIMEGSGRIRTESYPDSSTLVIDIAERDDSGVYHINLKNEAGEAHASIKVKVVDFPDPPVAPTVTEVGDDWCIMNWEPPAYDGGSPILGYFIERKKKQSSRWMRLNFDLCKETTFEPKKMIEGVAYEVRIFAVNAIGISKPSMPSRPFVPLAVTSPPTLLTVDSVTDTTVTMRWRPPDHIGAAGLDGYVLEYCFEGTEDWIVANKDLIDKTKFTITGLPTDAKIFVRVKAVNAAGASEPKYYSQPILVKEIIEPPKIRIPRHLKQTYIRRVGEAVNLVIPFQGKPRPELTWKKDGAEIDKNQINIRNSETDTIIFIRKAERSHSGKYDLQVKVDKFVETASIDIQIIDRPGPPQIVKIEDVWGENVALTWTPPKDDGNAAITGYTIQKADKKSMEWFTVIEHYHRTSATITELVIGNEYYFRVFSENMCGLSEDATMTKESAVIARDGKIYKNPVYEDFDFSEAPMFTQPLVNTYAIAGYNATLNCSVRGNPKPKITWMKNKVAIVDDPRYRMFSNQGVCTLEIRKPSPYDGGTYCCKAVNDLGTVEIECKLEVKVIAQ

SEQ ID NO: 54256 - protein, 1132 aa, Homo sapiens
  Payload ID: 10720
  Gene Symbol: MYBPC1
  Gene Name: myosin binding protein C, slow type
  ENSP ID: ENSP00000447362
MPEPTKKEENEVPAPAPPPEDWTLVETPPGEEQAKQNANSQLSILFIEKPQGGTVKVGEDITFIAKVKAEDLLRKPTIKWFKGKWMDLASKAGKHLQLKETFERHSRVYTFEMQIIKAKDNFAGNYRCEVTYKDKFDSCSFDLEVHESTGTTPNIDIRSAFKRSGEGQEDAGELDFSGLLKRREVKQQEEEPQVDVWELLKNAKPSEYEKIAFQYGITDLRGMLKRLKRMRREEKKSAAFAKILDPAYQVDKGGRVRFVVELADPKLEVKWYKNGQEIRPSTKYIFEHKGCQRILFINNCQMTDDSEYYVTAGDEKCSTELFVREPPIMVTKQLEDTTAYCGERVELECEVSEDDANVKWFKNGEEIIPGPKSRYRIRVEGKKHILIIEGATKADAAEYSVMTTGGQSSAKLSVDLKPLKILTPLTDQTVNLGKEICLKCEISENIPGKWTKNGLPVQESDRLKVVHKGRIHKLVIANALTEDEGDYVFAPDAYNVTLPAKVHVIDPPKIILDGLDADNTVTVIAGNKLRLEIPISGEPPPKAMWSRGDKAIMEGSGRIRTESYPDSSTLVIDIAERDDSGVYHINLKNEAGEAHASIKVKVVDFPDPPVAPTVTEVGDDWCIMNWEPPAYDGGSPILGYFIERKKKQSSRWMRLNFDLCKETTFEPKKMIEGVAYEVRIFAVNAIGISKPSMPSRPFVPLAVTSPPTLLTVDSVTDTTVTMRWRPPDHIGAAGLDGYVLEYCFEGTEDWIVANKDLIDKTKFTITGLPTDAKIFVRVKAVNAAGASEPKYYSQPILVKEIIEPPKIRIPRHLKQTYIRRVGEAVNLVIPFQGKPRPELTWKKDGAEIDKNQINIRNSETDTIIFIRKAERSHSGKYDLQVKVDKFVETASIDIQIIDRPGPPQIVKIEDVWGENVALTWTPPKDDGNAAITGYTIQKADKKSMEWFTVIEHYHRTSATITELVIGNEYYFRVFSENMCGLSEDATMTKESAVIARDGKIYKNPVYEDFDFSEAPMFTQPLVNTYAIAGYNATLNCSVRGNPKPKITWMKNKVAIVDDPRYRMFSNQGVCTLEIRKPSPYDGGTYCCKAVNDLGTVEIECKLEVKVIYQGVNTPGQPVFLEGQQQSLHNKDF

SEQ ID NO: 54257 - protein, 104 aa, Homo sapiens
  Payload ID: 10720
  Gene Symbol: MYBPC1
  Gene Name: myosin binding protein C, slow type
  ENSP ID: ENSP00000447404
MDLASKAGKHLQLKETFERHSRVYTFEMQIIKAKDNFAGNYRCEVTYKDKFDSCSFDLEVHESTGTTPNIDIRSAFKRSGEGQEDAGELDFSGLLKRREVKQQE

SEQ ID NO: 54258 - protein, 1154 aa, Homo sapiens
  Payload ID: 10720
  Gene Symbol: MYBPC1
  Gene Name: myosin binding protein C, slow type
  ENSP ID: ENSP00000447660
MPEPTKKEENEVPAPAPPPEEPSKEKEAGTTPAKDEEEVSPPSALPPDWTLVETPPGEEQAKQNANSQLSILFIEKPQGGTVKVGEDITFIAKVKAEDLLRKPTIKWFKGKWMDLASKAGKHLQLKETFERHSRVYTFEMQIIKAKDNFAGNYRCEVTYKDKFDSCSFDLEVHESTGTTPNIDIRSAFKRSGEGQEDAGELDFSGLLKRREVKQQEEEPQVDVWELLKNAKPSEYEKIAFQYGITDLRGMLKRLKRMRREEKKSAAFAKILDPAYQVDKGGRVRFVVELADPKLEVKWYKNGQEIRPSTKYIFEHKGCQRILFINNCQMTDDSEYYVTAGDEKCSTELFVREPPIMVTKQLEDTTAYCGERVELECEVSEDDANVKWFKNGEEIIPGPKSRYRIRVEGKKHILIIEGATKADAAEYSVMTTGGQSSAKLSVDLKPLKILTPLTDQTVNLGKEICLKCEISENIPGKWTKNGLPVQESDRLKVVHKGRIHKLVIANALTEDEGDYVFAPDAYNVTLPAKVHVIDPPKIILDGLDADNTVTVIAGNKLRLEIPISGEPPPKAMWSRGDKAIMEGSGRIRTESYPDSSTLVIDIAERDDSGVYHINLKNEAGEAHASIKVKVVDFPDPPVAPTVTEVGDDWCIMNWEPPAYDGGSPILGYFIERKKKQSSRWMRLNFDLCKETTFEPKKMIEGVAYEVRIFAVNAIGISKPSMPSRPFVPLAVTSPPTLLTVDSVTDTTVTMRWRPPDHIGAAGLDGYVLEYCFEGSTSAKQSDENGEAAYDLPAEDWIVANKDLIDKTKFTITGLPTDAKIFVRVKAVNAAGASEPKYYSQPILVKEIIEPPKIRIPRHLKQTYIRRVGEAVNLVIPFQGKPRPELTWKKDGAEIDKNQINIRNSETDTIIFIRKAERSHSGKYDLQVKVDKFVETASIDIQIIDRPGPPQIVKIEDVWGENVALTWTPPKDDGNAAITGYTIQKADKKSMEWFTVIEHYHRTSATITELVIGNEYYFRVFSENMCGLSEDATMTKESAVIARDGKIYKNPVYEDFDFSEAPMFTQPLVNTYAIAGYNATLNCSVRGNPKPKITWMKNKVAIVDDPRYRMFSNQGVCTLEIRKPSPYDGGTYCCKAVNDLGTVEIECKLEVKVIAQ

SEQ ID NO: 54259 - protein, 1123 aa, Homo sapiens
  Payload ID: 10720
  Gene Symbol: MYBPC1
  Gene Name: myosin binding protein C, slow type
  Uniprot ID: Q00872
  ENSP ID: ENSP00000447900
MPEPTKKEENEVPAPAPPPEEPSKEKEAGTTPAKDWTLVETPPGEEQAKQNANSQLSILFIEKPQGGTVKVGEDITFIAKVKAEDLLRKPTIKWFKGKWMDLASKAGKHLQLKETFERHSRVYTFEMQIIKAKDNFAGNYRCEVTYKDKFDSCSFDLEVHESTGTTPNIDIRSAFKRSGEGQEDAGELDFSGLLKRREVKQQEEEPQVDVWELLKNAKPSEYEKIAFQYGITDLRGMLKRLKRMRREEKKSAAFAKILDPAYQVDKGGRVRFVVELADPKLEVKWYKNGQEIRPSTKYIFEHKGCQRILFINNCQMTDDSEYYVTAGDEKCSTELFVREPPIMVTKQLEDTTAYCGERVELECEVSEDDANVKWFKNGEEIIPGPKSRYRIRVEGKKHILIIEGATKADAAEYSVMTTGGQSSAKLSVDLKPLKILTPLTDQTVNLGKEICLKCEISENIPGKWTKNGLPVQESDRLKVVHKGRIHKLVIANALTEDEGDYVFAPDAYNVTLPAKVHVIDPPKIILDGLDADNTVTVIAGNKLRLEIPISGEPPPKAMWSRGDKAIMEGSGRIRTESYPDSSTLVIDIAERDDSGVYHINLKNEAGEAHASIKVKVVDFPDPPVAPTVTEVGDDWCIMNWEPPAYDGGSPILGYFIERKKKQSSRWMRLNFDLCKETTFEPKKMIEGVAYEVRIFAVNAIGISKPSMPSRPFVPLAVTSPPTLLTVDSVTDTTVTMRWRPPDHIGAAGLDGYVLEYCFEGTEDWIVANKDLIDKTKFTITGLPTDAKIFVRVKAVNAAGASEPKYYSQPILVKEIIEPPKIRIPRHLKQTYIRRVGEAVNLVIPFQGKPRPELTWKKDGAEIDKNQINIRNSETDTIIFIRKAERSHSGKYDLQVKVDKFVETASIDIQIIDRPGPPQIVKIEDVWGENVALTWTPPKDDGNAAITGYTIQKADKKSMEWFTVIEHYHRTSATITELVIGNEYYFRVFSENMCGLSEDATMTKESAVIARDGKIYKNPVYEDFDFSEAPMFTQPLVNTYAIAGYNATLNCSVRGNPKPKITWMKNKVAIVDDPRYRMFSNQGVCTLEIRKPSPYDGGTYCCKAVNDLGTVEIECKLEVKVIAQ

SEQ ID NO: 54260 - protein, 1120 aa, Homo sapiens
  Payload ID: 10720
  Gene Symbol: MYBPC1
  Gene Name: myosin binding protein C, slow type
  Uniprot ID: Q00872
  ENSP ID: ENSP00000448175
MPEPTKKEDWTLVETPPGEEQAKQNANSQLSILFIEKPQGGTVKVGEDITFIAKVKAEDLLRKPTIKWFKGKWMDLASKAGKHLQLKETFERHSRVYTFEMQIIKAKDNFAGNYRCEVTYKDKFDSCSFDLEVHESTGTTPNIDIRSAFKRSGEGQEDAGELDFSGLLKRREVKQQEEEPQVDVWELLKNAKPSEYEKIAFQYGITDLRGMLKRLKRMRREEKKSAAFAKILDPAYQVDKGGRVRFVVELADPKLEVKWYKNGQEIRPSTKYIFEHKGCQRILFINNCQMTDDSEYYVTAGDEKCSTELFVREPPIMVTKQLEDTTAYCGERVELECEVSEDDANVKWFKNGEEIIPGPKSRYRIRVEGKKHILIIEGATKADAAEYSVMTTGGQSSAKLSVDLKPLKILTPLTDQTVNLGKEICLKCEISENIPGKWTKNGLPVQESDRLKVVHKGRIHKLVIANALTEDEGDYVFAPDAYNVTLPAKVHVIDPPKIILDGLDADNTVTVIAGNKLRLEIPISGEPPPKAMWSRGDKAIMEGSGRIRTESYPDSSTLVIDIAERDDSGVYHINLKNEAGEAHASIKVKVVDFPDPPVAPTVTEVGDDWCIMNWEPPAYDGGSPILGYFIERKKKQSSRWMRLNFDLCKETTFEPKKMIEGVAYEVRIFAVNAIGISKPSMPSRPFVPLAVTSPPTLLTVDSVTDTTVTMRWRPPDHIGAAGLDGYVLEYCFEGTEDWIVANKDLIDKTKFTITGLPTDAKIFVRVKAVNAAGASEPKYYSQPILVKEIIEPPKIRIPRHLKQTYIRRVGEAVNLVIPFQGKPRPELTWKKDGAEIDKNQINIRNSETDTIIFIRKAERSHSGKYDLQVKVDKFVETASIDIQIIDRPGPPQIVKIEDVWGENVALTWTPPKDDGNAAITGYTIQKADKKSMEWFTVIEHYHRTSATITELVIGNEYYFRVFSENMCGLSEDATMTKESAVIARDGKIYKNPVYEDFDFSEAPMFTQPLVNTYAIAGYNATLNCSVRGNPKPKITWMKNKVAIVDDPRYRMFSNQGVCTLEIRKPSPYDGGTYCCKAVNDLGTVEIECKLEVKVIYQGVNTPGQPVFLEGQQQSLHNKDF

SEQ ID NO: 54261 - protein, 1141 aa, Homo sapiens
  Payload ID: 10720
  Gene Symbol: MYBPC1
  Gene Name: myosin binding protein C, slow type
  Uniprot ID: Q00872
  ENSP ID: ENSP00000449702
MPEPTKKEENEVPAPAPPPEEPSKEKEAGTTPAKDWTLVETPPGEEQAKQNANSQLSILFIEKPQGGTVKVGEDITFIAKVKAEDLLRKPTIKWFKGKWMDLASKAGKHLQLKETFERHSRVYTFEMQIIKAKDNFAGNYRCEVTYKDKFDSCSFDLEVHESTGTTPNIDIRSAFKRSGEGQEDAGELDFSGLLKRREVKQQEEEPQVDVWELLKNAKPSEYEKIAFQYGITDLRGMLKRLKRMRREEKKSAAFAKILDPAYQVDKGGRVRFVVELADPKLEVKWYKNGQEIRPSTKYIFEHKGCQRILFINNCQMTDDSEYYVTAGDEKCSTELFVREPPIMVTKQLEDTTAYCGERVELECEVSEDDANVKWFKNGEEIIPGPKSRYRIRVEGKKHILIIEGATKADAAEYSVMTTGGQSSAKLSVDLKPLKILTPLTDQTVNLGKEICLKCEISENIPGKWTKNGLPVQESDRLKVVHKGRIHKLVIANALTEDEGDYVFAPDAYNVTLPAKVHVIDPPKIILDGLDADNTVTVIAGNKLRLEIPISGEPPPKAMWSRGDKAIMEGSGRIRTESYPDSSTLVIDIAERDDSGVYHINLKNEAGEAHASIKVKVVDFPDPPVAPTVTEVGDDWCIMNWEPPAYDGGSPILGYFIERKKKQSSRWMRLNFDLCKETTFEPKKMIEGVAYEVRIFAVNAIGISKPSMPSRPFVPLAVTSPPTLLTVDSVTDTTVTMRWRPPDHIGAAGLDGYVLEYCFEGSTSAKQSDENGEAAYDLPAEDWIVANKDLIDKTKFTITGLPTDAKIFVRVKAVNAAGASEPKYYSQPILVKEIIEPPKIRIPRHLKQTYIRRVGEAVNLVIPFQGKPRPELTWKKDGAEIDKNQINIRNSETDTIIFIRKAERSHSGKYDLQVKVDKFVETASIDIQIIDRPGPPQIVKIEDVWGENVALTWTPPKDDGNAAITGYTIQKADKKSMEWFTVIEHYHRTSATITELVIGNEYYFRVFSENMCGLSEDATMTKESAVIARDGKIYKNPVYEDFDFSEAPMFTQPLVNTYAIAGYNATLNCSVRGNPKPKITWMKNKVAIVDDPRYRMFSNQGVCTLEIRKPSPYDGGTYCCKAVNDLGTVEIECKLEVKVIAQ

SEQ ID NO: 54262 - protein, 477 aa, Homo sapiens
  Payload ID: 10721
  Gene Symbol: MYBPH
  Gene Name: myosin binding protein H
  Uniprot ID: Q13203
  ENSP ID: ENSP00000255416
MMEKNTSEGPACSPEETASESAKVPTAEPPGEVAVSESTREEQVPKPQAPAPQAPTASTATKPAPPSEDVPSAPLLLTLDDVSSSSVTVSWEPPERLGRLGLQGYVLELCREGASEWVPVSARPMMVTQQTVRNLALGDKFLLRVSAVSSAGAGPPAMLDQPIHIRENIEAPKIRVPRHLRQTYIRQVGETVNLQIPFQGKPKPQATWTHNGHALDSQRVSMRTGDQDSILFIRSAQRSDSGRYELTVRVEDLEAKAVIDILVIEKPGPPSSIRLLDVWGCNAALQWTPPQDTGNTELLGYMVQKADKKTGQWFTVLERYHPTTCTISDLIIGNSYSFRVFSENLCGLSTSATVTKELAHIQKADIAAKPKGFIERDFSEAPSFTQPLADHTSTPGYSTQLFCSVRASPKPKIIWMKNKMEIQGNPKYRALSEQGVCTLEIRKPSPFDSGVYTCKAINVLGEASVDCRLEVKASAAH

SEQ ID NO: 54263 - protein, 476 aa, Homo sapiens [sequence omitted]

SEQ ID NO: 54264 - protein, 354 aa, Homo sapiens
  Payload ID: 10722
  Gene Symbol: MYBPHL
  Gene Name: myosin binding protein H-like
  Uniprot ID: A2RUH7
  ENSP ID: ENSP00000349678
MEAATAPEVAAGSKLKVKEASPADAEPPQASPGQGAGSPTPQLLPPIEEHPKIWLPRALRQTYIRKVGDTVNLLIPFQGKPKPQAIWTHDGCALDTRRVSVRNGEQDSILFIREAQRADSGRYQLRVQLGGLEATATIDILVIERPGPPQSIKLVDVWGFSATLEWTPPQDTGNTALLGYTVQKADTKSGLWFTVLEHYHRTSCIVSDLIIGNSYAFRVFAENQCGLSETAPITTDLAHIQKAATVYKTKGFAQRDFSEAPKFTQPLADCTTVTGYNTQLFCCVRASPRPKIIWLKNKMDIQGNPKYRALTHLGICSLEIRKPGPFDGGIYTCKAVNPLGEASVDCRVDVKVPN

SEQ ID NO: 54265 - protein, 1043 aa, Homo sapiens
  Payload ID: 10723
  Gene Symbol: MYO1A
  Gene Name: myosin IA
  Uniprot ID: Q9UBC5
  ENSP ID: ENSP00000300119
MPLLEGSVGVEDLVLLEPLVEESLLKNLQLRYENKEIYTYIGNVVISVNPYQQLPIYGPEFIAKYQDYTFYELKPHIYALANVAYQSLRDRDRDQCILITGESGSGKTEASKLVMSYVAAVCGKGEQVNSVKEQLLQSNPVLEAFGNAKTIRNNNSSRFGKYMDIEFDFKGSPLGGVITNYLLEKSRLVKQLKGERNFHIFYQLLAGADEQLLKALKLERDTTGYAYLNHEVSRVDGMDDASSFRAVQSAMAVIGFSEEEIRQVLEVTSMVLKLGNVLVADEFQASGIPASGIRDGRGVREIGEMVGLNSEEVERALCSRTMETAKEKVVTALNVMQAQYARDALAKNIYSRLFDWIVNRINESIKVGIGEKKKVMGVLDIYGFEILEDNSFEQFVINYCNEKLQQVFIEMTLKEEQEEYKREGIPWTKVDYFDNGIICKLIEHNQRGILAMLDEECLRPGVVSDSTFLAKLNQLFSKHGHYESKVTQNAQRQYDHTMGLSCFRICHYAGKVTYNVTSFIDKNNDLLFRDLLQAMWKAQHPLLRSLFPEGNPKQASLKRPPTAGAQFKSSVAILMKNLYSKSPNYIRCIKPNEHQQRGQFSSDLVATQARYLGLLENVRVRRAGYAHRQGYGPFLERYRLLSRSTWPHWNGGDREGVEKVLGELSMSSGELAFGKTKIFIRSPKTLFYLEEQRRLRLQQLATLIQKIYRGWRCRTHYQLMRKSQILISSWFRGNMQKKCYGKIKASVLLIQAFVRGWKARKNYRKYFRSEAALTLADFIYKSMVQKFLLGLKNNLPSTNVLDKTWPAAPYKCLSTANQELQQLFYQWKCKRFRDQLSPKQVEILREKLCASELFKGKKASYPQSVPIPFCGDYIGLQGNPKLQKLKGGEEGPVLMAEAVKKVNRGNGKTSSRILLLTKGHVILTDTKKSQAKIVIGLDNVAGVSVTSLKDGLFSLHLSEMSSVGSKGDFLLVSEHVIELLTKMYRAVLDATQRQLTVTVTEKFSVRFKENSVAVKVVQGPAGGDNSKLRYKKKGSHCLEVTVQ

SEQ ID NO: 54266 - protein, 1043 aa, Homo sapiens; identical to SEQ ID NO: 54265
  Payload ID: 10723
  Gene Symbol: MYO1A
  Gene Name: myosin IA
  Uniprot ID: Q9UBC5
  ENSP ID: ENSP00000393392

SEQ ID NO: 54267 - protein, 96 aa, Homo sapiens
  Payload ID: 10723
  Gene Symbol: MYO1A
  Gene Name: myosin IA
  ENSP ID: ENSP00000400991
MPLLEGSVGVEDLVLLEPLVEESLLKNLQLRYENKEIYTYIGNVVISVNPYQQLPIYGPEFIAKYQDYTFYELKPHIYALANVAYQSLRDRDRDQC

SEQ ID NO: 54268 - protein, 688 aa, Homo sapiens
  Payload ID: 10723
  Gene Symbol: MYO1A
  Gene Name: myosin IA
  ENSP ID: ENSP00000451033
MDIEFDFKGSPLGGVITNYLLEKSRLVKQLKGERNFHIFYQLLAGADEQLLKALKLERDTTGYAYLNHEVSRVDGMDDASSFRAVQSAMAVIGFSEEEIRQVLEVTSMVLKLGNVLVADEFQASGIPASGIRDGRGVREIGEMVGLNSEEVERALCSRTMETAKEKVVTALNVMQAQYARDALAKNIYSRLFDWIVNRINESIKVGIGEKKKVMGVLDIYGFEILEDNSFEQFVINYCNEKLQQVFIEMTLKEEQEEYKREGIPWTKVDYFDNGIICKLIEHNQRGILAMLDEECLRPGVVSDSTFLAKLNQLFSKHGHYESKVTQNAQRQYDHTMGLSCFRICHYAGKVTYNVTSFIDKNNDLLFRDLLQAMWKAQHPLLRSLFPEGNPKQASLKRPPTAGAQFKSSVAILMKNLYSKSPNYIRCIKPNEHQQRGQFSSDLVATQARYLGLLENVRVRRAGYAHRQGYGPFLERYRLLSRSTWPHWNGGDREGVEKVLGELSMSSGELAFGKTKIFIRSPKTLFYLEEQRRLRLQQLATLIQKIYRGWRCRTHYQLMRKSQILISSWFRGNMQKKCYGKIKASVLLIQAFVRGWKARKNYRKYFRSEAALTLADFIYKSMVQKFLLGLKNNLPSTNVLDKTWPAAPYKCLSTANQELQQLFYQWKAKVPGSAVPEAGRDPEGKALCQ

SEQ ID NO: 54269 - protein, 73 aa, Homo sapiens
  Payload ID: 10723
  Gene Symbol: MYO1A
  Gene Name: myosin IA
  ENSP ID: ENSP00000452229
MVGLNSEEVERALCSRTMETAKEKVVTALNVMQAQYARDALAKNIYSRLFDWIVNRINESIKVGIGEKKKVMG

SEQ ID NO: 54270 - protein, 1136 aa, Homo sapiens
  Payload ID: 10724
  Gene Symbol: MYO1B
  Gene Name: myosin IB
  Uniprot ID: O43795
  ENSP ID: ENSP00000306382
MAKMEVKTSLLDNMIGVGDMVLLEPLNEETFINNLKKRFDHSEIYTYIGSVVISVNPYRSLPIYSPEKVEEYRNRNFYELSPHIFALSDEAYRSLRDQDKDQCILITGESGAGKTEASKLVMSYVAAVCGKGAEVNQVKEQLLQSNPVLEAFGNAKTVRNDNSSRFGKYMDIEFDFKGDPLGGVISNYLLEKSRVVKQPRGERNFHVFYQLLSGASEELLNKLKLERDFSRYNYLSLDSAKVNGVDDAANFRTVRNAMQIVGFMDHEAESVLAVVAAVLKLGNIEFKPESRVNGLDESKIKDKNELKEICELTGIDQSVLERAFSFRTVEAKQEKVSTTLNVAQAYYARDALAKNLYSRLFSWLVNRINESIKAQTKVRKKVMGVLDIYGFEIFEDNSFEQFIINYCNEKLQQIFIELTLKEEQEEYIREDIEWTHIDYFNNAIICDLIENNTNGILAMLDEECLRPGTVTDETFLEKLNQVCATHQHFESRMSKCSRFLNDTSLPHSCFRIQHYAGKVLYQVEGFVDKNNDLLYRDLSQAMWKASHALIKSLFPEGNPAKINLKRPPTAGSQFKASVATLMKNLQTKNPNYIRCIKPNDKKAAHIFNEALVCHQIRYLGLLENVRVRRAGYAFRQAYEPCLERYKMLCKQTWPHWKGPARSGVEVLFNELEIPVEEYSFGRSKIFIRNPRTLFKLEDLRKQRLEDLATLIQKIYRGWKCRTHFLLMKKSQIVIAAWYRRYAQQKRYQQTKSSALVIQSYIRGWKARKILRELKHQKRCKEAVTTIAAYWHGTQARRELRRLKEEARNKHAIAVIWAYWLGSKARRELKRLKEEARRKHAVAVIWAYWLGLKVRREYRKFFRANAGKKIYEFTLQRIVQKYFLEMKNKMPSLSPIDKNWPSRPYLFLDSTHKELKRIFHLWRCKKYRDQFTDQQKLIYEEKLEASELFKDKKALYPSSVGQPFQGAYLEINKNPKYKKLKDAIEEKIIIAEVVNKINRANGKSTSRIFLLTNNNLLLADQKSGQIKSEVPLVDVTKVSMSSQNDGFFAVHLKEGSEAASKGDFLFSSDHLIEMATKLYRTTLSQTKQKLNIEISDEFLVQFRQDKVCVKFIQGNQKNGSVPTCKRKNNRLLEVAVP

SEQ ID NO: 54271 - protein, 1078 aa, Homo sapiens
  Payload ID: 10724
  Gene Symbol: MYO1B
  Gene Name: myosin IB
  Uniprot ID: O43795
  ENSP ID: ENSP00000341903
MAKMEVKTSLLDNMIGVGDMVLLEPLNEETFINNLKKRFDHSEIYTYIGSVVISVNPYRSLPIYSPEKVEEYRNRNFYELSPHIFALSDEAYRSLRDQDKDQCILITGESGAGKTEASKLVMSYVAAVCGKGAEVNQVKEQLLQSNPVLEAFGNAKTVRNDNSSRFGKYMDIEFDFKGDPLGGVISNYLLEKSRVVKQPRGERNFHVFYQLLSGASEELLNKLKLERDFSRYNYLSLDSAKVNGVDDAANFRTVRNAMQIVGFMDHEAESVLAVVAAVLKLGNIEFKPESRVNGLDESKIKDKNELKEICELTGIDQSVLERAFSFRTVEAKQEKVSTTLNVAQAYYARDALAKNLYSRLFSWLVNRINESIKAQTKVRKKVMGVLDIYGFEIFEDNSFEQFIINYCNEKLQQIFIELTLKEEQEEYIREDIEWTHIDYFNNAIICDLIENNTNGILAMLDEECLRPGTVTDETFLEKLNQVCATHQHFESRMSKCSRFLNDTSLPHSCFRIQHYAGKVLYQVEGFVDKNNDLLYRDLSQAMWKASHALIKSLFPEGNPAKINLKRPPTAGSQFKASVATLMKNLQTKNPNYIRCIKPNDKKAAHIFNEALVCHQIRYLGLLENVRVRRAGYAFRQAYEPCLERYKMLCKQTWPHWKGPARSGVEVLFNELEIPVEEYSFGRSKIFIRNPRTLFKLEDLRKQRLEDLATLIQKIYRGWKCRTHFLLMKKSQIVIAAWYRRYAQQKRYQQTKSSALVIQSYIRGWKARKILRELKHQKRCKEAVTTIAAYWHGTQVRREYRKFFRANAGKKIYEFTLQRIVQKYFLEMKNKMPSLSPIDKNWPSRPYLFLDSTHKELKRIFHLWRCKKYRDQFTDQQKLIYEEKLEASELFKDKKALYPSSVGQPFQGAYLEINKNPKYKKLKDAIEEKIIIAEVVNKINRANGKSTSRIFLLTNNNLLLADQKSGQIKSEVPLVDVTKVSMSSQNDGFFAVHLKEGSEAASKGDFLFSSDHLIEMATKLYRTTLSQTKQKLNIEISDEFLVQFRQDKVCVKFIQGNQKNGSVPTCKRKNNRLLEVAVP

SEQ ID NO: 54272 - protein, 1107 aa, Homo sapiens
  Payload ID: 10724
  Gene Symbol: MYO1B
  Gene Name: myosin IB
  ENSP ID: ENSP00000376130
MAKMEVKTSLLDNMIGVGDMVLLEPLNEETFINNLKKRFDHSEIYTYIGSVVISVNPYRSLPIYSPEKVEEYRNRNFYELSPHIFALSDEAYRSLRDQDKDQCILITGESGAGKTEASKLVMSYVAAVCGKGAEVNQVKEQLLQSNPVLEAFGNAKTVRNDNSSRFGKYMDIEFDFKGDPLGGVISNYLLEKSRVVKQPRGERNFHVFYQLLSGASEELLNKLKLERDFSRYNYLSLDSAKVNGVDDAANFRTVRNAMQIVGFMDHEAESVLAVVAAVLKLGNIEFKPESRVNGLDESKIKDKNELKEICELTGIDQSVLERAFSFRTVEAKQEKVSTTLNVAQAYYARDALAKNLYSRLFSWLVNRINESIKAQTKVRKKVMGVLDIYGFEIFEDNSFEQFIINYCNEKLQQIFIELTLKEEQEEYIREDIEWTHIDYFNNAIICDLIENNTNGILAMLDEECLRPGTVTDETFLEKLNQVCATHQHFESRMSKCSRFLNDTSLPHSCFRIQHYAGKVLYQVEGFVDKNNDLLYRDLSQAMWKASHALIKSLFPEGNPAKINLKRPPTAGSQFKASVATLMKNLQTKNPNYIRCIKPNDKKAAHIFNEALVCHQIRYLGLLENVRVRRAGYAFRQAYEPCLERYKMLCKQTWPHWKGPARSGVEVLFNELEIPVEEYSFGRSKIFIRNPRTLFKLEDLRKQRLEDLATLIQKIYRGWKCRTHFLLMKKSQIVIAAWYRRYAQQKRYQQTKSSALVIQSYIRGWKARKILRELKHQKRCKEAVTTIAAYWHGTQARRELKRLKEEARRKHAVAVIWAYWLGLKVRREYRKFFRANAGKKIYEFTLQRIVQKYFLEMKNKMPSLSPIDKNWPSRPYLFLDSTHKELKRIFHLWRCKKYRDQFTDQQKLIYEEKLEASELFKDKKALYPSSVGQPFQGAYLEINKNPKYKKLKDAIEEKIIIAEVVNKINRANGKSTSRIFLLTNNNLLLADQKSGQIKSEVPLVDVTKVSMSSQNDGFFAVHLKEGSEAASKGDFLFSSDHLIEMATKLYRTTLSQTKQKLNIEISDEFLVQFRQDKVCVKFIQGNQKNGSVPTCKRKNNRLLEVAVP

SEQ ID NO: 54273 - protein, 1136 aa, Homo sapiens; identical to SEQ ID NO: 54270
  Payload ID: 10724
  Gene Symbol: MYO1B
  Gene Name: myosin IB
  Uniprot ID: O43795
  ENSP ID: ENSP00000376132

SEQ ID NO: 54274 - protein, 83 aa, Homo sapiens
  Payload ID: 10724
  Gene Symbol: MYO1B
  Gene Name: myosin IB
  ENSP ID: ENSP00000387610
MAKMEVKTSLLDNMIGVGDMVLLEPLNEETFINNLKKRFDHSEIYTYIGSVVISVNPYRSLPIYSPEKVEEYRNRNFYELSPH

SEQ ID NO: 54275 - protein, 303 aa, Homo sapiens
  Payload ID: 10724
  Gene Symbol: MYO1B
  Gene Name: myosin IB
  ENSP ID: ENSP00000388140
MAKMEVKTSLLDNMIGVGDMVLLEPLNEETFINNLKKRFDHSEIYTYIGSVVISVNPYRSLPIYSPEKVEEYRNRNFYELSPHIFALSDEAYRSLRDQDKDQCILITGESGAGKTEASKLVMSYVAAVCGKGAEVNQVKEQLLQSNPVLEAFGNAKTVRNDNSSRFGKYMDIEFDFKGDPLGGVISNYLLEKSRVVKQPRGERNFHVFYQLLSGASEELLNKLKLERDFSRYNYLSLDSAKVNGVDDAANFRTVRNAMQIVGFMDHEAESVLAVVAAVLKLGNIEFKPESRVNGLDESKIKDK

SEQ ID NO: 54276 - protein, 149 aa, Homo sapiens
  Payload ID: 10724
  Gene Symbol: MYO1B
  Gene Name: myosin IB
  ENSP ID: ENSP00000399459
MAKMEVKTSLLDNMIGVGDMVLLEPLNEETFINNLKKRFDHSEIYTYIGSVVISVNPYRSLPIYSPEKVEEYRNRNFYELSPHIFALSDEAYRSLRDQDKDQCILITGESGAGKTEASKLVMSYVAAVCGKGAEVNQVKEQLLQSNPVL

SEQ ID NO: 54277 - protein, 163 aa, Homo sapiens
  Payload ID: 10724
  Gene Symbol: MYO1B
  Gene Name: myosin IB
  ENSP ID: ENSP00000401324
MAKMEVKTSLLDNMIGVGDMVLLEPLNEETFINNLKKRFDHSEIYTYIGSVVISVNPYRSLPIYSPEKVEEYRNRNFYELSPHIFALSDEAYRSLRDQDKDQCILITGESGAGKTEASKLVMSYVAAVCGKGAEVNQVKEQLLQSNPVLEAFGNAKTVRNDNS

SEQ ID NO: 54278 - protein, 192 aa, Homo sapiens
  Payload ID: 10724
  Gene Symbol: MYO1B
  Gene Name: myosin IB
  ENSP ID: ENSP00000408454
  MOD_RES (1)..(1): Any amino acid
XCKKYRDQFTDQQKLIYEEKLEASELFKDKKALYPSSVGQPFQGAYLEINKNPKYKKLKDAIEEKIIIAEVVNKINRANGKSTSRIFLLTNNNLLLADQKSGQIKSEVPLVDVTKVSMSSQNDGFFAVHLKEGSEAASKGDFLFSSDHLIEMATKLYRTTLSQTKQKLNIEISDEYVHVLFENPFSLSAFLF

SEQ ID NO: 54279 - protein, 189 aa, Homo sapiens
  Payload ID: 10724
  Gene Symbol: MYO1B
  Gene Name: myosin IB
  ENSP ID: ENSP00000489544
  MOD_RES (1)..(1): Any amino acid
XAKNLYSRLFSWLVNRINESIKAQTKVRKKVMGVLDIYGFEIFENADNSFEQFIINYCNEKLQQIFIELTLKEEQEEYIREDIEWTHIDYFNNAIICDLIENNTNGILAMLDEECLRPGTVTDETFLEKLNQVCATHQHFESRMSKCSRFLNDTSLPHSCFRIQHYAGKVLYQVEGFVDKNNDLLYRDL

SEQ ID NO: 54280 - protein, 1063 aa, Homo sapiens
  Payload ID: 10725
  Gene Symbol: MYO1C
  Gene Name: myosin IC
  Uniprot ID: O00159
  ENSP ID: ENSP00000352834
MALQVELVPTGEIIRVVHPHRPCKLALGSDGVRVTMESALTARDRVGVQDFVLLENFTSEAAFIENLRRRFRENLIYTYIGPVLVSVNPYRDLQIYSRQHMERYRGVSFYEVPPHLFAVADTVYRALRTERRDQAVMISGESGAGKTEATKRLLQFYAETCPAPERGGAVRDRLLQSNPVLEAFGNAKTLRNDNSSRFGKYMDVQFDFKGAPVGGHILSYLLEKSRVVHQNHGERNFHIFYQLLEGGEEETLRRLGLERNPQSYLYLVKGQCAKVSSINDKSDWKVVRKALTVIDFTEDEVEDLLSIVASVLHLGNIHFAANEESNAQVTTENQLKYLTRLLSVEGSTLREALTHRKIIAKGEELLSPLNLEQAAYARDALAKAVYSRTFTWLVGKINRSLASKDVESPSWRSTTVLGLLDIYGFEVFQHNSFEQFCINYCNEKLQQLFIELTLKSEQEEYEAEGIAWEPVQYFNNKIICDLVEEKFKGIISILDEECLRPGEATDLTFLEKLEDTVKHHPHFLTHKLADQRTRKSLGRGEFRLLHYAGEVTYSVTGFLDKNNDLLFRNLKETMCSSKNPIMSQCFDRSELSDKKRPETVATQFKMSLLQLVEILQSKEPAYVRCIKPNDAKQPGRFDEVLIRHQVKYLGLLENLRVRRAGFAYRRKYEAFLQRYKSLCPETWPTWAGRPQDGVAVLVRHLGYKPEEYKMGRTKIFIRFPKTLFATEDALEVRRQSLATKIQAAWRGFHWRQKFLRVKRSAICIQSWWRGTLGRRKAAKRKWAAQTIRRLIRGFVLRHAPRCPENAFFLDHVRTSFLLNLRRQLPQNVLDTSWPTPPPALREASELLRELCIKNMVWKYCRSISPEWKQQLQQKAVASEIFKGKKDNYPQSVPRLFISTRLGTDEISPRVLQALGSEPIQYAVPVVKYDRKGYKPRSRQLLLTPNAVVIVEDAKVKQRIDYANLTGISVSSLSDSLFVLHVQRADNKQKGDVVLQSDHVIETLTKTALSANRVNSININQGSITFAGGPGRDGTIDFTPGSELLITKAKNGHLAVVAPRLNSR

SEQ ID NO: 54281 - protein, 1028 aa, Homo sapiens
  Payload ID: 10725
  Gene Symbol: MYO1C
  Gene Name: myosin IC
  Uniprot ID: O00159
  ENSP ID: ENSP00000354283
MESALTARDRVGVQDFVLLENFTSEAAFIENLRRRFRENLIYTYIGPVLVSVNPYRDLQIYSRQHMERYRGVSFYEVPPHLFAVADTVYRALRTERRDQAVMISGESGAGKTEATKRLLQFYAETCPAPERGGAVRDRLLQSNPVLEAFGNAKTLRNDNSSRFGKYMDVQFDFKGAPVGGHILSYLLEKSRVVHQNHGERNFHIFYQLLEGGEEETLRRLGLERNPQSYLYLVKGQCAKVSSINDKSDWKVVRKALTVIDFTEDEVEDLLSIVASVLHLGNIHFAANEESNAQVTTENQLKYLTRLLSVEGSTLREALTHRKIIAKGEELLSPLNLEQAAYARDALAKAVYSRTFTWLVGKINRSLASKDVESPSWRSTTVLGLLDIYGFEVFQHNSFEQFCINYCNEKLQQLFIELTLKSEQEEYEAEGIAWEPVQYFNNKIICDLVEEKFKGIISILDEECLRPGEATDLTFLEKLEDTVKHHPHFLTHKLADQRTRKSLGRGEFRLLHYAGEVTYSVTGFLDKNNDLLFRNLKETMCSSKNPIMSQCFDRSELSDKKRPETVATQFKMSLLQLVEILQSKEPAYVRCIKPNDAKQPGRFDEVLIRHQVKYLGLLENLRVRRAGFAYRRKYEAFLQRYKSLCPETWPTWAGRPQDGVAVLVRHLGYKPEEYKMGRTKIFIRFPKTLFATEDALEVRRQSLATKIQAAWRGFHWRQKFLRVKRSAICIQSWWRGTLGRRKAAKRKWAAQTIRRLIRGFVLRHAPRCPENAFFLDHVRTSFLLNLRRQLPQNVLDTSWPTPPPALREASELLRELCIKNMVWKYCRSISPEWKQQLQQKAVASEIFKGKKDNYPQSVPRLFISTRLGTDEISPRVLQALGSEPIQYAVPVVKYDRKGYKPRSRQLLLTPNAVVIVEDAKVKQRIDYANLTGISVSSLSDSLFVLHVQRADNKQKGDVVLQSDHVIETLTKTALSANRVNSININQGSITFAGGPGRDGTIDFTPGSELLITKAKNGHLAVVAPRLNSR

SEQ ID NO: 54282 - protein, 1044 aa, Homo sapiens
  Payload ID: 10725
  Gene Symbol: MYO1C
  Gene Name: myosin IC
  Uniprot ID: O00159
  ENSP ID: ENSP00000412197
MRYRASALGSDGVRVTMESALTARDRVGVQDFVLLENFTSEAAFIENLRRRFRENLIYTYIGPVLVSVNPYRDLQIYSRQHMERYRGVSFYEVPPHLFAVADTVYRALRTERRDQAVMISGESGAGKTEATKRLLQFYAETCPAPERGGAVRDRLLQSNPVLEAFGNAKTLRNDNSSRFGKYMDVQFDFKGAPVGGHILSYLLEKSRVVHQNHGERNFHIFYQLLEGGEEETLRRLGLERNPQSYLYLVKGQCAKVSSINDKSDWKVVRKALTVIDFTEDEVEDLLSIVASVLHLGNIHFAANEESNAQVTTENQLKYLTRLLSVEGSTLREALTHRKIIAKGEELLSPLNLEQAAYARDALAKAVYSRTFTWLVGKINRSLASKDVESPSWRSTTVLGLLDIYGFEVFQHNSFEQFCINYCNEKLQQLFIELTLKSEQEEYEAEGIAWEPVQYFNNKIICDLVEEKFKGIISILDEECLRPGEATDLTFLEKLEDTVKHHPHFLTHKLADQRTRKSLGRGEFRLLHYAGEVTYSVTGFLDKNNDLLFRNLKETMCSSKNPIMSQCFDRSELSDKKRPETVATQFKMSLLQLVEILQSKEPAYVRCIKPNDAKQPGRFDEVLIRHQVKYLGLLENLRVRRAGFAYRRKYEAFLQRYKSLCPETWPTWAGRPQDGVAVLVRHLGYKPEEYKMGRTKIFIRFPKTLFATEDALEVRRQSLATKIQAAWRGFHWRQKFLRVKRSAICIQSWWRGTLGRRKAAKRKWAAQTIRRLIRGFVLRHAPRCPENAFFLDHVRTSFLLNLRRQLPQNVLDTSWPTPPPALREASELLRELCIKNMVWKYCRSISPEWKQQLQQKAVASEIFKGKKDNYPQSVPRLFISTRLGTDEISPRVLQALGSEPIQYAVPVVKYDRKGYKPRSRQLLLTPNAVVIVEDAKVKQRIDYANLTGISVSSLSDSLFVLHVQRADNKQKGDVVLQSDHVIETLTKTALSANRVNSININQGSITFAGGPGRDGTIDFTPGSELLITKAKNGHLAVVAPRLNSR

SEQ ID NO: 54283 - protein, 1039 aa, Homo sapiens
  Payload ID: 10725
  Gene Symbol: MYO1C
  Gene Name: myosin IC
  ENSP ID: ENSP00000437685
MALGSDGVRVTMESALTARDRVGVQDFVLLENFTSEAAFIENLRRRFRENLIYTYIGPVLVSVNPYRDLQIYSRQHMERYRGVSFYEVPPHLFAVADTVYRALRTERRDQAVMISGESGAGKTEATKRLLQFYAETCPAPERGGAVRDRLLQSNPVLEAFGNAKTLRNDNSSRFGKYMDVQFDFKGAPVGGHILSYLLEKSRVVHQNHGERNFHIFYQLLEGGEEETLRRLGLERNPQSYLYLVKGQCAKVSSINDKSDWKVVRKALTVIDFTEDEVEDLLSIVASVLHLGNIHFAANEESNAQVTTENQLKYLTRLLSVEGSTLREALTHRKIIAKGEELLSPLNLEQAAYARDALAKAVYSRTFTWLVGKINRSLASKDVESPSWRSTTVLGLLDIYGFEVFQHNSFEQFCINYCNEKLQQLFIELTLKSEQEEYEAEGIAWEPVQYFNNKIICDLVEEKFKGIISILDEECLRPGEATDLTFLEKLEDTVKHHPHFLTHKLADQRTRKSLGRGEFRLLHYAGEVTYSVTGFLDKNNDLLFRNLKETMCSSKNPIMSQCFDRSELSDKKRPETVATQFKMSLLQLVEILQSKEPAYVRCIKPNDAKQPGRFDEVLIRHQVKYLGLLENLRVRRAGFAYRRKYEAFLQRYKSLCPETWPTWAGRPQDGVAVLVRHLGYKPEEYKMGRTKIFIRFPKTLFATEDALEVRRQSLATKIQAAWRGFHWRQKFLRVKRSAICIQSWWRGTLGRRKAAKRKWAAQTIRRLIRGFVLRHAPRCPENAFFLDHVRTSFLLNLRRQLPQNVLDTSWPTPPPALREASELLRELCIKNMVWKYCRSISPEWKQQLQQKAVASEIFKGKKDNYPQSVPRLFISTRLGTDEISPRVLQALGSEPIQYAVPVVKYDRKGYKPRSRQLLLTPNAVVIVEDAKVKQRIDYANLTGISVSSLSDSLFVLHVQRADNKQKGDVVLQSDHVIETLTKTALSANRVNSININQGSITFAGGPGRDGTIDFTPGSELLITKAKNGHLAVVAPRLNSR

SEQ ID NO: 54284 - protein, 134 aa, Homo sapiens
  Payload ID: 10725
  Gene Symbol: MYO1C
  Gene Name: myosin IC
  ENSP ID: ENSP00000458610
MESALTARDRVGVQDFVLLENFTSEAAFIENLRRRFRENLIYTYIGPVLVSVNPYRDLQIYSRQHMERYRGVSFYEVPPHLFAVADTVYRALRTERRDQAVMISGESGAGKTEATKRLLQFYAETCPAPERGGA

SEQ ID NO: 54285 - protein, 1028 aa, Homo sapiens; identical to SEQ ID NO: 54281
  Payload ID: 10725
  Gene Symbol: MYO1C
  Gene Name: myosin IC
  Uniprot ID: O00159
  ENSP ID: ENSP00000459174

SEQ ID NO: 54286 - protein, 267 aa, Homo sapiens
  Payload ID: 10725
  Gene Symbol: MYO1C
  Gene Name: myosin IC
  ENSP ID: ENSP00000459271
MESALTARDRVGVQDFVLLENFTSEAAFIENLRRRFRENLIYTYIGPVLVSVNPYRDLQIYSRQHMERYRGVSFYEVPPHLFAVADTVYRALRTERRDQAVMISGESGAGKTEATKRLLQFYAETCPAPERGGAVRDRLLQSNPVLEAFGNAKTLRNDNSSRFGKYMDVQFDFKGAPVGGHILSYLLEKSRVVHQNHGERNFHIFYQLLEGGEEETLRRLGLERNPQSYLYLVKGQCAKVSSINDKSDWKVVRKALTVIDFTEDEVE

SEQ ID NO: 54287 - protein, 65 aa, Homo sapiens
  Payload ID: 10725
  Gene Symbol: MYO1C
  Gene Name: myosin IC
  ENSP ID: ENSP00000459558
  MOD_RES (1)..(1): Any amino acid
XTEDALEVRRQSLATLPFMPLVERTRHQAPSWLPALWPIAFLSQPQPQRSKLPGGAFTGGRNSSG

SEQ ID NO: 54288 - protein, 137 aa, Homo sapiens
  Payload ID: 10725
  Gene Symbol: MYO1C
  Gene Name: myosin IC
  ENSP ID: ENSP00000460415
MESALTARDRVGVQDFVLLENFTSEAAFIENLRRRFRENLIYTYIGPVLVSVNPYRDLQIYSRQHMERYRGVSFYEVPPHLFAVADTVYRALRTERRDQAVMISGESGAGKTEATKRLLQFYAETCPAPERGGAVRD

SEQ ID NO: 54289 - protein, 170 aa, Homo sapiens
  Payload ID: 10725
  Gene Symbol: MYO1C
  Gene Name: myosin IC
  ENSP ID: ENSP00000460831
MESALTARDRVGVQDFVLLENFTSEAAFIENLRRRFRENLIYTYIGPVLVSVNPYRDLQIYSRQHMERYRGVSFYEVPPHLFAVADTVYRALRTERRDQAVMISGESGAGKTEATKRLLQFYAETCPAPERGGAVRDRLLQSNPVLEAFGNAKTLRNDNSSRFGKYMDVQ

SEQ ID NO: 54290 - protein, 164 aa, Homo sapiens
  Payload ID: 10725
  Gene Symbol: MYO1C
  Gene Name: myosin IC
  ENSP ID: ENSP00000461175
MESALTARDRVGVQDFVLLENFTSEAAFIENLRRRFRENLIYTYIGPVLVSVNPYRDLQIYSRQHMERYRGVSFYEVPPHLFAVADTVYRALRTERRDQAVMISGESGAGKTEATKRLLQFYAETCPAPERGGAVRDRLLQSNPVLEAFGNAKTLRNDNSSRFG

SEQ ID NO: 54291 - protein, 168 aa, Homo sapiens
  Payload ID: 10725
  Gene Symbol: MYO1C
  Gene Name: myosin IC
  ENSP ID: ENSP00000461682
MPCALGSDGVRVTMESALTARDRVGVQDFVLLENFTSEAAFIENLRRRFRENLIYTYIGPVLVSVNPYRDLQIYSRQHMERYRGVSFYEVPPHLFAVADTVYRALRTERRDQAVMISGESGAGKTEATKRLLQFYAETCPAPERGGAVRDRLLQSNPVLEAFGNAKTL

SEQ ID NO: 54292 - protein, 1006 aa, Homo sapiens
  Payload ID: 10726
  Gene Symbol: MYO1D
  Gene Name: myosin ID
  Uniprot ID: O94832
  ENSP ID: ENSP00000324527
MAEQESLEFGKADFVLMDTVSMPEFMANLRLRFEKGRIYTFIGEVVVSVNPYKLLNIYGRDTIEQYKGRELYERPPHLFAIADAAYKAMKRRSKDTCIVISGESGAGKTEASKYIMQYIAAITNPSQRAEVERVKNMLLKSNCVLEAFGNAKTNRNDNSSRFGKYMDINFDFKGDPIGGHINNYLLEKSRVIVQQPGERSFHSFYQLLQGGSEQMLRSLHLQKSLSSYNYIHVGAQLKSSINDAAEFRVVADAMKVIGFKPEEIQTVYKILAAILHLGNLKFVVDGDTPLIENGKVVSIIAELLSTKTDMVEKALLYRTVATGRDIIDKQHTEQEASYGRDAFAKAIYERLFCWIVTRINDIIEVKNYDTTIHGKNTVIGVLDIYGFEIFDNNSFEQFCINYCNEKLQQLFIQLVLKQEQEEYQREGIPWKHIDYFNNQIIVDLVEQQHKGIIAILDDACMNVGKVTDEMFLEALNSKLGKHAHFSSRKLCASDKILEFDRDFRIRHYAGDVVYSVIGFIDKNKDTLFQDFKRLMYNSSNPVLKNMWPEGKLSITEVTKRPLTAATLFKNSMIALVDNLASKEPYYVRCIKPNDKKSPQIFDDERCRHQVEYLGLLENVRVRRAGFAFRQTYEKFLHRYKMISEFTWPNHDLPSDKEAVKKLIERCGFQDDVAYGKTKIFIRTPRTLFTLEELRAQMLIRIVLFLQKVWRGTLARMRYKRTKAALTIIRYYRRYKVKSYIHEVARRFHGVKTMRDYGKHVKWPSPPKVLRRFEEALQTIFNRWRASQLIKSIPASDLPQVRAKVAAVEMLKGQRADLGLQRAWEGNYLASKPDTPQTSGTFVPVANELKRKDKYMNVLFSCHVRKVNRFSKVEDRAIFVTDRHLYKMDPTKQYKVMKTIPLYNLTGLSVSNGKDQLVVFHTKDNKDLIVCLFSKQPTHESRIGELVGVLVNHFKSEKRHLQVNVTNPVQCSLHGKKCTVSVETRLNQPQPDFTKNRSGFILSVPGN

SEQ ID NO: 54293 - protein, 436 aa, Homo sapiens
  Payload ID: 10726
  Gene Symbol: MYO1D
  Gene Name: myosin ID
  ENSP ID: ENSP00000462055
MAEQESLEFGKADFVLMDTVSMPEFMANLRLRFEKGRIYTFIGEVVVSVNPYKLLNIYGRDTIEQYKGRELYERPPHLFAIADAAYKAMKRRSKDTCIVISGESGAGKTEASKYIMQYIAAITNPSQRAEVERVKNMLLKSNCVLEAFGNAKTNRNDNSSRFGKYMDINFDFKGDPIGGHINNYLLEKSRVIVQQPGERSFHSFYQLLQGGSEQMLRSLHLQKSLSSYNYIHVGAQLKSSINDAAEFRVVADAMKVIGFKPEEIQTVYKILAAILHLGNLKFVVDGDTPLIENGKVVSIIAELLSTKTDMVEKALLYRTVATGRDIIDKQHTEQEASYGRDAFAKAIYERLFCWIVTRINDIIEVKNYDTTIHGKNTVIGVLDIYGFEIFDNNSFEQFCINYCNEKLQQLFIQLVLKQEQEEYQREGIPWKHVGLL

SEQ ID NO: 54294 - protein, 961 aa, Homo sapiens
  Payload ID: 10726
  Gene Symbol: MYO1D
  Gene Name: myosin ID
  ENSP ID: ENSP00000464305
MAEQESLEFGKADFVLMDTVSMPEFMANLRLRFEKGRIYTFIGEVVVSVNPYKLLNIYGRDTIEQYKGRELYERPPHLFAIADAAYKAMKRRSKDTCIVISGESGAGKTEASKYIMQYIAAITNPSQRAEVERVKNMLLKSNCVLEAFGNAKTNRNDNSSRFGKYMDINFDFKGDPIGGHINNYLLEKSRVIVQQPGERSFHSFYQLLQGGSEQMLRSLHLQKSLSSYNYIHVGAQLKSSINDAAEFRVVADAMKVIGFKPEEIQTVYKILAAILHLGNLKFVVDGDTPLIENGKVVSIIAELLSTKTDMVEKALLYRTVATGRDIIDKQHTEQEASYGRDAFAKAIYERLFCWIVTRINDIIEVKNYDTTIHGKNTVIGVLDIYGFEIFDNNSFEQFCINYCNEKLQQLFIQLVLKQEQEEYQREGIPWKHIDYFNNQIIVDLVEQQHKGIIAILDDACMNVGKVTDEMFLEALNSKLGKHAHFSSRKLCASDKILEFDRDFRIRHYAGDVVYSVIGFIDKNKDTLFQDFKRLMYNSSNPVLKNMWPEGKLSITEVTKRPLTAATLFKNSMIALVDNLASKEPYYVRCIKPNDKKSPQIFDDERCRHQVEYLGLLENVRVRRAGFAFRQTYEKFLHRYKMISEFTWPNHDLPSDKEAVKKLIERCGFQDDVAYGKTKIFIRTPRTLFTLEELRAQMLIRIVLFLQKVWRGTLARMRYKRTKAALTIIRYYRRYKVKSYIHEVARRFHGVKTMRDYGKHVKWPSPPKVLRRFEEALQTIFNRWRASQLIKSIPASDLPQVRAKVAAVEMLKGQRADLGLQRAWEGNYLASKPDTPQTSGTFVPVANELKRKDKYMNVLFSCHVRKVNRFSKVEDRAIFVTDRHLYKMDPTKQYKVMKTIPLYNLTGLSVSNGKDQLVVFHTKDNKDLIVCLFSKQPTHESRIGELVGVLVNHFKRNHLLIL

SEQ ID NO: 54295 - protein, 44 aa, Homo sapiens
  Payload ID: 10726
  Gene Symbol: MYO1D
  Gene Name: myosin ID
  ENSP ID: ENSP00000464346
KHAHFSSRKLCASDKILEFDRDFRIRHYAGDVVSSWNLLSYPQH

SEQ ID NO: 54296 - protein, 918 aa, Homo sapiens
  Payload ID: 10726
  Gene Symbol: MYO1D
  Gene Name: myosin ID
  ENSP ID: ENSP00000464741
MKRRSKDTCIVISGESGAGKTEASKYIMQYIAAITNPSQRAEVERVKNMLLKSNCVLEAFGNAKTNRNDNSSRFGKYMDINFDFKGDPIGGHINNYLLEKSRVIVQQPGERSFHSFYQLLQGGSEQMLRSLHLQKSLSSYNYIHVGAQLKSSINDAAEFRVVADAMKVIGFKPEEIQTVYKILAAILHLGNLKFVVDGDTPLIENGKVVSIIAELLSTKTDMVEKALLYRTVATGRDIIDKQHTEQEASYGRDAFAKAIYERLFCWIVTRINDIIEVKNYDTTIHGKNTVIGVLDIYGFEIFDNNSFEQFCINYCNEKLQQLFIQLVLKQEQEEYQREGIPWKHIDYFNNQIIVDLVEQQHKGIIAILDDACMNVGKVTDEMFLEALNSKLGKHAHFSSRKLCASDKILEFDRDFRIRHYAGDVVYSVIGFIDKNKDTLFQDFKRLMYNSSNPVLKNMWPEGKLSITEVTKRPLTAATLFKNSMIALVDNLASKEPYYVRCIKPNDKKSPQIFDDERCRHQVEYLGLLENVRVRRAGFAFRQTYEKFLHRYKMISEFTWPNHDLPSDKEAVKKLIERCGFQDDVAYGKTKIFIRTPRTLFTLEELRAQMLIRIVLFLQKVWRGTLARMRYKRTKAALTIIRYYRRYKVKSYIHEVARRFHGVKTMRDYGKHVKWPSPPKVLRRFEEALQTIFNRWRASQLIKSIPASDLPQVRAKVAAVEMLKGQRADLGLQRAWEGNYLASKPDTPQTSGTFVPVANELKRKDKYMNVLFSCHVRKVNRFSKVEDRAIFVTDRHLYKMDPTKQYKVMKTIPLYNLTGLSVSNGKDQLVVFHTKDNKDLIVCLFSKQPTHESRIGELVGVLVNHFKSEKRHLQVNVTNPVQCSLHGKKCTVSVETRLNQPQPDFTKNRSGFILSVPGN

SEQ ID NO: 54297 - protein, 1108 aa, Homo sapiens
  Payload ID: 10727
  Gene Symbol: MYO1E
  Gene Name: myosin IE
  Uniprot ID: Q12965
  ENSP ID: ENSP00000288235
MGSKGVYQYHWQSHNVKHSGVDDMVLLSKITENSIVENLKKRYMDDYIFTYIGSVLISVNPFKQMPYFGEKEIEMYQGAAQYENPPHIYALADNMYRNMIIDRENQCVIISGESGAGKTVAAKYIMSYISRVSGGGTKVQHVKDIILQSNPLLEAFGNAKTVRNNNSSRFGKYFEIQFSPGGEPDGGKISNFLLEKSRVVMRNPGERSFHIFYQLIEGASAEQKHSLGITSMDYYYYLSLSGSYKVDDIDDRREFQETLHAMNVIGIFAEEQTLVLQIVAGILHLGNISFKEVGNYAAVESEEFLAFPAYLLGINQDRLKEKLTSRQMDSKWGGKSESIHVTLNVEQACYTRDALAKALHARVFDFLVDSINKAMEKDHEEYNIGVLDIYGFEIFQKNGFEQFCINFVNEKLQQIFIELTLKAEQEEYVQEGIRWTPIEYFNNKIVCDLIENKVNPPGIMSILDDVCATMHAVGEGADQTLLQKLQMQIGSHEHFNSWNQGFIIHHYAGKVSYDMDGFCERNRDVLFMDLIELMQSSELPFIKSLFPENLQADKKGRPTTAGSKIKKQANDLVSTLMKCTPHYIRCIKPNETKKPRDWEESRVKHQVEYLGLKENIRVRRAGYAYRRIFQKFLQRYAILTKATWPSWQGEEKQGVLHLLQSVNMDSDQFQLGRSKVFIKAPESLFLLEEMRERKYDGYARVIQKSWRKFVARKKYVQMREEASDLLLNKKERRRNSINRNFIGDYIGMEEHPELQQFVGKREKIDFADTVTKYDRRFKGVKRDLLLTPKCLYLIGREKVKQGPDKGLVKEVLKRKIEIERILSVSLSTMQDDIFILHEQEYDSLLESVFKTEFLSLLAKRYEEKTQKQLPLKFSNTLELKLKKENWGPWSAGGSRQVQFHQGFGDLAVLKPSNKVLQVSIGPGLPKNSRPTRRNTTQNTGYSSGTQNANYPVRAAPPPPGYHQNGVIRNQYVPYPHAPGSQRSNQKSLYTSMARPPLPRQQSTSSDRVSQTPESLDFLKVPDQGAAGVRRQTTSRPPPAGGRPKPQPKPKPQVPQCKALYAYDAQDTDELSFNANDIIDIIKEDPSGWWTGRLRGKQGLFPNNYVTKI

SEQ ID NO: 54298 - protein, 187 aa, Homo sapiens
  Payload ID: 10727
  Gene Symbol: MYO1E
  Gene Name: myosin IE
  ENSP ID: ENSP00000453178
IKQLGKTKEMDVYGITDKQPSLELLAFPAYLLGINQDRLKEKLTSRQMDSKWGGKSESIHVTLNVEQACYTRDALAKALHARVFDFLVDSINKAMEKDHEEYNIGVLDIYGFEIFQKNGFEQFCINFVNEKLQQIFIELTLKAEQEEYVQEGIRWTPIEYFNNKIVCDLIENKVNPPGIMSILDDVC

SEQ ID NO: 54299 - protein, 276 aa, Homo sapiens
  Payload ID: 10727
  Gene Symbol: MYO1E
  Gene Name: myosin IE
  ENSP ID: ENSP00000453232
GKYFEIQFSPGGEPDGGKISNFLLEKSRVVMRNPGERSFHIFYQLIEGASAEQKHSLGITSMDYYYYLSLSGSYKVDDIDDRREFQETLHAMNVIGIFAEEQTLVLQIVAGILHLGNISFKEVGNYAAVESEEFLAFPAYLLGINQDRLKEKLTSRQMDSKWGGKSESIHVTLNVEQACYTRDALAKALHARVFDFLVDGVKRDLLLTPKCLYLIGREKVKQGPDKGLVKEVLKRKIEIERILSVSLSTMQDDIFILHEQEYDSLLESVFKTEFLS

SEQ ID NO: 54300 - protein, 112 aa, Homo sapiens
  Payload ID: 10727
  Gene Symbol: MYO1E
  Gene Name: myosin IE
  ENSP ID: ENSP00000453811
MGSKGVYQYHWQSHNVKHSGVDDMVLLSKITENSIVENLKKRYMDDYIFTYIGSVLISVNPFKQMPYFGEKEIEMYQGAAQYENPPHIYALADNMYRNMIIDRENQCVIIST

SEQ ID NO: 54301 - protein, 73 aa, Homo sapiens
  Payload ID: 10727
  Gene Symbol: MYO1E
  Gene Name: myosin IE
  ENSP ID: ENSP00000453936
QTPESLDFLKVPDQGAAGVRRQTTSRPPPAGGRPKPQPKPKPQVRGWGLGAGLLALLSLGLQLECGWPILVCV

SEQ ID NO: 54302 - protein, 317 aa, Homo sapiens
  Payload ID: 10727
  Gene Symbol: MYO1E
  Gene Name: myosin IE
  ENSP ID: ENSP00000454113
  MOD_RES (1)..(1): Any amino acid
XDQTLLQKLQMQIGSHEHFNSWNQGFIIHHYAGKVSYDMDGFCERNRDVLFMDLIELMQSSELPFIKSLFPENLQADKKGRPTTAGSKIKKQANDLVSTLMKCTPHYIRCIKPNETKKPRDWEESRYAILTKATWPSWQGEEKQGVLHLLQSVNMDSDQFQLGRSKVFIKAPESLFLLEEMRERKYDGYARVIQKSWRKFVARKKYVQMREEASDLLLNKKERRRNSINRNFIGDYIGMEEHPELQQFVGKREKIDFADTVTKYDRRFKGVKRDLLLTPKCLYLIGREKVKQGPDKGLVKEVLKRKIEIERILSVSL

SEQ ID NO: 54303 - protein, 1098 aa, Homo sapiens
  Payload ID: 10728
  Gene Symbol: MYO1F
  Gene Name: myosin IF
  Uniprot ID: O00160
  ENSP ID: ENSP00000344871
MGSKERFHWQSHNVKQSGVDDMVLLPQITEDAIAANLRKRFMDDYIFTYIGSVLISVNPFKQMPYFTDREIDLYQGAAQYENPPHIYALTDNMYRNMLIDCENQCVIISGESGAGKTVAAKYIMGYISKVSGGGEKVQHVKDIILQSNPLLEAFGNAKTVRNNNSSRFGKYFEIQFSRGGEPDGGKISNFLLEKSRVVMQNENERNFHIYYQLLEGASQEQRQNLGLMTPDYYYYLNQSDTYQVDGTDDRSDFGETLSAMQVIGIPPSIQQLVLQLVAGILHLGNISFCEDGNYARVESVDLLAFPAYLLGIDSGRLQEKLTSRKMDSRWGGRSESINVTLNVEQAAYTRDALAKGLYARLFDFLVEAINRAMQKPQEEYSIGVLDIYGFEIFQKNGFEQFCINFVNEKLQQIFIELTLKAEQEEYVQEGIRWTPIQYFNNKVVCDLIENKLSPPGIMSVLDDVCATMHATGGGADQTLLQKLQAAVGTHEHFNSWSAGFVIHHYAGKVSYDVSGFCERNRDVLFSDLIELMQTSEQAFLRMLFPEKLDGDKKGRPSTAGSKIKKQANDLVATLMRCTPHYIRCIKPNETKRPRDWEENRVKHQVEYLGLKENIRVRRAGFAYRRQFAKFLQRYAILTPETWPRWRGDERQGVQHLLRAVNMEPDQYQMGSTKVFVKNPESLFLLEEVRERKFDGFARTIQKAWRRHVAVRKYEEMREEASNILLNKKERRRNSINRNFVGDYLGLEERPELRQFLGKRERVDFADSVTKYDRRFKPIKRDLILTPKCVYVIGREKVKKGPEKGQVCEVLKKKVDIQALRGVSLSTRQDDFFILQEDAADSFLESVFKTEFVSLLCKRFEEATRRPLPLTFSDTLQFRVKKEGWGGGGTRSVTFSRGFGDLAVLKVGGRTLTVSVGDGLPKSSKPTRKGMAKGKPRRSSQAPTRAAPAPPRGMDRNGVPPSARGGPLPLEIMSGGGTHRPPRGPPSTSLGASRRPRARPPSEHNTEFLNVPDQGMAGMQRKRSVGQRPVPGVGRPKPQPRTHGPRCRALYQYVGQDVDELSFNVNEVIEILMEDPSGWWKGRLHGQEGLFPGNYVEKI

SEQ ID NO: 54304 - protein, 295 aa, Homo sapiens
  Payload ID: 10728
  Gene Symbol: MYO1F
  Gene Name: myosin IF
  ENSP ID: ENSP00000469098
PRRSLLRPHRADADQAFLRMLFPEKLDGDKKGRPSTAGSKIKKQANDLVATLMRCTPHYIRCIKPNETKRPRDWEENRTGDSPPRGDSAYPPHQSQAPGGIPGPEGEHQGAQSRLRLPPPVRQIPAEVCHSDPRDVAAVAWGRTPGRPAPASGGQHGARPVPDGEHQGLCQEPRVAFPPGGGARAKVRWLCPNHPEGLAAPRGCPEVRGDAGGSFQHPAEQEGAEAQQHQSELRRGLPGAGGAARAASVPGQEGAGGLRRFGHQVRPPLQAHQAGLDPDAQVCVCDWARESEEGT

SEQ ID NO: 54305 - protein, 118 aa, Homo sapiens
  Payload ID: 10728
  Gene Symbol: MYO1F
  Gene Name: myosin IF
  ENSP ID: ENSP00000469380
KAEQEEYVQEGIRWTPIQYFNNKVVCDLIENKLSPPGIMSVLDDVCATMHATGGGADQTLLQKLQAAVGTHEHFNSWSAGFVIHHYAGKVSYDVSGFCERNRDVLFSDLIELMQTSEQ

SEQ ID NO: 54306 - protein, 76 aa, Homo sapiens
  Payload ID: 10728
  Gene Symbol: MYO1F
  Gene Name: myosin IF
  ENSP ID: ENSP00000469387
MGSKERFHWQSHNVKQSGVDDMVLLPQITEDAIAANLRKRFMDDYIFVPWAKAGDLHRLCAHLCKPLQADALLHRP

SEQ ID NO: 54307 - protein, 134 aa, Homo sapiens
  Payload ID: 10728
  Gene Symbol: MYO1F
  Gene Name: myosin IF
  ENSP ID: ENSP00000469668
MGSKERFHWQSHNVKQSGVDDMVLLPQITEDAIAANLRKRFMDDYIFVPWAKAGGGQQMPYFTDREIDLYQGAAQYENPPHIYALTDNMYRNMLIDCENQCVIISGESGAGKTVAAKYIMGYISKVSGGGEKVQ

SEQ ID NO: 54308 - protein, 1098 aa, Homo sapiens; identical to SEQ ID NO: 54303
  Payload ID: 10728
  Gene Symbol: MYO1F
  Gene Name: myosin IF
  Uniprot ID: O00160
  ENSP ID: ENSP00000481682

SEQ ID NO: 54309 - protein, 1018 aa, Homo sapiens
  Payload ID: 10729
  Gene Symbol: MYO1G
  Gene Name: myosin IG
  Uniprot ID: B0I1T2
  ENSP ID: ENSP00000258787
MEDEEGPEYGKPDFVLLDQVTMEDFMRNLQLRFEKGRIYTYIGEVLVSVNPYQELPLYGPEAIARYQGRELYERPPHLYAVANAAYKAMKHRSRDTCIVISGESGAGKTEASKHIMQYIAAVTNPSQRAEVERVKDVLLKSTCVLEAFGNARTNRNHNSSRFGKYMDINFDFKGDPIGGHIHSYLLEKSRVLKQHVGERNFHAFYQLLRGSEDKQLHELHLERNPAVYNFTHQGAGLNMTVHSALDSDEQSHQAVTEAMRVIGFSPEEVESVHRILAAILHLGNIEFVETEEGGLQKEGLAVAEEALVDHVAELTATPRDLVLRSLLARTVASGGRELIEKGHTAAEASYARDACAKAVYQRLFEWVVNRINSVMEPRGRDPRRDGKDTVIGVLDIYGFEVFPVNSFEQFCINYCNEKLQQLFIQLILKQEQEEYEREGITWQSVEYFNNATIVDLVERPHRGILAVLDEACSSAGTITDRIFLQTLDMHHRHHLHYTSRQLCPTDKTMEFGRDFRIKHYAGDVTYSVEGFIDKNRDFLFQDFKRLLYNSTDPTLRAMWPDGQQDITEVTKRPLTAGTLFKNSMVALVENLASKEPFYVRCIKPNEDKVAGKLDENHCRHQVAYLGLLENVRVRRAGFASRQPYSRFLLRYKMTCEYTWPNHLLGSDKAAVSALLEQHGLQGDVAFGHSKLFIRSPRTLVTLEQSRARLIPIIVLLLQKAWRGTLARWRCRRLRAIYTIMRWFRRHKVRAHLAELQRRFQAARQPPLYGRDLVWPLPPAVLQPFQDTCHALFCRWRARQLVKNIPPSDMPQIKAKVAAMGALQGLRQDWGCRRAWARDYLSSATDNPTASSLFAQRLKTLQDKDGFGAVLFSSHVRKVNRFHKIRNRALLLTDQHLYKLDPDRQYRVMRAVPLEAVTGLSVTSGGDQLVVLHARGQDDLVVCLHRSRPPLDNRVGELVGVLAAHCQGEGRTLEVRVSDCIPLSHRGVRRLISVEPRPEQPEPDFRCARGSFTLLWPSR

SEQ ID NO: 54310 - protein, 42 aa, Homo sapiens
  Payload ID: 10729
  Gene Symbol: MYO1G
  Gene Name: myosin IG
  ENSP ID: ENSP00000417650
MEDEEGPEYGKPDFVLLDQVTMEDFMRNLQLRGEWGREDRSQ

SEQ ID NO: 54311 - protein, 210 aa, Homo sapiens
  Payload ID: 10729
  Gene Symbol: MYO1G
  Gene Name: myosin IG
  ENSP ID: ENSP00000419847
MEDEEGPEYGKPDFVLLDQVTMEDFMRNLQLRFEKGRIYTYIGEVLVSVNPYQELPLYGPEAIARYQGRELYERPPHLYAVANAAYKAMKHRSRDTCIVISGESGAGKTEASKHIMQYIAAVTNPSQRAEVERVKDVLLKSTCVLEAFGNARTNRNHNSSRFGKYMDINFDFKGDPIGGHIHSYLLEKVGSLGSSSSTWVKETSTPSTNC

SEQ ID NO: 54312 - protein, 1038 aa, Homo sapiens
  Payload ID: 10730
  Gene Symbol: MYO1H
  Gene Name: myosin IH
  ENSP ID: ENSP00000439182
MESKKEDVRRKHIRLHMEGALTARDKVGVQDFVLLDAYTSESAFVDNLRKRFSENLIYTYIGTLLVSVNPYQELGIYTVSQMELYQGVNFFELPPHVYAIADNAYRMMCAELNNHFILISGESGAGKTEASKKILEYFAVTCPMTQSLQIARDRLLFSNPVLEAFGNARTLRNDNSSRFGKYMDIQFDFQGIPVGGHIISYLIEKSRVVYQNEGERNFHIFYQLLAGGEEERLSYLGLERDPQLYKYLSQGHCAKESSISDKNDWKTVSNAFSVIDFTEADLENLFGIIASVLHLGNIGFEEDDQGCATIPDTHEIKWIAKLLGVHPSVLLEALTHRKIEAKTEEVICPLTLELSVYARDAMAKAVYGRTFTWLVNKINSSLVNKDFTRKTVIGLLDIYGFEVFDKNGFEQFCINYCNEKLQQLLIERTLKAEQAEYEMEGIEWEPIKYFNNKIICDLVEERHKGIISILDEECIRPGPATDLSFLEKLEEKVGKHAHFETRKLAGPKGRKRIGWMEFRLLHYAGEVTYCTKGFLEKNNDLLYRHLKEVLCKSKNIILRECFLLAELENRRRPPTVGTQFKNSLSSLLETLISKEPSYIRCIKPNDRKEPSKFDDFLIRHQIKYLGLMEHLRVRRAGFAYRRKYEHFLQRYKSLCPDTWPHWHGPPAEGVERLIKYIGYKPEEYKLGKTKIFIRFPRTLFATEDAFEFSKHQLVARIQATYKRCLGRREYVKKRQAAIKLEAHWRGALARKAIQRRKWAVRIIRKFIKGFISRNKPLCPDNEEFIVFVRKNYILNLRYHLPKTVLDKSWLRPPGILENASDLLRKMCVRNLVQKYCRGITAERKAMMQQKVVTSEIFRGRKDGYTESLNQPFVNSRIDEGDINPKVLQLISHEKIQYGVPVIKYDRKGFKARQRQLILTQKAAYVVELAKIKQKIEYSALKGVSTSNLSDGILVIHVSPEDSKQKGDAVLQCGHVFEAVTKLVMLVKKENIVNVVQGSLQFFISPGKEGTIVFDTGLEEQVYKNKNGQLTVVSVRRKS

SEQ ID NO: 54313 - protein, 1022 aa, Homo sapiens
  Payload ID: 10730
  Gene Symbol: MYO1H
  Gene Name: myosin IH
  Uniprot ID: Q8N1T3
  ENSP ID: ENSP00000444076
MEGALTARDKVGVQDFVLLDAYTSESAFVDNLRKRFSENLIYTYIGTLLVSVNPYQELGIYTVSQMELYQGVNFFELPPHVYAIADNAYRMMCAELNNHFILISGESGAGKTEASKKILEYFAVTCPMTQSLQIARDRLLFSNPVLEAFGNARTLRNDNSSRFGKYMDIQFDFQGIPVGGHIISYLIEKSRVVYQNEGERNFHIFYQLLAGGEEERLSYLGLERDPQLYKYLSQGHCAKESSISDKNDWKTVSNAFSVIDFTEADLENLFGIIASVLHLGNIGFEEDDQGCATIPDTHEIKWIAKLLGVHPSVLLEALTHRKIEAKTEEVICPLTLELSVYARDAMAKAVYGRTFTWLVNKINSSLVNKDFTRKTVIGLLDIYGFEVFDKNGFEQFCINYCNEKLQQLLIERTLKAEQAEYEMEGIEWEPIKYFNNKIICDLVEERHKGIISILDEECIRPGPATDLSFLEKLEEKVGKHAHFETRKLAGPKGRKRIGWMEFRLLHYAGEVTYCTKGFLEKNNDLLYRHLKEVLCKSKNIILRECFLLAELENRRRPPTVGTQFKNSLSSLLETLISKEPSYIRCIKPNDRKEPSKFDDFLIRHQIKYLGLMEHLRVRRAGFAYRRKYEHFLQRYKSLCPDTWPHWHGPPAEGVERLIKYIGYKPEEYKLGKTKIFIRFPRTLFATEDAFEFSKHQLVARIQATYKRCLGRREYVKKRQAAIKLEAHWRGALARKAIQRRKWAVRIIRKFIKGFISRNKPLCPDNEEFIVFVRKNYILNLRYHLPKTVLDKSWLRPPGILENASDLLRKMCVRNLVQKYCRGITAERKAMMQQKVVTSEIFRGRKDGYTESLNQPFVNSRIDEGDINPKVLQLISHEKIQYGVPVIKYDRKGFKARQRQLILTQKAAYVVELAKIKQKIEYSALKGVSTSNLSDGILVIHVSPEDSKQKGDAVLQCGHVFEAVTKLVMLVKKENIVNVVQGSLQFFISPGKEGTIVFDTGLEEQVYKNKNGQLTVVSVRRKS

SEQ ID NO: 54314 - protein, 126 aa, Homo sapiens
  Payload ID: 10730
  Gene Symbol: MYO1H
  Gene Name: myosin IH
  ENSP ID: ENSP00000474025
QRQLILTQKAAYVVELAKIKQKIEYSALKGVSTSNLSDGILVIHVSPEDSKQKGDAVLQCGHVFEAVTKLVMLVKKENIVNVVQGSLQFFISPGKEGTIVFDTGLEEQVYKNKNGQLTVVSVRRKS

SEQ ID NO: 54315 - protein, 1616 aa, Homo sapiens
  Payload ID: 10731
  Gene Symbol: MYO3A
  Gene Name: myosin IIIA
  Uniprot ID: Q8NEV4
  ENSP ID: ENSP00000265944
MFPLIGKTIIFDNFPDPSDTWEITETIGKGTYGKVFKVLNKKNGQKAAVKILDPIHDIDEEIEAEYNILKALSDHPNVVRFYGIYFKKDKVNGDKLWLVLELCSGGSVTDLVKGFLKRGERMSEPLIAYILHEALMGLQHLHNNKTIHRDVKGNNILLTTEGGVKLVDFGVSAQLTSTRHRRNTSVGTPFWMAPEVIACEQQLDTTYDARCDTWSLGITAIELGDGDPPLADLHPMRALFKIPRNPPPKLRQPELWSAEFNDFISKCLTKDYEKRPTVSELLQHKFITQIEGKDVMLQKQLTEFIGIHQCMGGTEKARRERIHTKKGNFNRPLISNLKDVDDLATLEILDENTVSEQLEKCYSRDQIYVYVGDILIALNPFQSLGLYSTKHSKLYIGSKRTASPPHIFAMADLGYQSMITYNSDQCIVISGESGAGKTENAHLLVQQLTVLGKANNRTLQEKILQVNNLVEAFGNACTIINDNSSRFGKYLEMKFTSSGAVVGAQISEYLLEKSRVIHQAIGEKNFHIFYYIYAGLAEKKKLAHYKLPENKPPRYLQNDHLRTVQDIMNNSFYKSQYELIEQCFKVIGFTMEQLGSIYSILAAILNVGNIEFSSVATEHQIDKSHISNHTALENCASLLCIRADELQEALTSHCVVTRGETIIRPNTVEKATDVRDAMAKTLYGRLFSWIVNCINSLLKHDSSPSGNGDELSIGILDIFGFENFKKNSFEQLCINIANEQIQYYYNQHVFAWEQNEYLNEDVDARVIEYEDNWPLLDMFLQKPMGLLSLLDEESRFPKATDQTLVEKFEGNLKSQYFWRPKRMELSFGIHHYAGKVLYNASGFLAKNRDTLPTDIVLLLRSSDNSVIRQLVNHPLTKTGNLPHSKTKNVINYQMRTSEKLINLAKGDTGEATRHARETTNMKTQTVASYFRYSLMDLLSKMVVGQPHFVRCIKPNSERQARKYDKEKVLLQLRYTGILETARIRRLGFSHRILFANFIKRYYLLCYKSSEEPRMSPDTCATILEKAGLDNWALGKTKVFLKYYHVEQLNLMRKEAIDKLILIQACVRAFLCSRRYQKIQEKRKESAIIIQSAARGHLVRKQRKEIVDMKNTAVTTIQTSDQEFDYKKNFENTRESFVKKQAENAISANERFISAPNNKGSVSVVKTSTFKPEEETTNAVESNNRVYQTPKKMNNVYEEEVKQEFYLVGPEVSPKQKSVKDLEENSNLRKVEKEEAMIQSYYQRYTEERNCEESKAAYLERKAISERPSYPVPWLAENETSFKKTLEPTLSQRSIYQNANSMEKEKKTSVVTQRAPICSQEEGRGRLRHETVKERQVEPVTQAQEEEDKAAVFIQSKYRGYKRRQQLRKDKMSSFKHQRIVTTPTEVARNTHNLYSYPTKHEEINNIKKKDNKDSKATSEREACGLAIFSKQISKLSEEYFILQKKLNEMILSQQLKSLYLGVSHHKPINRRVSSQQCLSGVCKGEEPKILRPPRRPRKPKTLNNPEDSTYYYLLHKSIQEEKRRPRKDSQGKLLDLEDFYYKEFLPSRSGPKEHSPSLRERRPQQELQNQCIKANERCWAAESPEKEEEREPAANPYDFRRLLRKTSQRRRLVQQS

SEQ ID NO: 54316 - protein, 197 aa, Homo sapiens
  Payload ID: 10731
  Gene Symbol: MYO3A
  Gene Name: myosin IIIA
  ENSP ID: ENSP00000365478
MFPLIGKTIIFDNFPDPSDTWEITETIGKGTYGKVFKVLNKKNGQKAAVKILDPIHDIDEEIEAEYNILKALSDHPNVVRFYGIYFKKDKVNGDKLWLVLELCSGGSVTDLVKGFLKRGERMSEPLIAYILHEALMGLQHLHNNKTIHRDVKGNNILLTTEGGVKLVDFGVSAQLTSTRHRRNTSVGTPFWMAPEVR

SEQ ID NO: 54317 - protein, 247 aa, Homo sapiens
  Payload ID: 10731
  Gene Symbol: MYO3A
  Gene Name: myosin IIIA
  Uniprot ID: Q8NEV4
  ENSP ID: ENSP00000365479
MFPLIGKTIIFDNFPDPSDTWEITETIGKGTYGKVFKVLNKKNGQKAAVKILDPIHDIDEEIEAEYNILKALSDHPNVVRFYGIYFKKDKVNGDKLWLVLELCSGGSVTDLVKGFLKRGERMSEPLIAYILHEALMGLQHLHNNKTIHRDVKGNNILLTTEGGVKLVDFGVSAQLTSTRHRRNTSVGTPFWMAPEVIACEQQLDTTYDARCDTWSLGITAIELGDGDPPLADLHPMRALFKIPRSDD

SEQ ID NO: 54318 - protein, 664 aa, Homo sapiens
  Payload ID: 10731
  Gene Symbol: MYO3A
  Gene Name: myosin IIIA
  ENSP ID: ENSP00000445909
MFPLIGKTIIFDNFPDPSDTWEITETIGKGTYGKVFKVLNKKNGQKAAVKILDPIHDIDEEIEAEYNILKALSDHPNVVRFYGIYFKKDKVNGDKLWLVLELCSGGSVTDLVKGFLKRGERMSEPLIAYILHEALMGLQHLHNNKTIHRDVKGNNILLTTEGGVKLVDFGVSAQLTSTRHRRNTSVGTPFWMAPEVIACEQQLDTTYDARCDTWSLGITAIELGDGDPPLADLHPMRALFKIPRNPPPKLRQPELWSAEFNDFISKCLTKDYEKRPTVSELLQHKFITQIEGKDVMLQKQLTEFIGIHQCMGGTEKARRERIHTKKGNFNRPLISNLKDVDDLATLEILDENTVSEQLEKCYSRDQIYVYVGDILIALNPFQSLGLYSTKHSKLYIGSKRTASPPHIFAMADLGYQSMITYNSDQCIVISGESGAGKTENAHLLVQQLTVLGKANNRTLQEKILQVNNLVEAFGNACTIINDNSSRFGKYLEMKFTSSGAVVGAQISEYLLEKSRVIHQAIGEKNFHIFYYIYAGLAEKKKLAHYKLPENKPPRYLQNDHLRTVQDIMNNSFYKSQYELIEQCFKVIGFTMEVLGGGEPREGGGERASSQPLRLQEAPAQNLPAPAPRPAVLTVQRGSHRRRKALEPAGQQGPSRHSGAGTSRH

SEQ ID NO: 54319 - protein, 1251 aa, Homo sapiens
  Payload ID: 10732
  Gene Symbol: MYO3B
  Gene Name: myosin IIIB
  Uniprot ID: Q8WXR4
  ENSP ID: ENSP00000314650
MKHLYGLFHYNPMMLGLESLPDPTDTWEIIETIGKGTYGKVYKVTNKRDGSLAAVKILDPVSDMDEEIEAEYNILQFLPNHPNVVKFYGMFYKADHCVGGQLWLVLELCNGGSVTELVKGLLRCGQRLDEAMISYILYGALLGLQHLHNNRIIHRDVKGNNILLTTEGGVKLVDFGVSAQLTSTRLRRNTSVGTPFWMAPEVIACEQQYDSSYDARCDVWSLGITAIELGDGDPPLFDMHPVKTLFKIPRNPPPTLLHPEKWCEEFNHFISQCLIKDFERRPSVTHLLDHPFIKGVHGKVLFLQKQLAKVLQDQKHQNPVAKTRHERMHTRRPYHVEDAEKYCLEDDLVNLEVLDEDTIIHQLQKRYADLLIYTYVGDILIALNPFQNLSIYSPQFSRLYHGVKRASNPPHIFASADAAYQCMVTLSKDQCIVISGESGSGKTESAHLIVQHLTFLGKANNQTLREKILQVNSLVEAFGNSCTAINDNSSRFGKYLEMMFTPTGVVMGARISEYLLEKSRVIKQAAREKNFHIFYYIYAGLHHQKKLSDFRLPEEKPPRYIADETGRVMHDITSKESYRRQFEAIQHCFRIIGFTDKEVHSVYRILAGILNIGNIEFAAISSQHQTDKSEVPNAEALQNAASVLCISPEELQEALTSHCVVTRGETIIRANTVDRAADVRDAMSKALYGRLFSWIVNRINTLLQPDENICSAGGGMNVGILDIFGFENFQRNSFEQLCINIANEQIQYYFNQHVFALEQMEYQNEGIDAVPVEYEDNRPLLDMFLQKPLGLLALLDEESRFPQATDQTLVDKFEDNLRCKYFWRPKGVELCFGIQHYAGKVLYDASGVLEKNRDTLPADVVVVLRTSENKLLQQLFSIPLTKTGNLAQTRARITVASSSLPPHFSAGKAKVDTLEVIRHPEETTNMKRQTVASYFRYSLMDLLSKMVVGQPHFVRCIKPNDDREALQFSRERVLAQLRSTGILETVSIRRQGYSHRILFEEFVKRYYYLAFTAHQTPLASKESCVAILEKSRLDHWVLGKTKVFLKYYHVEQLNLLLREVIGRVVVLQAYTKGWLGARRYKRVREKREKGAIAIQSGDTSNQSSGPHSPVAAGTRGSAEVQDCSEPGDHKVLRGSVHRRSHSQAESNNGRTQTSSNSPAVTEKNGHSQAQSSPKGCDIFAGHANKHSVSGTDLLSSRICHPAPDQQGLSLWGAPQKPAFPHYGCNFYGFRKWSCTEASNTSPTMSAAQNAE

SEQ ID NO: 54320 - protein, 1341 aa, Homo sapiens
  Payload ID: 10732
  Gene Symbol: MYO3B
  Gene Name: myosin IIIB
  Uniprot ID: Q8WXR4
  ENSP ID: ENSP00000386213
MKHLYGLFHYNPMMLGLESLPDPTDTWEIIETIGKGTYGKVYKVTNKRDGSLAAVKILDPVSDMDEEIEAEYNILQFLPNHPNVVKFYGMFYKADHCVGGQLWLVLELCNGGSVTELVKGLLRCGQRLDEAMISYILYGALLGLQHLHNNRIIHRDVKGNNILLTTEGGVKLVDFGVSAQLTSTRLRRNTSVGTPFWMAPEVIACEQQYDSSYDARCDVWSLGITAIELGDGDPPLFDMHPVKTLFKIPRNPPPTLLHPEKWCEEFNHFISQCLIKDFERRPSVTHLLDHPFIKGVHGKVLFLQKQLAKVLQDQKHQNPVAKTRHERMHTRRPYHVEDAEKYCLEDDLVNLEVLDEDTIIHQLQKRYADLLIYTYVGDILIALNPFQNLSIYSPQFSRLYHGVKRASNPPHIFASADAAYQCMVTLSKDQCIVISGESGSGKTESAHLIVQHLTFLGKANNQTLREKILQVNSLVEAFGNSCTAINDNSSRFGKYLEMMFTPTGVVMGARISEYLLEKSRVIKQAAREKNFHIFYYIYAGLHHQKKLSDFRLPEEKPPRYIADETGRVMHDITSKESYRRQFEAIQHCFRIIGFTDKEVHSVYRILAGILNIGNIEFAAISSQHQTDKSEVPNAEALQNAASVLCISPEELQEALTSHCVVTRGETIIRANTVDRAADVRDAMSKALYGRLFSWIVNRINTLLQPDENICSAGGGMNVGILDIFGFENFQRNSFEQLCINIANEQIQYYFNQHVFALEQMEYQNEGIDAVPVEYEDNRPLLDMFLQKPLGLLALLDEESRFPQATDQTLVDKFEDNLRCKYFWRPKGVELCFGIQHYAGKVLYDASGVLEKNRDTLPADVVVVLRTSENKLLQQLFSIPLTKTGNLAQTRARITVASSSLPPHFSAGKAKVDTLEVIRHPEETTNMKRQTVASYFRYSLMDLLSKMVVGQPHFVRCIKPNDDREALQFSRERVLAQLRSTGILETVSIRRQGYSHRILFEEFVKRYYYLAFTAHQTPLASKESCVAILEKSRLDHWVLGKTKVFLKYYHVEQLNLLLREVIGRVVVLQAYTKGWLGARRYKRVREKREKGAIAIQSAWRGYDARRKFKKISNRRNESAAHNQAGDTSNQSSGPHSPVAAGTRGSAEVQDCSEPGDHKVLRGSVHRRSHSQAESNNGRTQTSSNSPAVTEKNGHSQAQSSPKGCDIFAGHANKHSVSGTDLLSSRICHPAPDQQGLSLWGAPQKPGSENGLAQKHRTPRRRCQQPKMLSSPEDTMYYNQLNGTLEYQGSKRKPRKLGQIKVLDGEDEYYKSLSPVDCIPEENNSAHPSFFSSSSKGDSFAQH

SEQ ID NO: 54321 - protein, 1314 aa, Homo sapiens
  Payload ID: 10732
  Gene Symbol: MYO3B
  Gene Name: myosin IIIB
  Uniprot ID: Q8WXR4
  ENSP ID: ENSP00000386497
MKHLYGLFHYNPMMLGLESLPDPTDTWEIIETIGKGTYGKVYKVTNKRDGSLAAVKILDPVSDMDEEIEAEYNILQFLPNHPNVVKFYGMFYKADHCVGGQLWLVLELCNGGSVTELVKGLLRCGQRLDEAMISYILYGALLGLQHLHNNRIIHRDVKGNNILLTTEGGVKLVDFGVSAQLTSTRLRRNTSVGTPFWMAPEVIACEQQYDSSYDARCDVWSLGITAIELGDGDPPLFDMHPVKTLFKIPRNPPPTLLHPEKWCEEFNHFISQCLIKDFERRPSVTHLLDHPFIKGVHGKVLFLQKQLAKVLQDQKHQNPVAKTRHERMHTRRPYHVEDAEKYCLEDDLVNLEVLDEDTIIHQLQKRYADLLIYTYVGDILIALNPFQNLSIYSPQFSRLYHGVKRASNPPHIFASADAAYQCMVTLSKDQCIVISGESGSGKTESAHLIVQHLTFLGKANNQTLREKILQVNSLVEAFGNSCTAINDNSSRFGKYLEMMFTPTGVVMGARISEYLLEKSRVIKQAAREKNFHIFYYIYAGLHHQKKLSDFRLPEEKPPRYIADETGRVMHDITSKESYRRQFEAIQHCFRIIGFTDKEVHSVYRILAGILNIGNIEFAAISSQHQTDKSEVPNAEALQNAASVLCISPEELQEALTSHCVVTRGETIIRANTVDRAADVRDAMSKALYGRLFSWIVNRINTLLQPDENICSAGGGMNVGILDIFGFENFQRNSFEQLCINIANEQIQYYFNQHVFALEQMEYQNEGIDAVPVEYEDNRPLLDMFLQKPLGLLALLDEESRFPQATDQTLVDKFEDNLRCKYFWRPKGVELCFGIQHYAGKVLYDASGVLEKNRDTLPADVVVVLRTSENKLLQQLFSIPLTKTGNLAQTRARITVASSSLPPHFSAGKAKVDTLEVIRHPEETTNMKRQTVASYFRYSLMDLLSKMVVGQPHFVRCIKPNDDREALQFSRERVLAQLRSTGILETVSIRRQGYSHRILFEEFVKRYYYLAFTAHQTPLASKESCVAILEKSRLDHWVLGKTKVFLKYYHVEQLNLLLREVIGRVVVLQAYTKGWLGARRYKRVREKREKGAIAIQSGDTSNQSSGPHSPVAAGTRGSAEVQDCSEPGDHKVLRGSVHRRSHSQAESNNGRTQTSSNSPAVTEKNGHSQAQSSPKGCDIFAGHANKHSVSGTDLLSSRICHPAPDQQGLSLWGAPQKPGSENGLAQKHRTPRRRCQQPKMLSSPEDTMYYNQLNGTLEYQGSKRKPRKLGQIKVLDGEDEYYKSLSPVDCIPEENNSAHPSFFSSSSKGDSFAQH

SEQ ID NO: 54322 - protein, 360 aa, Homo sapiens
  Payload ID: 10732
  Gene Symbol: MYO3B
  Gene Name: myosin IIIB
  ENSP ID: ENSP00000401160
  MOD_RES (1)..(1): Any amino acid
XKHLYGLFHYNPMMLGLESLPDPTDTWEIIETIGKGTYGKVYKVTNKRDGSLAAVKILDPVSDMDEEIEAEYNILQFLPNHPNVVKFYGMFYKADHCVGGQLWLVLELCNGGSVTELVKGLLRCGQRLDEAMISYILYGALLGLQHLHNNRIIHRDVKGNNILLTTEGGVKLVDFGVSAQLTSTRLRRNTSVGTPFWMAPEVIACEQQYDSSYDARCDVWSLGITAIELGDGDPPLFDMHPVKTLFKIPRNPPPTLLHPEKWCEEFNHFISQCLIKDFERRPSVTHLLDHPFIKGVHGKVLFLQKQLAKVLQDQKHQNPVAKTRHERMHTRRPYHVEDAEKYCLEDDLVNLEVLDEVLNI

SEQ ID NO: 54323 - protein, 1105 aa, Homo sapiens
  Payload ID: 10732
  Gene Symbol: MYO3B
  Gene Name: myosin IIIB
  ENSP ID: ENSP00000446237
MLQSALLSTRKHLYGLFHYNPMMLGLESLPDPTDTWEIIETIGKGTYGKVYKVTNKRDGSLAAVKILDPVSDMDEEIEAEYNILQFLPNHPNVVKFYGMFYKADHCVGGQLWLVLELCNGGSVTELVKGLLRCGQRLDEAMISYILYGALLGLQHLHNNRIIHRDVKGNNILLTTEGGVKLVDFGVSAQLTSTRLRRNTSVGTPFWMAPEVIACEQQYDSSYDARCDVWSLGITAIELGDGDPPLFDMHPVKTLFKIPRNPPPTLLHPEKWCEEFNHFISQCLIKDFERRPSVTHLLDHPFIKGVHGKVLFLQKQLAKVLQDQKHQNPVAKTRHERMHTRRPYHVEDAEKYCLEDDLVNLEVLDEDTIIHQLQKRYADLLIYTYVGDILIALNPFQNLSIYSPQFSRLYHGVKRASNPPHIFASADAAYQCMVTLSKDQCIVISGESGSGKTESAHLIVQHLTFLGKANNQTLREKILQVNSLVEAFGNSCTAINDNSSRFGKYLEMMFTPTGVVMGARISEYLLEKSRVIKQAAREKNFHIFYYIYAGLHHQKKLSDFRLPEEKPPRYIADETGRVMHDITSKESYRRQFEAIQHCFRIIGFTDKEVHSVYRILAGILNIGNIEFAAISSQHQTDKSEVPNAEALQNAASVLCISPEELQEALTSHCVVTRGETIIRANTVDRAADVRDAMSKALYGRLFSWIVNRINTLLQPDENICSAGGGMNVGILDIFGFENFQRNSFEQLCINIANEQIQYYFNQHVFALEQMEYQNEGIDAVPVEYEDNRPLLDMFLQKPLGLLALLDEESRFPQATDQTLVDKFEDNLRCKYFWRPKGVELCFGIQHYAGKVLYDASGVLEKNRDTLPADVVVVLRTSENKLLQQLFSIPLTKTGNLAQTRARITVASSSLPPHFSAGKAKVDTLEVIRHPEETTNMKRQTVASYFRYSLMDLLSKMVVGQPHFVRCIKPNDDREALQFSRERVLAQLRSTGILETVSIRRQGYSHRILFEEFVKRYYYLAFTAHQTPLASKESCVAILEKSRLDHWVLGKTKVFLKYYHVEQLNLLLREVIGRVVVLQAYTKGWLGARRYKRVREKREKGAIAIQS

SEQ ID NO: 54324 - protein, 2548 aa, Homo sapiens
  Payload ID: 10733
  Gene Symbol: MYO9A
  Gene Name: myosin IXA
  Uniprot ID: B2RTY4
  ENSP ID: ENSP00000348349
MNINDGGRRRFEDNEHTLRIYPGAISEGTIYCPIPARKNSTAAEVIESLINKLHLDKTKCYVLAEVKEFGGEEWILNPTDCPVQRMMLWPRMALENRLSGEDYRFLLREKNLDGSIHYGSLQSWLRVTEERRRMMERGFLPQPQQKDFDDLCSLPDLNEKTLLENLRNRFKHEKIYTYVGSILIVINPFKFLPIYNPKYVKMYDNHQLGKLEPHIYAVADVAYHAMLQRKKNQCIVISGESGSGKTQSTNFLIHHLTALSQKGFASGVEQIILGAGPVLEAFGNAKTAHNNNSSRFGKFIQVNYQETGTVLGAYVEKYLLEKSRLVYQEHNERNYHVFYYLLAGASEDERSAFHLKQPEEYHYLNQITKKPLRQSWDDYCYDSEPDCFTVEGEDLRHDFERLQLAMEMVGFLPKTRRQIFSLLSAILHLGNICYKKKTYRDDSIDICNPEVLPIVSELLEVKEEMLFEALVTRKTVTVGEKLILPYKLAEAVTVRNSMAKSLYSALFDWIVFRINHALLNSKDLEHNTKTLSIGVLDIFGFEDYENNSFEQFCINFANERLQHYFNQHIFKLEQEEYRTEGISWHNIDYIDNTCCINLISKKPTGLLHLLDEESNFPQATNQTLLDKFKHQHEDNSYIEFPAVMEPAFIIKHYAGKVKYGVKDFREKNTDHMRPDIVALLRSSKNAFISGMIGIDPVAVFRWAILRAFFRAMVAFREAGKRNIHRKTGHDDTAPCAILKSMDSFSFLQHPVHQRSLEILQRCKEEKYSITRKNPRTPLSDLQGMNALNEKNQHDTFDIAWNGRTGIRQSRLSSGTSLLDKDGIFANSTSSKLLERAHGILTRNKNFKSKPALPKHLLEVNSLKHLTRLTLQDRITKSLLHLHKKKKPPSISAQFQASLSKLMETLGQAEPYFVKCIRSNAEKLPLRFSDVLVLRQLRYTGMLETVRIRQSGYSSKYSFQDFVSHFHVLLPRNIIPSKFNIQDFFRKINLNPDNYQVGKTMVFLKEQERQHLQDLLHQEVLRRIILLQRWFRVLLCRQHFLHLRQASVIIQRFWRNYLNQKQVRDAAVQKDAFVMASAAALLQASWRAHLERQRYLELRAAAIVIQQKWRDYYRRRHMAAICIQARWKAYRESKRYQEQRKKIILLQSTCRGFRARQRFKALKEQRLRETKPEVGLVNIKGYGSLEIQGSDPSGWEDCSFDNRIKAIEECKSVIESNRISRESSVDCLKESPNKQQERAQSQSGVDLQEDVLVRERPRSLEDLHQKKVGRAKRESRRMRELEQAIFSLELLKVRSLGGISPSEDRRWSTELVPEGLQSPRGTPDSESSQGSLELLSYEESQKSKLESVISDEGDLQFPSPKISSSPKFDSRDNALSASNETSSAEHLKDGTMKEMVVCSSESITCKPQLKDSFISNSLPTFFYIPQQDPLKTNSQLDTSIQRNKLLENEDTAGEALTLDINRETRRYHCSGKDQIVPSLNTESSNPVLKKLEKLNTEKEERQKQLQQQNEKEMMEQIRQQTDILEKERKAFKTIEKPRIGECLVAPSSYQSKQRVERPSSLLSLNTSNKGELNVLGSLSLKDAALAQKDSSSAHLPPKDRPVTVFFERKGSPCQSSTVKELSKTDRMGTQLNVACKLSNNRISKREHFRPTQSYSHNSDDLSREGNARPIFFTPKDNMSIPLVSKEALNSKNPQLHKEDEPAWKPVKLAGPGQRETSQRFSSVDEQAKLHKTMSQGEITKLAVRQKASDSDIRPQRAKMRFWAKGKQGEKKTTRVKPTTQSEVSPLFAGTDVIPAHQFPDELAAYHPTPPLSPELPGSCRKEFKENKEPSPKAKRKRSVKISNVALDSMHWQNDSVQIIASVSDLKSMDEFLLKKVNDLDNEDSKKDTLVDVVFKKALKEFRQNIFSFYSSALAMDDGKSIRYKDLYALFEQILEKTMRLEQRDSLGESPVRVWVNTFKVFLDEYMNEFKTSDCTATKVPKTERKKRRKKETDLVEEHNGHIFKATQYSIPTYCEYCSSLIWIMDRASVCKLCKYACHKKCCLKTTAKCSKKYDPELSSRQFGVELSRLTSEDRTVPLVVEKLINYIEMHGLYTEGIYRKSGSTNKIKELRQGLDTDAESVNLDDYNIHVIASVFKQWLRDLPNPLMTFELYEEFLRAMGLQERKETIRGVYSVIDQLSRTHLNTLERLIFHLVRIALQEDTNRMSANALAIVFAPCILRCPDTTDPLQSVQDISKTTTCVELIVVEQMNKYKARLKDISSLEFAENKAKTRLSLIRRSMGKGRIRRGNYPGPSSPVVVRLPSVSDVSEETLTSEAAMETDITEQQQAAMQQEERVLTEQIENLQKEKEELTFEMLVLEPRASDDETLESEASIGTADSSENLNMESEYAISEKSERSLALSSLKTAGKSEPSSKLRKQLKKQQDSLDVVDSSVSSLCLSNTASSHGTRKLFQIYSKSPFYRAASGNEALGMEGPLGQTKFLEDKPQFISRGTFNPEKGKQKLKNVKNSPQKTKETPEGTVMSGRRKTVDPDCTSNQQLALFGNNEFMV

SEQ ID NO: 54325 - protein, 2548 aa, Homo sapiens; identical to SEQ ID NO: 54324
  Payload ID: 10733
  Gene Symbol: MYO9A
  Gene Name: myosin IXA
  Uniprot ID: B2RTY4
  ENSP ID: ENSP00000398250

SEQ ID NO: 54326 - protein, 729 aa, Homo sapiens
  Payload ID: 10733
  Gene Symbol: MYO9A
  Gene Name: myosin IXA
  Uniprot ID: B2RTY4
  ENSP ID: ENSP00000399162
MNINDGGRRRFEDNEHTLRIYPGAISEGTIYCPIPARKNSTAAEVIESLINKLHLDKTKCYVLAEVKEFGGEEWILNPTDCPVQRMMLWPRMALENRLSGEDYRFLLREKNLDGSIHYGSLQSWLRVTEERRRMMERGFLPQPQQKDFDDLCSLPDLNEKTLLENLRNRFKHEKIYTYVGSILIVINPFKFLPIYNPKYVKMYDNHQLGKLEPHIYAVADVAYHAMLQRKKNQCIVISGESGSGKTQSTNFLIHHLTALSQKGFASGVEQIILGAGPVLEAFGNAKTAHNNNSSRFGKFIQVNYQETGTVLGAYVEKYLLEKSRLVYQEHNERNYHVFYYLLAGASEDERSAFHLKQPEEYHYLNQITKKPLRQSWDDYCYDSEPDCFTVEGEDLRHDFERLQLAMEMVGFLPKTRRQIFSLLSAILHLGNICYKKKTYRDDSIDICNPEVLPIVSELLEVKEEMLFEALVTRKTVTVGEKLILPYKLAEAVTVRNSMAKSLYSALFDWIVFRINHALLNSKDLEHNTKTLSIGVLDIFGFEDYENNSFEQFCINFANERLQHYFNQHIFKLEQEEYRTEGISWHNIDYIDNTCCINLISKKPTGLLHLLDEESNFPQATNQTLLDKFKHQHEDNSYIEFPAVMEPAFIIKHYAGKVKYGVKDFREKNTDHMRPDIVALLRSSKNAFISGMIGIDPVAVFRWAILRAFFRAMVAFREAGKRNIHRKTGK

SEQ ID NO: 54327 - protein, 1301 aa, Homo sapiens
  Payload ID: 10733
  Gene Symbol: MYO9A
  Gene Name: myosin IXA
  ENSP ID: ENSP00000454446
MEMVGFLPKTRRQIFSLLSAILHLGNICYKKKTYRDDSIDICNPEVLPIVSELLEVKEEMLFEALVTRKTVTVGEKLILPYKLAEAVTVRNSMAKSLYSALFDWIVFRINHALLNSKDLEHNTKTLSIGVLDIFGFEDYENNSFEQFCINFANERLQHYFNQHIFKLEQEEYRTEGISWHNIDYIDNTCCINLISKKPTGLLHLLDEESNFPQATNQTLLDKFKHQHEDNSYIEFPAVMEPAFIIKHYAGKVKYGVKDFREKNTDHMRPDIVALLRSSKNAFISGMIGIDPVAVFRWAILRAFFRAMVAFREAGKRNIHRKTGHDDTAPCAILKSMDSFSFLQHPVHQRSLEILQRCKEEKYSKATNPDKLLSHIHLEMETRSILHQGITRKNPRTPLSDLQGMNALNEKNQHDTFDIAWNGRTGIRQSRLSSGTSLLDKDGIFANSTSSKLLERAHGILTRNKNFKSKPALPKHLLEVNSLKHLTRLTLQDRITKSLLHLHKKKKPPSISAQFQASLSKLMETLGQAEPYFVKCIRSNAEKLPLRFSDVLVLRQLRYTGMLETVRIRQSGYSSKYSFQDFVSHFHVLLPRNIIPSKFNIQDFFRKINLNPDNYQVGKTMVFLKEQERQHLQDLLHQEVLRRIILLQRWFRVLLCRQHFLHLRQASVIIQRFWRNYLNQKQVRDAAVQKDAFVMASAAALLQASWRAHLERQRYLELRAAAIVIQQKWRDYYRRRHMAAICIQARWKAYRESKRYQEQRKKIILLQSTCRGFRARQRFKALKEQRLRETKPEVGLVNIKGYGSLEIQGSDPSGWEDCSFDNRIKAIEECKSVIESNRISRESSVDCLKESPNKQQERAQSQSGVDLQEDVLVRERPRSLEDLHQKKVGRAKRESRRMRELEQAIFSLELLKVRSLGGISPSEDRRWSTELVPEGLQSPRGTPDSESSQGSLELLSYEESQKSKLESVISDEGDLQFPSPKISSSPKFDSRDNALSASNETSSAEHLKDGTMKEMVVCSSESITCKPQLKDSFISNSLPTFFYIPQQDPLKTNSQLDTSIQRNKLLENEDTAGEALTLDINRETRRYHCSGKDQIVPSLNTESSNPVLKKLEKLNTEKEERQKQLQQQNEKEMMEQIRQQTDILEKERKAFKTIEKPRIGECLVAPSSYQSKQRVERPSSLLSLNTSNKGELNVLGSLSLKDAALAQKDSSSAHLPPKDRPVTVFFERKGSPCQSSTVKELSKTDRMGTQLNVACKLSNNRISKREHFRPTQSYSHNSDDLSREGNARPIFFTPKDNMSIPL

SEQ ID NO: 54328 - protein, 140 aa, Homo sapiens
  Payload ID: 10733
  Gene Symbol: MYO9A
  Gene Name: myosin IXA
  ENSP ID: ENSP00000454517
MNINDGGRRRFEDNEHTLRIYPGAISEGTIYCPIPARKNSTAAEVIESLINKLHLDKTKCYVLAEVKEFGGEEWILNPTDCPVQRMMLWPRMALENRLSGEDYRFLLREKNLDGSIHYGSLQSWLRVTEERRRMMERGFL

SEQ ID NO: 54329 - protein, 194 aa, Homo sapiens
  Payload ID: 10733
  Gene Symbol: MYO9A
  Gene Name: myosin IXA
  ENSP ID: ENSP00000455150
  MOD_RES (1)..(1): Any amino acid
XLPNPLMTFELYEEFLRAMGLQERKETIRGVYSVIDQLSRTHLNTLERLIFHLVSCVELIVVEQMNKYKARLKDISSLEFAENKAKTRLSLIRRSMGKGRIRRGNYPGPSSPVVVRLPSVSDVSEETLTSEAAMETDITEQQQAAMQQEERVLTEQIENLQKEKEELTFEMLVLEPRASDDETLESEASIGTAD

SEQ ID NO: 54330 - protein, 2396 aa, Homo sapiens
  Payload ID: 10733
  Gene Symbol: MYO9A
  Gene Name: myosin IXA
  ENSP ID: ENSP00000456192
MNINDGGRRRFEDNEHTLRIYPGAISEGTIYCPIPARKNSTAAEVIESLINKLHLDKTKCYVLAEVKEFGGEEWILNPTDCPVQRMMLWPRMALENRLSGEDYRFLLREKNLDGSIHYGSLQSWLRVTEERRRMMERGFLPQPQQKDFDDLCSLPDLNEKTLLENLRNRFKHEKIYTYVGSILIVINPFKFLPIYNPKYVKMYDNHQLGKLEPHIYAVADVAYHAMLQRKKNQCIVISGESGSGKTQSTNFLIHHLTALSQKGFASGVEQIILGAGPVLEAFGNAKTAHNNNSSRFGKFIQVNYQETGTVLGAYVEKYLLEKSRLVYQEHNERNYHVFYYLLAGASEDERSAFHLKQPEEYHYLNQITKKPLRQSWDDYCYDSEPDCFTVEGEDLRHDFERLQLAMEMVGFLPKTRRQIFSLLSAILHLGNICYKKKTYRDDSIDICNPEVLPIVSELLEVKEEMLFEALVTRKTVTVGEKLILPYKLAEAVTVRNSMAKSLYSALFDWIVFRINHALLNSKDLEHNTKTLSIGVLDIFGFEDYENNSFEQFCINFANERLQHYFNQHIFKLEQEEYRTEGISWHNIDYIDNTCCINLISKKPTGLLHLLDEESNFPQATNQTLLDKFKHQHEDNSYIEFPAVMEPAFIIKHYAGKVKYGVKDFREKNTDHMRPDIVALLRSSKNAFISGMIGIDPVAVFRWAILRAFFRAMVAFREAGKRNIHRKTGHDDTAPCAILKSMDSFSFLQHPVHQRSLEILQRCKEEKYSITRKNPRTPLSDLQGMNALNEKNQHDTFDIAWNGRTGIRQSRLSSGTSLLDKDGIFANSTSSKLLERAHGILTRNKNFKSKPALPKHLLEVNSLKHLTRLTLQDRITKSLLHLHKKKKPPSISAQFQASLSKLMETLGQAEPYFVKCIRSNAEKLPLRFSDVLVLRQLRYTGMLETVRIRQSGYSSKYSFQDFVSHFHVLLPRNIIPSKFNIQDFFRKINLNPDNYQVGKTMVFLKEQERQHLQDLLHQEVLRRIILLQRWFRVLLCRQHFLHLRQASVIIQRFWRNYLNQKQVRDAAVQKDAFVMASAAALLQASWRAHLERQRYLELRAAAIVIQQKWRDYYRRRHMAAICIQARWKAYRESKRYQEQRKKIILLQSTCRGFRARQRFKALKEQRLRETKPEVGLVNIKGYGSLEIQGSDPSGWEDCSFDNRIKAIEECKSVIESNRISRESSVDCLKESPNKQQERAQSQSGVDLQEDVLVRERPRSLEDLHQKKVGRAKRESRRMRELEQAIFSLELLKVRSLGGISPSEDRRWSTELVPEGLQSPRGTPDSESSQGSLELLSYEESQKSKLESVISDEGDLQFPSPKISSSPKFDSRDNALSASNETSSAEHLKDGTMKEMVVCSSESITCKPQLKDSFISNSLPTFFYIPQQDPLKTNSQLDTSIQRNKLLENEDTAGEALTLDINRETRRYHCSGKDQIVPSLNTESSNPVLKKLEKLNTEKEERQKQLQQQNEKEMMEQIRQQTDILEKERKAFKTIEKPRIGECLVAPSSYQSKQRVERPSSLLSLNTSNKGELNVLGSLSLKDAALAQKDSSSAHLPPKDRPVTVFFERKGSPCQSSTVKELSKTDRMGTQLNVACKLSNNRISKREHFRPTQSYSHNSDDLSREGNARPIFFTPKDNMSIPLVSKEALNSKNPQLHKEDEPAWKPVKLAGPGQRETSQRFSSVDEQAKLHKTMSQGEITKLAVRQKASDSDIRPQRAKMRFWAKGKQGEKKTTRVKPTTQSEVSPLFAGTDVIPAHQFPDELAAYHPTPPLSPELPGSCRKEFKENKEPSPKAKRKRSVKISNVALDSMHWQNDSVQIIASVSDLKSMDEFLLKKVNDLDNEDSKKDTLVDVVFKKALKEFRQNIFSFYSSALAMDDGKSIRYKDLYALFEQILEKTMRLEQRDSLGESPVRVWVNTFKVFLDEYMNEFKTSDCTATKVPKTERKKRRKKETDLVEEHNGHIFKATQYSIPTYCEYCSSLIWIMDRASVCKLCKYACHKKCCLKTTAKCSKKYDPELSSRQFGVELSRLTSEDRTVPLVVEKLINYIEMHGLYTEGIYRKSGSTNKIKELRQGLDTDAESVNLDDYNIHVIASVFKQWLRDLPNPLMTFELYEEFLRAMGLQERKETIRGVYSVIDQLSRTHLNTLERLIFHLVRIALQEDTNRMSANALAIVFAPCILRCPDTTDPLQSVQDISKTTTCVELIVVEQMNKYKARLKDISSLEFAENKAKTRLSLIRRSMGKGRIRRGNYPGPSSPVVVRLPSVSDVSEETLTSEAAMETDITEQQQAAMQQEERVLTEQIENLQKEKEELTFEMLVLEPRASDDETLESEASIGTADSSENLNMESEYAISEKSEA

SEQ ID NO: 54331 - protein, 73 aa, Homo sapiens
  Payload ID: 10733
  Gene Symbol: MYO9A
  Gene Name: myosin IXA
  ENSP ID: ENSP00000456882
MNINDGGRRRFEDNEHTLRIYPGAISEGTIYCPIPARKNSTAAEVIESLINKLHLDKTKCYVLAEVKEFGGEE

SEQ ID NO: 54332 - protein, 90 aa, Homo sapiens
  Payload ID: 10733
  Gene Symbol: MYO9A
  Gene Name: myosin IXA
  ENSP ID: ENSP00000457235
  MOD_RES (1)..(1): Any amino acid
XYNPKYVKMYDNHQLGKLEPHIYAVADVAYHAMLQRKKNQCIVISGESGSGKTQSTNFLIHHLTALSQKGFASGVEQIILGAGPVLECLC

SEQ ID NO: 54333 - protein, 463 aa, Homo sapiens
  Payload ID: 10733
  Gene Symbol: MYO9A
  Gene Name: myosin IXA
  ENSP ID: ENSP00000457407
  MOD_RES (1)..(1): Any amino acid
XKIKELRQGLDTDAESVNLDDYNIHVIASVFKQWLRDLPNPLMTFELYEEFLRAMGLQERKETIRGVYSVIDQLSRTHLNTLERLIFHLVRIALQEDTNRMSANALAIVFAPCILRCPDTTDPLQSVQDISKTTTCVELIVVEQMNKYKARLKDISSLEFAENKAKTRLSLIRRSMKPVLIAVRFMNITRNSVSGKGRIRRGNYPGPSSPVVVRLPSVSDVSEETLTSEAAMETDITEQQQAAMQQEERVLTEQIENLQKEKEELTFEMLVLEPRASDDETLESEASIGTADSSENLNMESEYAISEKSERSLALSSLKTAGKSEPSSKLRKQLKKQQDSLDVVDSSVSSLCLSNTASSHGTRKLFQIYSKSPFYRAASGNEALGMEGPLGQTKFLEDKPQFISRGTFNPEKGKQKLKNVKNSPQKTKETPEGTVMSGRRKTVDPDCTSNQQLALFGNNEFMV

SEQ ID NO: 54334 - protein, 1398 aa, Homo sapiens
  Payload ID: 10733
  Gene Symbol: MYO9A
  Gene Name: myosin IXA
  ENSP ID: ENSP00000457945
  MOD_RES (1)..(1): Any amino acid
XSVDCLKESPNKQQERAQSQSGVDLQEDVLVRERPRSLEDLHQKKVGRAKRESRRMRELEQAIFSLELLKVRSLGGISPSEDRRWSTELVPEGLQSPRGTPDSESSQGSLELLSYEESQKSKLESVISDEGDLQFPSPKISSSPKFDSRDNALSASNETSSAEHLKDGTMKEMVVCSSESITCKPQLKDSFISNSLPTFFYIPQQDPLKTNSQLDTSIQRNKLLENEDTAGEALTLDINRETRRYHCSGKDQIVPSLNTESSNPVLKKLEKLNTEKEERQKQLQQQNEKEMMEQIRQQTDILEKERKAFKTIEKPRIGECLVAPSSYQSKQRVERPSSLLSLNTSNKGELNVLGSLSLKDAALAQKDSSSAHLPPKDRPVTVFFERKGSPCQSSTVKELSKTDRMGTQLNVACKLSNNRISKREHFRPTQSYSHNSDDLSREGNARPIFFTPKDNMSIPLVSKEALNSKNPQLHKEDEPAWKPVKLAGPGQREVARPAHKKKARMARTRSDFLTRGTFADGEGDTEEDDYDDIIEPLLSLDQASHCELGPAPSLGQASHSDSEMTSQRFSSVDEQAKLHKTMSQGEITKLAVRQKASDSDIRPQRAKMRFWAKGKQGEKKTTRVKPTTQSEVSPLFAGTDVIPAHQFPDELAAYHPTPPLSPELPGSCRKEFKENKEPSPKAKRKRSVKISNVALDSMHWQNDSVQIIASVSDLKSMDEFLLKKVNDLDNEDSKKDTLVDVVFKKALKEFRQNIFSFYSSALAMDDGKSIRYKDLYALFEQILEKTMRLEQRDSLGESPVRVWVNTFKVFLDEYMNEFKTSDCTATKVPKTERKKRRKKETDLVEEHNGHIFKATQYSIPTYCEYCSSLIWIMDRASVCKLCKYACHKKCCLKTTAKCSKKYDPELSSRQFGVELSRLTSEDRTVPLVVEKLINYIEMHGLYTEGIYRKSGSTNKIKELRQGLDTDAESVNLDDYNIHVIASVFKQWLRDLPNPLMTFELYEEFLRAMGLQERKETIRGVYSVIDQLSRTHLNTLERLIFHLVRIALQEDTNRMSANALAIVFAPCILRCPDTTDPLQSVQDISKTTTCVELIVVEQMNKYKARLKDISSLEFAENKAKTRLSLIRRSMGKGRIRRGNYPGPSSPVVVRLPSVSDVSEETLTSEAAMETDITEQQQAAMQQEERVLTEQIENLQKEKEELTFEMLVLEPRASDDETLESEASIGTADSSENLNMESEYAISEKSERSLALSSLKTAGKSEPSSKLRKQLKKQQDSLDVVDSSVSSLCLSNTASSHGTRKLFQIYSKSPFYRAASGNEALGMEGPLGQTKFLEDKPQFISRGTFNPEKGKQKLKNVKNSPQKTKETPEGTVMSGRRKTVDPDCTSNQQLALFGNNEFMV

SEQ ID NO: 54335 - protein, 2022 aa, Homo sapiens
  Payload ID: 10734
  Gene Symbol: MYO9B
  Gene Name: myosin IXB
  Uniprot ID: Q13459
  ENSP ID: ENSP00000380444
MSVKEAGSSGRREQAAYHLHIYPQLSTTESQASCRVTATKDSTTSDVIKDAIASLRLDGTKCYVLVEVKESGGEEWVLDANDSPVHRVLLWPRRAQDEHPQEDGYYFLLQERNADGTIKYVHMQLVAQATATRRLVERGLLPRQQADFDDLCNLPELTEGNLLKNLKHRFLQQKIYTYAGSILVAINPFKFLPIYNPKYVKMYENQQLGKLEPHVFALADVAYYTMLRKRVNQCIVISGESGSGKTQSTNFLIHCLTALSQKGYASGVERTILGAGPVLEAFGNAKTAHNNNSSRFGKFIQVSYLESGIVRGAVVEKYLLEKSRLVSQEKDERNYHVFYYLLLGVSEEERQEFQLKQPEDYFYLNQHNLKIEDGEDLKHDFERLKQAMEMVGFLPATKKQIFAVLSAILYLGNVTYKKRATGREEGLEVGPPEVLDTLSQLLKVKREILVEVLTKRKTVTVNDKLILPYSLSEAITARDSMAKSLYSALFDWIVLRINHALLNKKDVEEAVSCLSIGVLDIFGFEDFERNSFEQFCINYANEQLQYYFNQHIFKLEQEEYQGEGITWHNIGYTDNVGCIHLISKKPTGLFYLLDEESNFPHATSQTLLAKFKQQHEDNKYFLGTPVMEPAFIIQHFAGKVKYQIKDFREKNMDYMRPDIVALLRGSDSSYVRELIGMDPVAVFRWAVLRAAIRAMAVLREAGRLRAERAEKAAGMSSPGAQSHPEELPRGASTPSEKLYRDLHNQMIKSIKGLPWQGEDPRSLLQSLSRLQKPRAFILKSKGIKQKQIIPKNLLDSKSLKLIISMTLHDRTTKSLLHLHKKKKPPSISAQFQTSLNKLLEALGKAEPFFIRCIRSNAEKKELCFDDELVLQQLRYTGMLETVRIRRSGYSAKYTFQDFTEQFQVLLPKDAQPCREVISTLLEKMKIDKRNYQIGKTKVFLKETERQALQETLHREVVRKILLLQSWFRMVLERRHFLQMKRAAVTIQACWRSYRVRRALERTQAAVYLQASWRGYWQRKLYRHQKQSIIRLQSLCRGHLQRKSFSQMISEKQKAEEKEREALEAARAGAEEGGQGQAAGGQQVAEQGPEPAEDGGHLASEPEVQPSDRSPLEHSSPEKEAPSPEKTLPPQKTVAAESHEKVPSSREKRESRRQRGLEHVKFQNKHIQSCKEESALREPSRRVTQEQGVSLLEDKKESREDETLLVVETEAENTSQKQPTEQPQAMAVGKVSEETEKTLPSGSPRPGQLERPTSLALDSRVSPPAPGSAPETPEDKSKPCGSPRVQEKPDSPGGSTQIQRYLDAERLASAVELWRGKKLVAAASPSAMLSQSLDLSDRHRATGAALTPTEERRTSFSTSDVSKLLPSLAKAQPAAETTDGERSAKKPAVQKKKPGDASSLPDAGLSPGSQVDSKSTFKRLFLHKTKDKKYSLEGAEELENAVSGHVVLEATTMKKGLEAPSGQQHRHAAGEKRTKEPGGKGKKNRNVKIGKITVSEKWRESVFRQITNANELKYLDEFLLNKINDLRSQKTPIESLFIEATEKFRSNIKTMYSVPNGKIHVGYKDLMENYQIVVSNLATERGQKDTNLVLNLFQSLLDEFTRGYTKNDFEPVKQSKAQKKKRKQERAVQEHNGHVFASYQVSIPQSCEQCLSYIWLMDKALLCSVCKMTCHKKCVHKIQSHCSYTYGRKGEPGVEPGHFGVCVDSLTSDKASVPIVLEKLLEHVEMHGLYTEGLYRKSGAANRTRELRQALQTDPAAVKLENFPIHAITGVLKQWLRELPEPLMTFAQYGDFLRAVELPEKQEQLAAIYAVLEHLPEANHNSLERLIFHLVKVALLEDVNRMSPGALAIIFAPCLLRCPDNSDPLTSMKDVLKITTCVEMLIKEQMRKYKVKMEEISQLEAAESIAFRRLSLLRQNAPWPLKLGFSSPYEGVLNKSPKTRDIQEEELEVLLEEEAAGGDEDREKEILIERIQSIKEEKEDITYRLPELDPRGSDEENLDSETSASTESLLEERAGRGASEGQY

SEQ ID NO: 54336 - protein, 195 aa, Homo sapiens
  Payload ID: 10734
  Gene Symbol: MYO9B
  Gene Name: myosin IXB
  ENSP ID: ENSP00000469289
HLVKVALLEDVNRMSPGALAIIFAPCLLRCPDNSDPLTSMKDVLKITTCVEMLIKEQMRKYKVKMEEISQLEAAESIAFRRLSLLRQNAPWPLKLGFSSPYEGVLNKSPKTRDIQEEELEVLLEEEAAGGDEDREKEILIERIQSIKEEKQDITYRLPELDPRGSDEENLDSETSASTESLLEERAGRGASEGQY

SEQ ID NO: 54337 - protein, 59 aa, Homo sapiens
  Payload ID: 10734
  Gene Symbol: MYO9B
  Gene Name: myosin IXB
  ENSP ID: ENSP00000469437
  MOD_RES (1)..(1): Any amino acid
XQERAVSRLHIDESPSRRTLAGACTCVSVSMCAWARLHAYVCVDTCPGAQRARVRQLPG

SEQ ID NO: 54338 - protein, 154 aa, Homo sapiens
  Payload ID: 10734
  Gene Symbol: MYO9B
  Gene Name: myosin IXB
  ENSP ID: ENSP00000470849
  MOD_RES (1)..(1): Any amino acid
XKQQHEDNKYFLGTPVMEPAFIIQHFAGKVKYQIKDFREKNMDYMRPDIVALLRGSDSSYVRELIGMDPVAVFRWAVLRAAIRAMAVLREAGRLRAERAEKAAGMSSPGAQSHPEELPRGASTPSEKLYRKSKGIKQKQIIPKNLLDSKSLKLI

SEQ ID NO: 54339 - protein, 2157 aa, Homo sapiens
  Payload ID: 10734
  Gene Symbol: MYO9B
  Gene Name: myosin IXB
  ENSP ID: ENSP00000471367
MSVKEAGSSGRREQAAYHLHIYPQLSTTESQASCRVTATKDSTTSDVIKDAIASLRLDGTKCYVLVEVKESGGEEWVLDANDSPVHRVLLWPRRAQDEHPQEDGYYFLLQERNADGTIKYVHMQLVAQATATRRLVERGLLPRQQADFDDLCNLPELTEGNLLKNLKHRFLQQKIYTYAGSILVAINPFKFLPIYNPKYVKMYENQQLGKLEPHVFALADVAYYTMLRKRVNQCIVISGESGSGKTQSTNFLIHCLTALSQKGYASGVERTILGAGPVLEAFGNAKTAHNNNSSRFGKFIQVSYLESGIVRGAVVEKYLLEKSRLVSQEKDERNYHVFYYLLLGVSEEERQEFQLKQPEDYFYLNQHNLKIEDGEDLKHDFERLKQAMEMVGFLPATKKQIFAVLSAILYLGNVTYKKRATGREEGLEVGPPEVLDTLSQLLKVKREILVEVLTKRKTVTVNDKLILPYSLSEAITARDSMAKSLYSALFDWIVLRINHALLNKKDVEEAVSCLSIGVLDIFGFEDFERNSFEQFCINYANEQLQYYFNQHIFKLEQEEYQGEGITWHNIGYTDNVGCIHLISKKPTGLFYLLDEESNFPHATSQTLLAKFKQQHEDNKYFLGTPVMEPAFIIQHFAGKVKYQIKDFREKNMDYMRPDIVALLRGSDSSYVRELIGMDPVAVFRWAVLRAAIRAMAVLREAGRLRAERAEKAAGMSSPGAQSHPEELPRGASTPSEKLYRDLHNQMIKSIKGLPWQGEDPRSLLQSLSRLQKPRAFILKSKGIKQKQIIPKNLLDSKSLKLIISMTLHDRTTKSLLHLHKKKKPPSISAQFQTSLNKLLEALGKAEPFFIRCIRSNAEKKELCFDDELVLQQLRYTGMLETVRIRRSGYSAKYTFQDFTEQFQVLLPKDAQPCREVISTLLEKMKIDKRNYQIGKTKVFLKETERQALQETLHREVVRKILLLQSWFRMVLERRHFLQMKRAAVTIQACWRSYRVRRALERTQAAVYLQASWRGYWQRKLYRHQKQSIIRLQSLCRGHLQRKSFSQMISEKQKAEEKEREALEAARAGAEEGGQGQAAGGQQVAEQGPEPAEDGGHLASEPEVQPSDRSPLEHSSPEKEAPSPEKTLPPQKTVAAESHEKVPSSREKRESRRQRGLEHVKFQNKHIQSCKEESALREPSRRVTQEQGVSLLEDKKESREDETLLVVETEAENTSQKQPTEQPQAMAVGKVSEETEKTLPSGSPRPGQLERPTSLALDSRVSPPAPGSAPETPEDKSKPCGSPRVQEKPDSPGGSTQIQRYLDAERLASAVELWRGKKLVAAASPSAMLSQSLDLSDRHRATGAALTPTEERRTSFSTSDVSKLLPSLAKAQPAAETTDGERSAKKPAVQKKKPGDASSLPDAGLSPGSQVDSKSTFKRLFLHKTKDKKYSLEGAEELENAVSGHVVLEATTMKKGLEAPSGQQHRHAAGEKRTKEPGGKGKKNRNVKIGKITVSEKWRESVFRQITNANELKYLDEFLLNKINDLRSQKTPIESLFIEATEKFRSNIKTMYSVPNGKIHVGYKDLMENYQIVVSNLATERGQKDTNLVLNLFQSLLDEFTRGYTKNDFEPVKQSKAQKKKRKQERAVQEHNGHVFASYQVSIPQSCEQCLSYIWLMDKALLCSVCKMTCHKKCVHKIQSHCSYTYGRKGEPGVEPGHFGVCVDSLTSDKASVPIVLEKLLEHVEMHGLYTEGLYRKSGAANRTRELRQALQTDPAAVKLENFPIHAITGVLKQWLRELPEPLMTFAQYGDFLRAVELPEKQEQLAAIYAVLEHLPEANHNSLERLIFHLVKVALLEDVNRMSPGALAIIFAPCLLRCPDNSDPLTSMKDVLKITTCVEMLIKEQMRKYKVKMEEISQLEAAESIAFRRLSLLRQNAPWPLKLGFSSPYEGVLNKSPKTRDIQEEELEVLLEEEAAGGDEDREKEILIERIQSIKEEKQDITYRLPELDPRGSDEENLDSETSASTESLLEERAGRGASEGPPAPALPCPGAPTPSPLPTVAAPPRRRPSSFVTVRVKTPRRTPIMPTANIKLPPGLPSHLPRWAPGAREAAAPVRRREPPARRPDQIHSVYITPGADLPVQGALEPLEEDGQPPGAKRRYSDPPTYCLPPASGQTNG

SEQ ID NO: 54340 - protein, 2022 aa, Homo sapiens; identical to SEQ ID NO: 54335
  Payload ID: 10734
  Gene Symbol: MYO9B
  Gene Name: myosin IXB
  Uniprot ID: Q13459
  ENSP ID: ENSP00000471457

SEQ ID NO: 54341 - protein, 174 aa, Homo sapiens
  Payload ID: 10734
  Gene Symbol: MYO9B
  Gene Name: myosin IXB
  ENSP ID: ENSP00000472296
TSMKDVLKITTCVEMLIKEQMRKYKVKMEEISQLEAAESIAFRRLSLLRQNAPWPLKLGFSSPYEGVLNKSPKTRDIQEEELEVLLEEEAAGGDEDREKEILIERIQSIKEEKQDITYRLPELDPRGSDEENLDSETSASTESLLEERAGRGASEGHQAHWCNQGADDLRCGKT

SEQ ID NO: 54342 - protein, 174 aa, Homo sapiens
  Payload ID: 10734
  Gene Symbol: MYO9B
  Gene Name: myosin IXB
  ENSP ID: ENSP00000472611
AGRLRAERAEKAAGMSSPGAQSHPEELPRGASTPSEKLYRCSMLDFSFDGSEEFDINAFEDIIAFYESKKKSKGIKQKQIIPKNLLDSKSLKLIISMTLHDRTTKSLLHLHKKKKPPSISAQFQTSLNKLLEALGKAEPFFIRCIRSNAEKKELCFDDELVLQQLRYTGMLETV

SEQ ID NO: 54343 - protein, 2071 aa, Homo sapiens
  Payload ID: 10734
  Gene Symbol: MYO9B
  Gene Name: myosin IXB
  ENSP ID: ENSP00000472915
MSVKEAGSSGRREQAAYHLHIYPQLSTTESQASCRVTATKDSTTSDVIKDAIASLRLDGTKCYVLVEVKESGGEEWVLDANDSPVHRVLLWPRRAQDEHPQEDGYYFLLQERNADGTIKYVHMQLVAQATATRRLVERGLLPRQQADFDDLCNLPELTEGNLLKNLKHRFLQQKIYTYAGSILVAINPFKFLPIYNPKYVKMYENQQLGKLEPHVFALADVAYYTMLRKRVNQCIVISGESGSGKTQSTNFLIHCLTALSQKGYASGVERTILGAGPVLEAFGNAKTAHNNNSSRFGKFIQVSYLESGIVRGAVVEKYLLEKSRLVSQEKDERNYHVFYYLLLGVSEEERQEFQLKQPEDYFYLNQHNLKIEDGEDLKHDFERLKQAMEMVGFLPATKKQIFAVLSAILYLGNVTYKKRATGREEGLEVGPPEVLDTLSQLLKVKREILVEVLTKRKTVTVNDKLILPYSLSEAITARDSMAKSLYSALFDWIVLRINHALLNKKDVEEAVSCLSIGVLDIFGFEDFERNSFEQFCINYANEQLQYYFNQHIFKLEQEEYQGEGITWHNIGYTDNVGCIHLISKKPTGLFYLLDEESNFPHATSQTLLAKFKQQHEDNKYFLGTPVMEPAFIIQHFAGKVKYQIKDFREKNMDYMRPDIVALLRGSDSSYVRELIGMDPVAVFRWAVLRAAIRAMAVLREAGRLRAERAEKAAGMSSPGAQSHPEELPRGASTPSEKLYRDLHNQMIKSIKGLPWQGEDPRSLLQSLSRLQKPRAFILKSKGIKQKQIIPKNLLDSKSLKLIISMTLHDRTTKSLLHLHKKKKPPSISAQFQTSLNKLLEALGKAEPFFIRCIRSNAEKKELCFDDELVLQQLRYTGMLETVRIRRSGYSAKYTFQDFTEQFQVLLPKDAQPCREVISTLLEKMKIDKRNYQIGKTKVFLKETERQALQETLHREVVRKILLLQSWFRMVLERRHFLQMKRAAVTIQACWRSYRVRRALERTQAAVYLQASWRGYWQRKLYRHQKQSIIRLQSLCRGHLQRKSFSQMISEKQKAEEKEREALEAARAGAEEGGQGQAAGGQQVAEQGPEPAEDGGHLASEPEVQPSDRSPLEHSSPEKEAPSPEKTLPPQKTVAAESHEKVPSSREKRESRRQRGLEHVKFQNKHIQSCKEESALREPSRRVTQEQGVSLLEDKKESREDETLLVVETEAENTSQKQPTEQPQAMAVGKVSEETEKTLPSGSPRPGQLERPTSLALDSRVSPPAPGSAPETPEDKSKPCGSPRVQEKPDSPGGSTQIQRYLDAERLASAVELWRGKKLVAAASPSAMLSQSLDLSDRHRATGAALTPTEERRTSFSTSDVSKLLPSLAKAQPAAETTDGERSAKKPAVQKKKPGDASSLPDAGLSPGSQVDSKSTFKRLFLHKTKDKKYSLEGAEELENAVSGHVVLEATTMKKGLEAPSGQQHRHAAGEKRTKEPGGKGKKNRNVKIGKITVSEKWRESVFRQITNANELKYLDEFLLNKINDLRSQKTPIESLFIEATEKFRSNIKTMYSVPNGKIHVGYKDLMENYQIVVSNLATERGQKDTNLVLNLFQSLLDEFTRGYTKNDFEPVKQSKAQKKKRKQERAVQEHNGHVFASYQVSIPQSCEQCLSYIWLMDKALLCSVCKMTCHKKCVHKIQSHCSYTYGRKGEPGVEPGHFGVCVDSLTSDKASVPIVLEKLLEHVEMHGLYTEGLYRKSGAANRTRELRQALQTDPAAVKLENFPIHAITGVLKQWLRELPEPLMTFAQYGDFLRAVELPEKQEQLAAIYAVLEHLPEANHNSLERLIFHLVKVALLEDVNRMSPGALAIIFAPCLLRCPDNSDPLTSMKDVLKITTCVEMLIKEQMRKYKVKMEEISQLEAAESIAFRRLSLLRQNANKSPKTRDIQEEELEVLLEEEAAGGDEDREKEILIERIQSIKEEKEDITYRLPELDPRGSDEENLDSETSASTESLLEERAGRGASEGPPAPALPCPGAPTPSPLPTVAAPPRRRPSSFVTVRVKTPRRTPIMPTANIKLPPGLPSHLPRWAPGA

SEQ ID NO: 54344 - protein, 195 aa, Homo sapiens
  Payload ID: 10734
  Gene Symbol: MYO9B
  Gene Name: myosin IXB
  ENSP ID: ENSP00000472964
  MOD_RES (1)..(1): Any amino acid
XKQEQLAAIYAVLEHLPEANHNSLERLIFHLVKVALLEDVNRMSPGALAIIFAPCLLRCPDNSDPLTSMKDVLKITTCVEMLIKEQMRKYKVKMEEISQLEAAESIAFRRLSLLRQNANKSPKTRDIQEEELEVLLEEEAAGGDEDREKEILIERIQSIKEEKQDITYRLPELDPRGSDEENLDSETSASTESLL

SEQ ID NO: 54345 - protein, 1845 aa, Homo sapiens
  Payload ID: 10735
  Gene Symbol: MYLK
  Gene Name: myosin light chain kinase
  Uniprot ID: Q15746
  ENSP ID: ENSP00000320622
MGDVKLVASSHISKTSLSVDPSRVDSMPLTEAPAFILPPRNLCIKEGATAKFEGRVRGYPEPQVTWHRNGQPITSGGRFLLDCGIRGTFSLVIHAVHEEDRGKYTCEATNGSGARQVTVELTVEGSFAKQLGQPVVSKTLGDRFSAPAVETRPSIWGECPPKFATKLGRVVVKEGQMGRFSCKITGRPQPQVTWLKGNVPLQPSARVSVSEKNGMQVLEIHGVNQDDVGVYTCLVVNGSGKASMSAELSIQGLDSANRSFVRETKATNSDVRKEVTNVISKESKLDSLEAAAKSKNCSSPQRGGSPPWAANSQPQPPRESKLESCKDSPRTAPQTPVLQKTSSSITLQAARVQPEPRAPGLGVLSPSGEERKRPAPPRPATFPTRQPGLGSQDVVSKAANRRIPMEGQRDSAFPKFESKPQSQEVKENQTVKFRCEGLAVMEVAPSFSSVLKDCAVIEGQDFVLQCSVRGTPVPRITWLLNGQPIQYARSTCEAGVAELHIQDALPEDHGTYTCLAENALGQVSCSAWVTVHEKKSSRKSEYLLPVAPSKPTAPIFLQGLSDLKVMDGSQVTMTVQVSGNPPPEVIWLHNGNEIQESEDFHFEQRGTQHSLCIQEVFPEDTGTYTCEAWNSAGEVRTQAVLTVQEPHDGTQPWFISKPRSVTASLGQSVLISCAIAGDPFPTVHWLRDGKALCKDTGHFEVLQNEDVFTLVLKKVQPWHAGQYEILLKNRVGECSCQVSLMLQNSSARALPRGREPASCEDLCGGGVGADGGGSDRYGSLRPGWPARGQGWLEEEDGEDVRGVLKRRVETRQHTEEAIRQQEVEQLDFRDLLGKKVSTKTLSEDDLKEIPAEQMDFRANLQRQVKPKTVSEEERKVHSPQQVDFRSVLAKKGTSKTPVPEKVPPPKPATPDFRSVLGGKKKLPAENGSSSAETLNAKAVESSKPLSNAQPSGPLKPVGNAKPAETLKPMGNAKPAETLKPMGNAKPDENLKSASKEELKKDVKNDVNCKRGHAGTTDNEKRSESQGTAPAFKQKLQDVHVAEGKKLLLQCQVSSDPPATIIWTLNGKTLKTTKFIILSQEGSLCSVSIEKALPEDRGLYKCVAKNDAGQAECSCQVTVDDAPASENTKAPEMKSRRPKSSLPPVLGTESDATVKKKPAPKTPPKAAMPPQIIQFPEDQKVRAGESVELFGKVTGTQPITCTWMKFRKQIQESEHMKVENSENGSKLTILAARQEHCGCYTLLVENKLGSRQAQVNLTVVDKPDPPAGTPCASDIRSSSLTLSWYGSSYDGGSAVQSYSIEIWDSANKTWKELATCRSTSFNVQDLLPDHEYKFRVRAINVYGTSEPSQESELTTVGEKPEEPKDEVEVSDDDEKEPEVDYRTVTINTEQKVSDFYDIEERLGSGKFGQVFRLVEKKTRKVWAGKFFKAYSAKEKENIRQEISIMNCLHHPKLVQCVDAFEEKANIVMVLEIVSGGELFERIIDEDFELTERECIKYMRQISEGVEYIHKQGIVHLDLKPENIMCVNKTGTRIKLIDFGLARRLENAGSLKVLFGTPEFVAPEVINYEPIGYATDMWSIGVICYILVSGLSPFMGDNDNETLANVTSATWDFDDEAFDEISDDAKDFISNLLKKDMKNRLDCTQCLQHPWLMKDTKNMEAKKLSKDRMKKYMARRKWQKTGNAVRAIGRLSSMAMISGLSGRKSSTGSPTSPLNAEKLESEEDVSQAFLEAVAEEKPHVKPYFSKTIRDLEVVEGSAARFDCKIEGYPDPEVVWFKDDQSIRESRHFQIDYDEDGNCSLIISDVCGDDDAKYTCKAVNSLGEATCTAELIVETMEEGEGEGEEEEE

SEQ ID NO: 54346 - protein, 1845 aa, Homo sapiens; identical to SEQ ID NO: 54345
  Payload ID: 10735
  Gene Symbol: MYLK
  Gene Name: myosin light chain kinase
  Uniprot ID: Q15746
  ENSP ID: ENSP00000346846

SEQ ID NO: 54347 - protein, 1863 aa, Homo sapiens
  Payload ID: 10735
  Gene Symbol: MYLK
  Gene Name: myosin light chain kinase
  Uniprot ID: Q15746
  ENSP ID: ENSP00000352088
MGDVKLVASSHISKTSLSVDPSRVDSMPLTEAPAFILPPRNLCIKEGATAKFEGRVRGYPEPQVTWHRNGQPITSGGRFLLDCGIRGTFSLVIHAVHEEDRGKYTCEATNGSGARQVTVELTVEGSFAKQLGQPVVSKTLGDRFSAPAVETRPSIWGECPPKFATKLGRVVVKEGQMGRFSCKITGRPQPQVTWLKGNVPLQPSARVSVSEKNGMQVLEIHGVNQDDVGVYTCLVVNGSGKASMSAELSIQGLDSANRSFVRETKATNSDVRKEVTNVISKESKLDSLEAAAKSKNCSSPQRGGSPPWAANSQPQPPRESKLESCKDSPRTAPQTPVLQKTSSSITLQAARVQPEPRAPGLGVLSPSGEERKRPAPPRPATFPTRQPGLGSQDVVSKAANRRIPMEGQRDSAFPKFESKPQSQEVKENQTVKFRCEVSGIPKPEVAWFLEGTPVRRQEGSIEVYEDAGSHYLCLLKARTRDSGTYSCTASNAQGQLSCSWTLQVERLAVMEVAPSFSSVLKDCAVIEGQDFVLQCSVRGTPVPRITWLLNGQPIQYARSTCEAGVAELHIQDALPEDHGTYTCLAENALGQVSCSAWVTVHEKKSSRKSEYLLPVAPSKPTAPIFLQGLSDLKVMDGSQVTMTVQVSGNPPPEVIWLHNGNEIQESEDFHFEQRGTQHSLCIQEVFPEDTGTYTCEAWNSAGEVRTQAVLTVQEPHDGTQPWFISKPRSVTASLGQSVLISCAIAGDPFPTVHWLRDGKALCKDTGHFEVLQNEDVFTLVLKKVQPWHAGQYEILLKNRVGECSCQVSLMLQNSSARALPRGREPASCEDLCGGGVGADGGGSDRYGSLRPGWPARGQGWLEEEDGEDVRGVLKRRVETRQHTEEAIRQQEVEQLDFRDLLGKKVSTKTLSEDDLKEIPAEQMDFRANLQRQVKPKTVSEEERKVHSPQQVDFRSVLAKKGTSKTPVPEKVPPPKPATPDFRSVLGGKKKLPAENGSSSAETLNAKAVESSKPLSNAQPSGPLKPVGNAKPAETLKPMGNAKPAETLKPMGNAKPDENLKSASKEELKKDVKNDVNCKRGHAGTTDNEKRSESQGTAPAFKQKLQDVHVAEGKKLLLQCQVSSDPPATIIWTLNGKTLKTTKFIILSQEGSLCSVSIEKALPEDRGLYKCVAKNDAGQAECSCQVTVDDAPASENTKAPEMKSRRPKSSLPPVLGTESDATVKKKPAPKTPPKAAMPPQIIQFPEDQKVRAGESVELFGKVTGTQPITCTWMKFRKQIQESEHMKVENSENGSKLTILAARQEHCGCYTLLVENKLGSRQAQVNLTVVDKPDPPAGTPCASDIRSSSLTLSWYGSSYDGGSAVQSYSIEIWDSANKTWKELATCRSTSFNVQDLLPDHEYKFRVRAINVYGTSEPSQESELTTVGEKPEEPKDEVEVSDDDEKEPEVDYRTVTINTEQKVSDFYDIEERLGSGKFGQVFRLVEKKTRKVWAGKFFKAYSAKEKENIRQEISIMNCLHHPKLVQCVDAFEEKANIVMVLEIVSGGELFERIIDEDFELTERECIKYMRQISEGVEYIHKQGIVHLDLKPENIMCVNKTGTRIKLIDFGLARRLENAGSLKVLFGTPEFVAPEVINYEPIGYATDMWSIGVICYILNRLDCTQCLQHPWLMKDTKNMEAKKLSKDRMKKYMARRKWQKTGNAVRAIGRLSSMAMISGLSGRKSSTGSPTSPLNAEKLESEEDVSQAFLEAVAEEKPHVKPYFSKTIRDLEVVEGSAARFDCKIEGYPDPEVVWFKDDQSIRESRHFQIDYDEDGNCSLIISDVCGDDDAKYTCKAVNSLGEATCTAELIVETMEEGEGEGEEEEE

SEQ ID NO: 54348 - protein, 1914 aa, Homo sapiens
  Payload ID: 10735
  Gene Symbol: MYLK
  Gene Name: myosin light chain kinase
  Uniprot ID: Q15746
  ENSP ID: ENSP00000353452
MGDVKLVASSHISKTSLSVDPSRVDSMPLTEAPAFILPPRNLCIKEGATAKFEGRVRGYPEPQVTWHRNGQPITSGGRFLLDCGIRGTFSLVIHAVHEEDRGKYTCEATNGSGARQVTVELTVEGSFAKQLGQPVVSKTLGDRFSAPAVETRPSIWGECPPKFATKLGRVVVKEGQMGRFSCKITGRPQPQVTWLKGNVPLQPSARVSVSEKNGMQVLEIHGVNQDDVGVYTCLVVNGSGKASMSAELSIQGLDSANRSFVRETKATNSDVRKEVTNVISKESKLDSLEAAAKSKNCSSPQRGGSPPWAANSQPQPPRESKLESCKDSPRTAPQTPVLQKTSSSITLQAARVQPEPRAPGLGVLSPSGEERKRPAPPRPATFPTRQPGLGSQDVVSKAANRRIPMEGQRDSAFPKFESKPQSQEVKENQTVKFRCEVSGIPKPEVAWFLEGTPVRRQEGSIEVYEDAGSHYLCLLKARTRDSGTYSCTASNAQGQLSCSWTLQVERLAVMEVAPSFSSVLKDCAVIEGQDFVLQCSVRGTPVPRITWLLNGQPIQYARSTCEAGVAELHIQDALPEDHGTYTCLAENALGQVSCSAWVTVHEKKSSRKSEYLLPVAPSKPTAPIFLQGLSDLKVMDGSQVTMTVQVSGNPPPEVIWLHNGNEIQESEDFHFEQRGTQHSLCIQEVFPEDTGTYTCEAWNSAGEVRTQAVLTVQEPHDGTQPWFISKPRSVTASLGQSVLISCAIAGDPFPTVHWLRDGKALCKDTGHFEVLQNEDVFTLVLKKVQPWHAGQYEILLKNRVGECSCQVSLMLQNSSARALPRGREPASCEDLCGGGVGADGGGSDRYGSLRPGWPARGQGWLEEEDGEDVRGVLKRRVETRQHTEEAIRQQEVEQLDFRDLLGKKVSTKTLSEDDLKEIPAEQMDFRANLQRQVKPKTVSEEERKVHSPQQVDFRSVLAKKGTSKTPVPEKVPPPKPATPDFRSVLGGKKKLPAENGSSSAETLNAKAVESSKPLSNAQPSGPLKPVGNAKPAETLKPMGNAKPAETLKPMGNAKPDENLKSASKEELKKDVKNDVNCKRGHAGTTDNEKRSESQGTAPAFKQKLQDVHVAEGKKLLLQCQVSSDPPATIIWTLNGKTLKTTKFIILSQEGSLCSVSIEKALPEDRGLYKCVAKNDAGQAECSCQVTVDDAPASENTKAPEMKSRRPKSSLPPVLGTESDATVKKKPAPKTPPKAAMPPQIIQFPEDQKVRAGESVELFGKVTGTQPITCTWMKFRKQIQESEHMKVENSENGSKLTILAARQEHCGCYTLLVENKLGSRQAQVNLTVVDKPDPPAGTPCASDIRSSSLTLSWYGSSYDGGSAVQSYSIEIWDSANKTWKELATCRSTSFNVQDLLPDHEYKFRVRAINVYGTSEPSQESELTTVGEKPEEPKDEVEVSDDDEKEPEVDYRTVTINTEQKVSDFYDIEERLGSGKFGQVFRLVEKKTRKVWAGKFFKAYSAKEKENIRQEISIMNCLHHPKLVQCVDAFEEKANIVMVLEIVSGGELFERIIDEDFELTERECIKYMRQISEGVEYIHKQGIVHLDLKPENIMCVNKTGTRIKLIDFGLARRLENAGSLKVLFGTPEFVAPEVINYEPIGYATDMWSIGVICYILVSGLSPFMGDNDNETLANVTSATWDFDDEAFDEISDDAKDFISNLLKKDMKNRLDCTQCLQHPWLMKDTKNMEAKKLSKDRMKKYMARRKWQKTGNAVRAIGRLSSMAMISGLSGRKSSTGSPTSPLNAEKLESEEDVSQAFLEAVAEEKPHVKPYFSKTIRDLEVVEGSAARFDCKIEGYPDPEVVWFKDDQSIRESRHFQIDYDEDGNCSLIISDVCGDDDAKYTCKAVNSLGEATCTAELIVETMEEGEGEGEEEEE

SEQ ID NO: 54349 - protein, 1863 aa, Homo sapiens; identical to SEQ ID NO: 54347
  Payload ID: 10735
  Gene Symbol: MYLK
  Gene Name: myosin light chain kinase
  Uniprot ID: Q15746
  ENSP ID: ENSP00000354004

SEQ ID NO: 54350 - protein, 70 aa, Homo sapiens
  Payload ID: 10735
  Gene Symbol: MYLK
  Gene Name: myosin light chain kinase
  ENSP ID: ENSP00000417798
MGDVKLVASSHISKTSLSVDPSRVDSMPLTEAPAFILPPRNLCIKEGATAKFEGREVLRSSLVSLLFPKP

SEQ ID NO: 54351 - protein, 1914 aa, Homo sapiens; identical to SEQ ID NO: 54348
  Payload ID: 10735
  Gene Symbol: MYLK
  Gene Name: myosin light chain kinase
  Uniprot ID: Q15746
  ENSP ID: ENSP00000418335

SEQ ID NO: 54352 - protein, 229 aa, Homo sapiens
  Payload ID: 10735
  Gene Symbol: MYLK
  Gene Name: myosin light chain kinase
  ENSP ID: ENSP00000422984
MKSRRPKSSLPPVLGTESDATVKKKPAPKTPPKAAMPPQIIQFPEDQKVRAGESVELFGKVTGTQPITCTWMKFRKQIQESEHMKVENSENGSKLTILAARQEHCGCYTLLVENKLGSRQAQVNLTVVDKPDPPAGTPCASDIRSSSLTLSWYGSSYDGGSAVQSYSIEIWDSANKTWKELATCRSTSFNVQDLLPDHEYKFRVRAINVYGTSEPSQESELTTVGEKPE

SEQ ID NO: 54353 - protein, 154 aa, Homo sapiens
  Payload ID: 10735
  Gene Symbol: MYLK
  Gene Name: myosin light chain kinase
  Uniprot ID: Q15746
  ENSP ID: ENSP00000428967
MAMISGLSGRKSSTGSPTSPLNAEKLESEEDVSQAFLEAVAEEKPHVKPYFSKTIRDLEVVEGSAARFDCKIEGYPDPEVVWFKDDQSIRESRHFQIDYDEDGNCSLIISDVCGDDDAKYTCKAVNSLGEATCTAELIVETMEEGEGEGEEEEE

SEQ ID NO: 54354 - protein, 154 aa, Homo sapiens; identical to SEQ ID NO: 54353
  Payload ID: 10735
  Gene Symbol: MYLK
  Gene Name: myosin light chain kinase
  Uniprot ID: Q15746
  ENSP ID: ENSP00000462118

SEQ ID NO: 54355 - protein, 153 aa, Homo sapiens
  Payload ID: 10735
  Gene Symbol: MYLK
  Gene Name: myosin light chain kinase
  Uniprot ID: Q15746
  ENSP ID: ENSP00000463691
MAMISGLSGRKSSTGSPTSPLNAEKLESEDVSQAFLEAVAEEKPHVKPYFSKTIRDLEVVEGSAARFDCKIEGYPDPEVVWFKDDQSIRESRHFQIDYDEDGNCSLIISDVCGDDDAKYTCKAVNSLGEATCTAELIVETMEEGEGEGEEEEE

SEQ ID NO: 54356 - protein, 596 aa, Homo sapiens
  Payload ID: 10736
  Gene Symbol: MYLK2
  Gene Name: myosin light chain kinase 2
  Uniprot ID: Q9H1R3
  ENSP ID: ENSP00000365152
MATENGAVELGIQNPSTDKAPKGPTGERPLAAGKDPGPPDPKKAPDPPTLKKDAKAPASEKGDGTLAQPSTSSQGPKGEGDRGGGPAEGSAGPPAALPQQTATPETSVKKPKAEQGASGSQDPGKPRVGKKAAEGQAAARRGSPAFLHSPSCPAIISSSEKLLAKKPPSEASELTFEGVPMTHSPTDPRPAKAEEGKNILAESQKEVGEKTPGQAGQAKMQGDTSRGIEFQAVPSEKSEVGQALCLTAREEDCFQILDDCPPPPAPFPHRMVELRTGNVSSEFSMNSKEALGGGKFGAVCTCMEKATGLKLAAKVIKKQTPKDKEMVLLEIEVMNQLNHRNLIQLYAAIETPHEIVLFMEYIEGGELFERIVDEDYHLTEVDTMVFVRQICDGILFMHKMRVLHLDLKPENILCVNTTGHLVKIIDFGLARRYNPNEKLKVNFGTPEFLSPEVVNYDQISDKTDMWSMGVITYMLLSGLSPFLGDDDTETLNNVLSGNWYFDEETFEAVSDEAKDFVSNLIVKDQRARMNAAQCLAHPWLNNLAEKAKRCNRRLKSQILLKKYLMKRRWKKNFIAVSAANRFKKISSSGALMALGV

SEQ ID NO: 54357 - protein, 596 aa, Homo sapiens; identical to SEQ ID NO: 54356
  Payload ID: 10736
  Gene Symbol: MYLK2
  Gene Name: myosin light chain kinase 2
  Uniprot ID: Q9H1R3
  ENSP ID: ENSP00000365162

SEQ ID NO: 54358 - protein, 819 aa, Homo sapiens
  Payload ID: 10737
  Gene Symbol: MYLK3
  Gene Name: myosin light chain kinase 3
  Uniprot ID: Q32MK0
  ENSP ID: ENSP00000378288
MSGTSKESLGHGGLPGLGKTCLTTMDTKLNMLNEKVDQLLHFQEDVTEKLQSMCRDMGHLERGLHRLEASRAPGPGGADGVPHIDTQAGWPEVLELVRAMQQDAAQHGARLEALFRMVAAVDRAIALVGATFQKSKVADFLMQGRVPWRRGSPGDSPEENKERVEEEGGKPKHVLSTSGVQSDAREPGEESQKADVLEGTAERLPPIRASGLGADPAQAVVSPGQGDGVPGPAQAFPGHLPLPTKVEAKAPETPSENLRTGLELAPAPGRVNVVSPSLEVAPGAGQGASSSRPDPEPLEEGTRLTPGPGPQCPGPPGLPAQARATHSGGETPPRISIHIQEMDTPGEMLMTGRGSLGPTLTTEAPAAAQPGKQGPPGTGRCLQAPGTEPGEQTPEGARELSPLQESSSPGGVKAEEEQRAGAEPGTRPSLARSDDNDHEVGALGLQQGKSPGAGNPEPEQDCAARAPVRAEAVRRMPPGAEAGSVVLDDSPAPPAPFEHRVVSVKETSISAGYEVCQHEVLGGGRFGQVHRCTEKSTGLPLAAKIIKVKSAKDREDVKNEINIMNQLSHVNLIQLYDAFESKHSCTLVMEYVDGGELFDRITDEKYHLTELDVVLFTRQICEGVHYLHQHYILHLDLKPENILCVNQTGHQIKIIDFGLARRYKPREKLKVNFGTPEFLAPEVVNYEFVSFPTDMWSVGVITYMLLSGLSPFLGETDAETMNFIVNCSWDFDADTFEGLSEEAKDFVSRLLVKEKSCRMSATQCLKHEWLNNLPAKASRSKTRLKSQLLLQKYIAQRKWKKHFYVVTAANRLRKFPTSP

SEQ ID NO: 54359 - protein, 478 aa, Homo sapiens
  Payload ID: 10737
  Gene Symbol: MYLK3
  Gene Name: myosin light chain kinase 3
  Uniprot ID: Q32MK0
  ENSP ID: ENSP00000439297
MDTPGEMLMTGRGSLGPTLTTEAPAAAQPGKQGPPGTGRCLQAPGTEPGEQTPEGARELSPLQESSSPGGVKAEEEQRAGAEPGTRPSLARSDDNDHEVGALGLQQGKSPGAGNPEPEQDCAARAPVRAEAVRRMPPGAEAGSVVLDDSPAPPAPFEHRVVSVKETSISAGYEVCQHEVLGGGRFGQVHRCTEKSTGLPLAAKIIKVKSAKDREDVKNEINIMNQLSHVNLIQLYDAFESKHSCTLVMEYVDGGELFDRITDEKYHLTELDVVLFTRQICEGVHYLHQHYILHLDLKPENILCVNQTGHQIKIIDFGLARRYKPREKLKVNFGTPEFLAPEVVNYEFVSFPTDMWSVGVITYMLLSGLSPFLGETDAETMNFIVNCSWDFDADTFEGLSEEAKDFVSRLLVKEKSCRMSATQCLKHEWLNNLPAKASRSKTRLKSQLLLQKYIAQRKWKKHFYVVTAANRLRKFPTSP

SEQ ID NO: 54360 - protein, 388 aa, Homo sapiens
  Payload ID: 10738
  Gene Symbol: MYLK4
  Gene Name: myosin light chain kinase family, member 4
  Uniprot ID: Q86YV6
  ENSP ID: ENSP00000274643
MLKVKRLEEFNTCYNSNQLEKMAFFQCREEVEKVKCFLEKNSGDQDSRSGHNEAKEVWSNADLTERMPVKSKRTSALAVDIPAPPAPFDHRIVTAKQGAVNSFYTVSKTEILGGGRFGQVHKCEETATGLKLAAKIIKTRGMKDKEEVKNEISVMNQLDHANLIQLYDAFESKNDIVLVMEYVDGGELFDRIIDESYNLTELDTILFMKQICEGIRHMHQMYILHLDLKPENILCVNRDAKQIKIIDFGLARRYKPREKLKVNFGTPEFLAPEVVNYDFVSFPTDMWSVGVIAYMLLSGLSPFLGDNDAETLNNILACRWDLEDEEFQDISEEAKEFISKLLIKEKSWRISASEALKHPWLSDHKLHSRLNAQKKKNRGSDAQDFVTK

SEQ ID NO: 54361 - protein, 169 aa, Homo sapiens
  Payload ID: 10739
  Gene Symbol: MYLPF
  Gene Name: myosin light chain, phosphorylatable, fast skeletal muscle
  Uniprot ID: Q96A32
  ENSP ID: ENSP00000325239
MAPKRAKRRTVEGGSSSVFSMFDQTQIQEFKEAFTVIDQNRDGIIDKEDLRDTFAAMGRLNVKNEELDAMMKEASGPINFTVFLTMFGEKLKGADPEDVITGAFKVLDPEGKGTIKKKFLEELLTTQCDRFSQEEIKNMWAAFPPDVGGNVDYKNICYVITHGDAKDQE

SEQ ID NO: 54362 - protein, 118 aa, Homo sapiens
  Payload ID: 10739
  Gene Symbol: MYLPF
  Gene Name: myosin light chain, phosphorylatable, fast skeletal muscle
  ENSP ID: ENSP00000454444
MAPKRAKRRTVEGGSSSVFSMFDQTQIQEFKEAFTVIDQNRDGIIDKEDLRDTFAAMGRLNVKNEELDAMMKEASGPINFTVFLTMFGEKLKGADPEDVITGAFKVLDPEGKGTIKKK

SEQ ID NO: 54363 - protein, 135 aa, Homo sapiens
  Payload ID: 10739
  Gene Symbol: MYLPF
  Gene Name: myosin light chain, phosphorylatable, fast skeletal muscle
  ENSP ID: ENSP00000454694
MAPKRAKRRTVEGGSSSVFSMFDQTQIQEFKEAFTVIDQNRDGIIDKEDLRDTFAAMGRLNVKNEELDAMMKEASGPINFTVFLTMFGEKLKGADPEDVITGAFKVLDPEGKGTIKKKFLEELLTTQCDRFSQEE

SEQ ID NO: 54364 - protein, 199 aa, Homo sapiens
  Payload ID: 10739
  Gene Symbol: MYLPF
  Gene Name: myosin light chain, phosphorylatable, fast skeletal muscle
  ENSP ID: ENSP00000455356
APKRAKRRTVEGGSSSVFSMFDQTQIQEFKEAFTVIDQNRDGIIDKEDLRDTFAAMGRLNVKNEELDAMMKEASGPINFTVFLTMFGEKLKGADPEDVITGAFKVLDPEGKGTIKKKFLEELLTTQCDRFSQEEVSGDRGGAGAAKGLGPGRLRACARRPYVFPQIKNMWAAFPPDVGGNVDYKNICYVITHGDAKDQE

SEQ ID NO: 54365 - protein, 1794 aa, Homo sapiens
  Payload ID: 10740
  Gene Symbol: MPRIP
  Gene Name: myosin phosphatase Rho interacting protein
  ENSP ID: ENSP00000317786
  MOD_RES (1)..(1): Any amino acid
XQEAELGEPDPEQKRSRARERRREGRSKTFDWAEFRPIQQALAQERVGGVGPADTHEPLRPEAEPGELERERARRREERRKRFGMLDATDGPGTEDAALRMEVDRSPGLPMSDLKTHNVHVEIEQRWHQVETTPLREEKQVPIAPVHLSSEDGGDRLSTHELTSLLEKELEQSQKEASDLLEQNRLLQDQLRVALGREQSAREGYVLQTEVAASPSGAWQRLHRVNQDLQSELEAQCQRQELITHQIQTLKRSYGEAKDTIRHHEAEIRSLQARLSNAAAELAIKEQALAKLKGDLKREQGRVREQLEERQHSEAALSSQLRASEQKLKSAEALLLEKTQELRGLETQQALQRDRQKEVQRLQERIADLSQQLGASEQAQRLMEEKLQRNYELLLESCEKEKQALLQNLKEVEDKASAYEDQLQGQAQQVETLQKEKLSATFEGSEQVHQLEEQLEAREASVRRLAEHVQSLCDERDLLRQRFQELTERVATSDEDVAELREKLRRREADNQSLEHSYQRVSSQLQSMHTLLREKEEELERIKEAHEKVLEKKEQDLNEALVKMVALGSSLEETEIKLQAKEEILRKFASESPKDMEEPRSTPEETERDGTLLPGQPVQATRAPLGLPHTRLEDEDEDLGAPPGEEYGDGSPSREDSMVPPKSVEVLDREGHQQGTAKLDQGAPGVKRQRIRFSTIQCQRYIHPEGSEKTWTSSTSSDTSQDRSPSEESMSSEPAPSVLPATGDSDTYLSIIHSLETKLYVTEEKLKDVTVRLESQQGQSREALLALHHQWAGTEAQLREQLRASLLQVGALASQLEQERQERARRVEGHVGELGDFQVKNSQALMCLENCREQLRSLPRASQEDEQDARAASLASVESALVSAIQALQHWPAPAHGGARAQLETGGTEENGKPASLQQCSQSELTEQEQVRLLSDQIALEASLISQIADSLKNTTSDVSRMLHEISWSGQPPMESAGAPVDTWARKVLVDGEFWSQVESLRKHLGTLGGEAVGASGDGQQSIPQGLAPILANATWVRAELSFATQSVRESFHRRLQSIQETLRGTQTALRQHKCLLREILGAYQTPDFERVMQQVLEALRLPAGHEDGVQLSWDLSPLGEVLGRDSDSSQEPFDVSDQSPGAFVAIQEELAQQLKEKASLLEEIAAALPSLPPVESLRDCQKLLQVSQSLSYNTCLGGLGQYSSLLVQDAIIQAQVCYASCRIRLEYEKELQLCKESWQTREPSCSEQAQAARALREEYEELLRKQKSEYLDVIAIVERENAELKAKAAQLDHQQQCLEDAESKHSMSMFTLRGRYEEEIRCVVEQLTRTESTLQAERSRVLSQLDASVRDRQDMERHHGEQIQTLEDRFQLKVRELQTIHEEELRTLQEHYSQSLRCLQDTLCLHQGPHPKALPAPAPNWQATQGEADSMTGLRERIQELEAQMDVMREELGHKDLEGDAATLREKYQRDLESLKATCERGFAAMEETHQKKIEDLQRQHQRELEKLREEKDRLLAEETAATISAIEAMKNAHREEMERELEKSQRSQISSVNSDVEALRRQYLEELQSVQRELEVLSEQYSQKCLENAHLAQALEAERQALRQCQRENQELNAHNQELNNRLAAEITRLRTLLTGDGGGEATGSPLAQGKDAYELEVLLRVKESEIQYLKQEISSLKDELQTALRDKKYASDKYKDIYTELSIAKAKADCDISRLKEQLKAATEALGEKSPDSATVSGYDIMKSKSNPDFLKKDRSCVTRQLRNIRSKSLKEGLTVQERLKLFESRDLKKD

SEQ ID NO: 54366 - protein, 1025 aa, Homo sapiens
  Payload ID: 10740
  Gene Symbol: MPRIP
  Gene Name: myosin phosphatase Rho interacting protein
  Uniprot ID: Q6WCQ1
  ENSP ID: ENSP00000342379
MSAAKENPCRKFQANIFNKSKCQNCFKPRESHLLNDEDLTQAKPIYGGWLLLAPDGTDFDNPVHRSRKWQRRFFILYEHGLLRYALDEMPTTLPQGTINMNQCTDVVDGEGRTGQKFSLCILTPEKEHFIRAETKEIVSGWLEMLMVYPRTNKQNQKKKRKVEPPTPQEPGPAKVAVTSSSSSSSSSSSIPSAEKVPTTKSTLWQEEMRTKDQPDGSSLSPAQSPSQSQPPAASSLREPGLESKEEESAMSSDRMDCGRKVRVESGYFSLEKTKQDLKAEEQQLPPPLSPPSPSTPNHRRSQVIEKFEALDIEKAEHMETNAVGPSPSSDTRQGRSEKRAFPRKRDFTNEAPPAPLPDASASPLSPHRRAKSLDRRSTEPSVTPDLLNFKKGWLTKQYEDGQWKKHWFVLADQSLRYYRDSVAEEAADLDGEIDLSACYDVTEYPVQRNYGFQIHTKEGEFTLSAMTSGIRRNWIQTIMKHVHPTTAPDVTSSLPEEKNKSSCSFETCPRPTEKQEAELGEPDPEQKRSRARERRREGRSKTFDWAEFRPIQQALAQERVGGVGPADTHEPLRPEAEPGELERERARRREERRKRFGMLDATDGPGTEDAALRMEVDRSPGLPMSDLKTHNVHVEIEQRWHQVETTPLREEKQVPIAPVHLSSEDGGDRLSTHELTSLLEKELEQSQKEASDLLEQNRLLQDQLRVALGREQSAREGYVLQATCERGFAAMEETHQKKIEDLQRQHQRELEKLREEKDRLLAEETAATISAIEAMKNAHREEMERELEKSQRSQISSVNSDVEALRRQYLEELQSVQRELEVLSEQYSQKCLENAHLAQALEAERQALRQCQRENQELNAHNQELNNRLAAEITRLRTLLTGDGGGEATGSPLAQGKDAYELEVLLRVKESEIQYLKQEISSLKDELQTALRDKKYASDKYKDIYTELSIAKAKADCDISRLKEQLKAATEALGEKSPDSATVSGYDIMKSKSNPDFLKKDRSCVTRQLRNIRSKSVIEQVSWDT

SEQ ID NO: 54367 - protein, 63 aa, Homo sapiens
  Payload ID: 10740
  Gene Symbol: MPRIP
  Gene Name: myosin phosphatase Rho interacting protein
  ENSP ID: ENSP00000379151
MSAAKENPCRKFQANIFNKSKCQNCFKPRESHLLNDEDLTQQNTHPLEMKRGAHIYDARMFSC

SEQ ID NO: 54368 - protein, 1038 aa, Homo sapiens
  Payload ID: 10740
  Gene Symbol: MPRIP
  Gene Name: myosin phosphatase Rho interacting protein
  Uniprot ID: Q6WCQ1
  ENSP ID: ENSP00000379156
MSAAKENPCRKFQANIFNKSKCQNCFKPRESHLLNDEDLTQAKPIYGGWLLLAPDGTDFDNPVHRSRKWQRRFFILYEHGLLRYALDEMPTTLPQGTINMNQCTDVVDGEGRTGQKFSLCILTPEKEHFIRAETKEIVSGWLEMLMVYPRTNKQNQKKKRKVEPPTPQEPGPAKVAVTSSSSSSSSSSSIPSAEKVPTTKSTLWQEEMRTKDQPDGSSLSPAQSPSQSQPPAASSLREPGLESKEEESAMSSDRMDCGRKVRVESGYFSLEKTKQDLKAEEQQLPPPLSPPSPSTPNHRRSQVIEKFEALDIEKAEHMETNAVGPSPSSDTRQGRSEKRAFPRKRDFTNEAPPAPLPDASASPLSPHRRAKSLDRRSTEPSVTPDLLNFKKGWLTKQYEDGQWKKHWFVLADQSLRYYRDSVAEEAADLDGEIDLSACYDVTEYPVQRNYGFQIHTKEGEFTLSAMTSGIRRNWIQTIMKHVHPTTAPDVTSSLPEEKNKSSCSFETCPRPTEKQEAELGEPDPEQKRSRARERRREGRSKTFDWAEFRPIQQALAQERVGGVGPADTHEPLRPEAEPGELERERARRREERRKRFGMLDATDGPGTEDAALRMEVDRSPGLPMSDLKTHNVHVEIEQRWHQVETTPLREEKQVPIAPVHLSSEDGGDRLSTHELTSLLEKELEQSQKEASDLLEQNRLLQDQLRVALGREQSAREGYVLQATCERGFAAMEETHQKKIEDLQRQHQRELEKLREEKDRLLAEETAATISAIEAMKNAHREEMERELEKSQRSQISSVNSDVEALRRQYLEELQSVQRELEVLSEQYSQKCLENAHLAQALEAERQALRQCQRENQELNAHNQELNNRLAAEITRLRTLLTGDGGGEATGSPLAQGKDAYELEVLLRVKESEIQYLKQEISSLKDELQTALRDKKYASDKYKDIYTELSIAKAKADCDISRLKEQLKAATEALGEKSPDSATVSGYDIMKSKSNPDFLKKDRSCVTRQLRNIRSKSLKEGLTVQERLKLFESRDLKKD

SEQ ID NO: 54369 - protein, 277 aa, Homo sapiens
  Payload ID: 10740
  Gene Symbol: MPRIP
  Gene Name: myosin phosphatase Rho interacting protein
  ENSP ID: ENSP00000411723
  MOD_RES (1)..(1): Any amino acid
XTCERGFAAMEETHQKKIEDLQRQHQRELEKLREEKDRLLAEETAATISAIEAMKNAHREEMERELEKSQRSQISSVNSDVEALRRQYLEELQSVQRELEVLSEQYSQKCLENAHLAQALEAERQALRQCQRENQELNAHNQVLLRVKESEIQYLKQEISSLKDELQTALRDKKYASDKYKDIYTELSIAKAKADCDISRLKEQLKAATEALGEKSPDSATVSGYDIMKSKSNPDFLKKDRSCVTRQLRNIRSKSLKEGLTVQERLKLFESRDLKKD

SEQ ID NO: 54370 - protein, 1091 aa, Homo sapiens
  Payload ID: 10740
  Gene Symbol: MPRIP
  Gene Name: myosin phosphatase Rho interacting protein
  ENSP ID: ENSP00000412147
  MOD_RES (1)..(1): Any amino acid
XRFSTIQCQRYIHPEGSEKTWTSSTSSDTSQDRSPSEESMSSEPAPSVLPATGDSDTYLSIIHSLETKLYVTEEKLKDVTVRLESQQGQSREALLALHHQWAGTEAQLREQLRASLLQVGALASQLEQERQERARRVEGHVGELGDFQVKNSQALMCLENCREQLRSLPRASQEDEQDARAASLASVESALVSAIQALQHWPAPAHGGARAQLETGGTEENGKPASLQQCSQSELTEQEQVRLLSDQIALEASLISQIADSLKNTTSDVSRMLHEISWSGQPPMESAGAPVDTWARKVLVDGEFWSQVESLRKHLGTLGGEAVGASGDGQQSIPQGLAPILANATWVRAELSFATQSVRESFHRRLQSIQETLRGTQTALRQHKCLLREILGAYQTPDFERVMQQVLEALRLPAGHEDGVQLSWDLSPLGEVLGRDSDSSQEPFDVSDQSPGAFVAIQEELAQQLKEKASLLEEIAAALPSLPPVESLRDCQKLLQVSQSLSYNTCLGGLGQYSSLLVQDAIIQAQVCYASCRIRLEYEKELQLCKESWQTREPSCSEQAQAARALREEYEELLRKQKSEYLDVIAIVERENAELKAKAAQLDHQQQCLEDAESKHSMSMFTLRGRYEEEIRCVVEQLTRTESTLQAERSRVLSQLDASVRDRQDMERHHGEQIQTLEDRFQLKVRELQTIHEEELRTLQEHYSQSLRCLQDTLCLHQGPHPKALPAPAPNWQATQGEADSMTGLRERIQELEAQMDVMREELGHKDLEGDAATLREKYQRDLESLKATCERGFAAMEETHQKKIEDLQRQHQRELEKLREEKDRLLAEETAATISAIEAMKNAHREEMERELEKSQRSQISSVNSDVEALRRQYLEELQSVQRELEVLSEQYSQKCLENAHLAQALEAERQALRQCQRENQELNAHNQELNNRLAAEITRLRTLLTGDGGGEATGSPLAQGKDAYELEVLLRVKESEIQYLKQEISSLKDELQTALRDKKYASDKYKDIYTELSIAKAKADCDISRLKEQLKAATEALGEKSPDSATVSGYDIMKSKSNPDFLKKDRSCVTRQLRNIRSKSVIEQVSWDT

SEQ ID NO: 54371 - protein, 139 aa, Homo sapiens
  Payload ID: 10740
  Gene Symbol: MPRIP
  Gene Name: myosin phosphatase Rho interacting protein
  ENSP ID: ENSP00000462532
MSAAKENPCRKFQANIFNKSKCQNCFKPRESHLLNDEDLTQAKPIYGGWLLLAPDGTDFDNPVHRSRKWQRRFFILYEHGLLRYALDEMPTTLPQGTINMNQCTDVVDGEGRTGQKFSLCILTPEKEHFIRAETKEIVS

SEQ ID NO: 54372 - protein, 844 aa, Homo sapiens
  Payload ID: 10740
  Gene Symbol: MPRIP
  Gene Name: myosin phosphatase Rho interacting protein
  ENSP ID: ENSP00000462688
KKKRKVEPPTPQEPGPAKVAVTSSSSSSSSSSSIPSAEKVPTTKSTLWQEEMRTKDQPDGSSLSPAQSPSQSQPPAASSLREPGLESKEEESAMSSDRMDCGRKVRVESGYFSLEKTKQDLKAEEQQLPPPLSPPSPSTPNHRRSQVIEKFEALDIEKAEHMETNAVGPSPSSDTRQGRSEKRAFPRKRPDLLNFKKGWLTKQYEDGQWKKHWFVLADQSLRYYRDSVAEEAADLDGEIDLSACYDVTEYPVQRNYGFQIHTKEGEFTLSAMTSGIRRNWIQTIMKHVHPTTAPDVTSSLPEEKNKSSCSFETCPRPTEKQEAELGEPDPEQKRSRARERRREGRSKTFDWAEFRPIQQALAQERVGGVGPADTHEPLRPEAEPGELERERARRREERRKRFGMLDATDGPGTEDAALRMEVDRSPGLPMSDLKTHNVHVEIEQRWHQVETTPLREEKQVPIAPVHLSSEDGGDRLSTHELTSLLEKELEQSQKEASDLLEQNRLLQDQLRVALGREQSAREGYVLQATCERGFAAMEETHQKKIEDLQRQHQRELEKLREEKDRLLAEETAATISAIEAMKNAHREEMERELEKSQRSQISSVNSDVEALRRQYLEELQSVQRELEVLSEQYSQKCLENAHLAQALEAERQALRQCQRENQELNAHNQELNNRLAAEITRLRTLLTGDGGGEATGSPLAQGKDAYELEVLLRVKESEIQYLKQEISSLKDELQTALRDKKYASDKYKDIYTELSIAKAKADCDISRLKEQLKAATEALGEKSPDSATVSGYDIMKSKSNPDFLKKDRSCVTRQLRNIRSKSLKEGLTVQERLKLFESRDLKKD

SEQ ID NO: 54373 - protein, 59 aa, Homo sapiens
  Payload ID: 10740
  Gene Symbol: MPRIP
  Gene Name: myosin phosphatase Rho interacting protein
  ENSP ID: ENSP00000463367
  MOD_RES (1)..(1): Any amino acid
XLKDCYLDIMKSKSNPDFLKKDRSCVTRQLRNIRSKSLKEGLTVQERLKLFESRDLKKD

SEQ ID NO: 54374 - protein, 181 aa, Homo sapiens
  Payload ID: 10740
  Gene Symbol: MPRIP
  Gene Name: myosin phosphatase Rho interacting protein
  ENSP ID: ENSP00000464276
  MOD_RES (1)..(1): Any amino acid
XATGSPLAQGKDAYELEVLLRVKESEIQYLKQEISSLKDELQTALRDKKYASDKYKDIYTELSIAKAKADCDISRLKEQLKAATEALGEKSPDSATVSGYDIMKSKSNPDFLKKDRSCVTRQLRNIRSKCTTPVLPGNANPELQIRTQTWETPRPEAALLFPALLSSGPVMGYAEPAMCTH

SEQ ID NO: 54375 - protein, 28 aa, Homo sapiens
  Payload ID: 10740
  Gene Symbol: MPRIP
  Gene Name: myosin phosphatase Rho interacting protein
  ENSP ID: ENSP00000464983
  MOD_RES (1)..(1): Any amino acid
XRNWIQTIMKHVHPTTAPDVTSSLNPGT

SEQ ID NO: 54376 - protein, 95 aa, Homo sapiens
  Payload ID: 10740
  Gene Symbol: MPRIP
  Gene Name: myosin phosphatase Rho interacting protein
  ENSP ID: ENSP00000465902
  MOD_RES (1)..(1): Any amino acid
XKKYASDKYKDIYTELSIAKAKADCDISRLKEQLKAATEALGEKSPDSATVSGYDIMKSKSNPDFLKKDRSCVTRQLRNIRSKVSLGSSPLVGGA

SEQ ID NO: 54377 - protein, 264 aa, Homo sapiens
  Payload ID: 10741
  Gene Symbol: MYLIP
  Gene Name: myosin regulatory light chain interacting protein
  ENSP ID: ENSP00000008686
MENYGIEWHSVRDSEGQKLLIGVGPEGISICKDDFSPINRIAYPVVQMATQSGKNVYLTVTKESGNSIVLLFKMISTRAASGLYRAITETHAFYRCDTVTSAVMMQYSRDLKGHLASLFLNENINLGKKYVFDIKRTSKEVYDHARRALYNAGVVDLVSRNNQSPSHSPLKSSESSMNCSSCEGLSCQQTRVLQEKLRKLKEAMLCMVCCEEEINSTFCPCGHTVCCESCAAQLQSCPVCRSRVEHVQHVYLPTHTSLLNLTVI

SEQ ID NO: 54378 - protein, 445 aa, Homo sapiens
  Payload ID: 10741
  Gene Symbol: MYLIP
  Gene Name: myosin regulatory light chain interacting protein
  Uniprot ID: Q8WY64
  ENSP ID: ENSP00000349298
MLCYVTRPDAVLMEVEVEAKANGEDCLNQVCRRLGIIEVDYFGLQFTGSKGESLWLNLRNRISQQMDGLAPYRLKLRVKFFVEPHLILQEQTRHIFFLHIKEALLAGHLLCSPEQAVELSALLAQTKFGDYNQNTAKYNYEELCAKELSSATLNSIVAKHKELEGTSQASAEYQVLQIVSAMENYGIEWHSVRDSEGQKLLIGVGPEGISICKDDFSPINRIAYPVVQMATQSGKNVYLTVTKESGNSIVLLFKMISTRAASGLYRAITETHAFYRCDTVTSAVMMQYSRDLKGHLASLFLNENINLGKKYVFDIKRTSKEVYDHARRALYNAGVVDLVSRNNQSPSHSPLKSSESSMNCSSCEGLSCQQTRVLQEKLRKLKEAMLCMVCCEEEINSTFCPCGHTVCCESCAAQLQSCPVCRSRVEHVQHVYLPTHTSLLNLTVI

SEQ ID NO: 54379 - protein, 1828 aa, Homo sapiens
  Payload ID: 10742
  Gene Symbol: MYO5A
  Gene Name: myosin VA
  Uniprot ID: Q9Y4I1
  ENSP ID: ENSP00000348693
MAASELYTKFARVWIPDPEEVWKSAELLKDYKPGDKVLLLHLEEGKDLEYHLDPKTKELPHLRNPDILVGENDLTALSYLHEPAVLHNLRVRFIDSKLIYTYCGIVLVAINPYEQLPIYGEDIINAYSGQNMGDMDPHIFAVAEEAYKQMARDERNQSIIVSGESGAGKTVSAKYAMRYFATVSGSASEANVEEKVLASNPIMESIGNAKTTRNDNSSRFGKYIEIGFDKRYRIIGANMRTYLLEKSRVVFQAEEERNYHIFYQLCASAKLPEFKMLRLGNADNFNYTKQGGSPVIEGVDDAKEMAHTRQACTLLGISESHQMGIFRILAGILHLGNVGFTSRDADSCTIPPKHEPLCIFCELMGVDYEEMCHWLCHRKLATATETYIKPISKLQATNARDALAKHIYAKLFNWIVDNVNQALHSAVKQHSFIGVLDIYGFETFEINSFEQFCINYANEKLQQQFNMHVFKLEQEEYMKEQIPWTLIDFYDNQPCINLIESKLGILDLLDEECKMPKGTDDTWAQKLYNTHLNKCALFEKPRLSNKAFIIQHFADKVEYQCEGFLEKNKDTVFEEQIKVLKSSKFKMLPELFQDDEKAISPTSATSSGRTPLTRTPAKPTKGRPGQMAKEHKKTVGHQFRNSLHLLMETLNATTPHYVRCIKPNDFKFPFTFDEKRAVQQLRACGVLETIRISAAGFPSRWTYQEFFSRYRVLMKQKDVLSDRKQTCKNVLEKLILDKDKYQFGKTKIFFRAGQVAYLEKLRADKLRAACIRIQKTIRGWLLRKKYLRMRKAAITMQRYVRGYQARCYAKFLRRTKAATIIQKYWRMYVVRRRYKIRRAATIVLQSYLRGFLARNRYRKILREHKAVIIQKRVRGWLARTHYKRSMHAIIYLQCCFRRMMAKRELKKLKIEARSVERYKKLHIGMENKIMQLQRKVDEQNKDYKCLVEKLTNLEGIYNSETEKLRSDLERLQLSEEEAKVATGRVLSLQEEIAKLRKDLEQTRSEKKCIEEHADRYKQETEQLVSNLKEENTLLKQEKEALNHRIVQQAKEMTETMEKKLVEETKQLELDLNDERLRYQNLLNEFSRLEERYDDLKEEMTLMVHVPKPGHKRTDSTHSSNESEYIFSSEIAEMEDIPSRTEEPSEKKVPLDMSLFLKLQKRVTELEQEKQVMQDELDRKEEQVLRSKAKEEERPQIRGAELEYESLKRQELESENKKLKNELNELRKALSEKSAPEVTAPGAPAYRVLMEQLTSVSEELDVRKEEVLILRSQLVSQKEAIQPKDDKNTMTDSTILLEDVQKMKDKGEIAQAYIGLKETNRLLESQLQSQKRSHENEAEALRGEIQSLKEENNRQQQLLAQNLQLPPEARIEASLQHEITRLTNENLDLMEQLEKQDKTVRKLKKQLKVFAKKIGELEVGQMENISPGQIIDEPIRPVNIPRKEKDFQGMLEYKKEDEQKLVKNLILELKPRGVAVNLIPGLPAYILFMCVRHADYLNDDQKVRSLLTSTINSIKKVLKKRGDDFETVSFWLSNTCRFLHCLKQYSGEEGFMKHNTSRQNEHCLTNFDLAEYRQVLSDLAIQIYQQLVRVLENILQPMIVSGMLEHETIQGVSGVKPTGLRKRTSSIADEGTYTLDSILRQLNSFHSVMCQHGMDPELIKQVVKQMFYIIGAITLNNLLLRKDMCSWSKGMQIRYNVSQLEEWLRDKNLMNSGAKETLEPLIQAAQLLQVKKKTDDDAEAICSMCNALTTAQIVKVLNLYTPVNEFEERVSVSFIRTIQMRLRDRKDSPQLLMDAKHIFPVTFPFNPSSLALETIQIPASLGLGFISRV

SEQ ID NO: 54380 - protein, 1855 aa, Homo sapiens
  Payload ID: 10742
  Gene Symbol: MYO5A
  Gene Name: myosin VA
  ENSP ID: ENSP00000350945
MAASELYTKFARVWIPDPEEVWKSAELLKDYKPGDKVLLLHLEEGKDLEYHLDPKTKELPHLRNPDILVGENDLTALSYLHEPAVLHNLRVRFIDSKLIYTYCGIVLVAINPYEQLPIYGEDIINAYSGQNMGDMDPHIFAVAEEAYKQMARDERNQSIIVSGESGAGKTVSAKYAMRYFATVSGSASEANVEEKVLASNPIMESIGNAKTTRNDNSSRFGKYIEIGFDKRYRIIGANMRTYLLEKSRVVFQAEEERNYHIFYQLCASAKLPEFKMLRLGNADNFNYTKQGGSPVIEGVDDAKEMAHTRQACTLLGISESHQMGIFRILAGILHLGNVGFTSRDADSCTIPPKHEPLCIFCELMGVDYEEMCHWLCHRKLATATETYIKPISKLQATNARDALAKHIYAKLFNWIVDNVNQALHSAVKQHSFIGVLDIYGFETFEINSFEQFCINYANEKLQQQFNMHVFKLEQEEYMKEQIPWTLIDFYDNQPCINLIESKLGILDLLDEECKMPKGTDDTWAQKLYNTHLNKCALFEKPRLSNKAFIIQHFADKVEYQCEGFLEKNKDTVFEEQIKVLKSSKFKMLPELFQDDEKAISPTSATSSGRTPLTRTPAKPTKGRPGQMAKEHKKTVGHQFRNSLHLLMETLNATTPHYVRCIKPNDFKFPFTFDEKRAVQQLRACGVLETIRISAAGFPSRWTYQEFFSRYRVLMKQKDVLSDRKQTCKNVLEKLILDKDKYQFGKTKIFFRAGQVAYLEKLRADKLRAACIRIQKTIRGWLLRKKYLRMRKAAITMQRYVRGYQARCYAKFLRRTKAATIIQKYWRMYVVRRRYKIRRAATIVLQSYLRGFLARNRYRKILREHKAVIIQKRVRGWLARTHYKRSMHAIIYLQCCFRRMMAKRELKKLKIEARSVERYKKLHIGMENKIMQLQRKVDEQNKDYKCLVEKLTNLEGIYNSETEKLRSDLERLQLSEEEAKVATGRVLSLQEEIAKLRKDLEQTRSEKKCIEEHADRYKQETEQLVSNLKEENTLLKQEKEALNHRIVQQAKEMTETMEKKLVEETKQLELDLNDERLRYQNLLNEFSRLEERYDDLKEEMTLMVHVPKPGHKRTDSTHSSNESEYIFSSEIAEMEDIPSRTEEPSEKKVPLDMSLFLKLQKRVTELEQEKQVMQDELDRKEEQVLRSKAKEEERPQIRGAELEYESLKRQELESENKKLKNELNELRKALSEKSAPEVTAPGAPAYRVLMEQLTSVSEELDVRKEEVLILRSQLVSQKEAIQPKDDKNTMTDSTILLEDVQKMKDKGEIAQAYIGLKETNRSSALDYHELNEDGELWLVYEGLKQANRLLESQLQSQKRSHENEAEALRGEIQSLKEENNRQQQLLAQNLQLPPEARIEASLQHEITRLTNENLDLMEQLEKQDKTVRKLKKQLKVFAKKIGELEVGQMENISPGQIIDEPIRPVNIPRKEKDFQGMLEYKKEDEQKLVKNLILGNKPRGVAVNLIPGLPAYILFMCVRHADYLNDDQKVRSLLTSTINSIKKVLKKRGDDFETVSFWLSNTCRFLHCLKQYSGEEGFMKHNTSRQNEHCLTNFDLAEYRQVLSDLAIQIYQQLVRVLENILQPMIVSGMLEHETIQGVSGVKPTGLRKRTSSIADEGTYTLDSILRQLNSFHSVMCQHGMDPELIKQVVKQMFYIIGAITLNNLLLRKDMCSWSKGMQIRYNVSQLEEWLRDKNLMNSGAKETLEPLIQAAQLLQVKKKTDDDAEAICSMCNALTTAQIVKVLNLYTPVNEFEERVSVSFIRTIQMRLRDRKDSPQLLMDAKHIFPVTFPFNPSSLALETIQIPASLGLGFISRV

SEQ ID NO: 54381 - protein, 228 aa, Homo sapiens
  Payload ID: 10742
  Gene Symbol: MYO5A
  Gene Name: myosin VA
  ENSP ID: ENSP00000382174
RQELESENKKLKNELNELRKALSEKSAPEVTAPGAPAYRVLMEQLTSVSEELDVRKEEVLILRSQLVSQKEAIQPKNTMTDSTILLEDVQKMKDKGEIAQAYIGLKETNRSSALDYHELNEDGELWLVYEGLKQANRLLESQLQSQKRSHENEAEALRGEIQSLKEENNRQQQLLAQNLQLPPEARIEASLQHEITRLTNENLYFEELYADDPKKYQSYRISLYKRMI

SEQ ID NO: 54382 - protein, 585 aa, Homo sapiens
  Payload ID: 10742
  Gene Symbol: MYO5A
  Gene Name: myosin VA
  ENSP ID: ENSP00000382175
GAPAYRVLMEQLTSVSEELDVRKEEVLILRSQLVSQKEAIQPKNTMTDSTILLEDVQKMKDKGEIAQAYIGLKETNRLLESQLQSQKRSHENEAEALRGEIQSLKEENNRQQQLLAQNLQLPPEARIEASLQHEITRLTNENLDLMEQLEKQDKTVRKLKKQLKVFAKKIGELEVGQMENISPGQIIDEPIRPVNIPRKEKDFQGMLEYKKEDEQKLVKNLILELKPRGVAVNLIPGLPAYILFMCVRHADYLNDDQKVRSLLTSTINSIKKVLKKRGDDFETVSFWLSNTCRFLHCLKQYSGEEGFMKHNTSRQNEHCLTNFDLAEYRQVLSDLAIQIYQQLVRVLENILQPMIVSGMLEHETIQGVSGVKPTGLRKRTSSIADEGTYTLDSILRQLNSFHSVMCQHGMDPELIKQVVKQMFYIIGAITLNNLLLRKDMCSWSKGMQIRYNVSQLEEWLRDKNLMNSGAKETLEPLIQAAQLLQVKKKTDDDAEAICSMCNALTTAQIVKVLNLYTPVNEFEERVSVSFIRTIQMRLRDRKDSPQLLMDAKHIFPVTFPFNPSSLALETIQIPASLGLGFISRV

SEQ ID NO: 54383 - protein, 1855 aa, Homo sapiens
  Payload ID: 10742
  Gene Symbol: MYO5A
  Gene Name: myosin VA
  Uniprot ID: Q9Y4I1
  ENSP ID: ENSP00000382177
MAASELYTKFARVWIPDPEEVWKSAELLKDYKPGDKVLLLHLEEGKDLEYHLDPKTKELPHLRNPDILVGENDLTALSYLHEPAVLHNLRVRFIDSKLIYTYCGIVLVAINPYEQLPIYGEDIINAYSGQNMGDMDPHIFAVAEEAYKQMARDERNQSIIVSGESGAGKTVSAKYAMRYFATVSGSASEANVEEKVLASNPIMESIGNAKTTRNDNSSRFGKYIEIGFDKRYRIIGANMRTYLLEKSRVVFQAEEERNYHIFYQLCASAKLPEFKMLRLGNADNFNYTKQGGSPVIEGVDDAKEMAHTRQACTLLGISESHQMGIFRILAGILHLGNVGFTSRDADSCTIPPKHEPLCIFCELMGVDYEEMCHWLCHRKLATATETYIKPISKLQATNARDALAKHIYAKLFNWIVDNVNQALHSAVKQHSFIGVLDIYGFETFEINSFEQFCINYANEKLQQQFNMHVFKLEQEEYMKEQIPWTLIDFYDNQPCINLIESKLGILDLLDEECKMPKGTDDTWAQKLYNTHLNKCALFEKPRLSNKAFIIQHFADKVEYQCEGFLEKNKDTVFEEQIKVLKSSKFKMLPELFQDDEKAISPTSATSSGRTPLTRTPAKPTKGRPGQMAKEHKKTVGHQFRNSLHLLMETLNATTPHYVRCIKPNDFKFPFTFDEKRAVQQLRACGVLETIRISAAGFPSRWTYQEFFSRYRVLMKQKDVLSDRKQTCKNVLEKLILDKDKYQFGKTKIFFRAGQVAYLEKLRADKLRAACIRIQKTIRGWLLRKKYLRMRKAAITMQRYVRGYQARCYAKFLRRTKAATIIQKYWRMYVVRRRYKIRRAATIVLQSYLRGFLARNRYRKILREHKAVIIQKRVRGWLARTHYKRSMHAIIYLQCCFRRMMAKRELKKLKIEARSVERYKKLHIGMENKIMQLQRKVDEQNKDYKCLVEKLTNLEGIYNSETEKLRSDLERLQLSEEEAKVATGRVLSLQEEIAKLRKDLEQTRSEKKCIEEHADRYKQETEQLVSNLKEENTLLKQEKEALNHRIVQQAKEMTETMEKKLVEETKQLELDLNDERLRYQNLLNEFSRLEERYDDLKEEMTLMVHVPKPGHKRTDSTHSSNESEYIFSSEIAEMEDIPSRTEEPSEKKVPLDMSLFLKLQKRVTELEQEKQVMQDELDRKEEQVLRSKAKEEERPQIRGAELEYESLKRQELESENKKLKNELNELRKALSEKSAPEVTAPGAPAYRVLMEQLTSVSEELDVRKEEVLILRSQLVSQKEAIQPKDDKNTMTDSTILLEDVQKMKDKGEIAQAYIGLKETNRSSALDYHELNEDGELWLVYEGLKQANRLLESQLQSQKRSHENEAEALRGEIQSLKEENNRQQQLLAQNLQLPPEARIEASLQHEITRLTNENLDLMEQLEKQDKTVRKLKKQLKVFAKKIGELEVGQMENISPGQIIDEPIRPVNIPRKEKDFQGMLEYKKEDEQKLVKNLILELKPRGVAVNLIPGLPAYILFMCVRHADYLNDDQKVRSLLTSTINSIKKVLKKRGDDFETVSFWLSNTCRFLHCLKQYSGEEGFMKHNTSRQNEHCLTNFDLAEYRQVLSDLAIQIYQQLVRVLENILQPMIVSGMLEHETIQGVSGVKPTGLRKRTSSIADEGTYTLDSILRQLNSFHSVMCQHGMDPELIKQVVKQMFYIIGAITLNNLLLRKDMCSWSKGMQIRYNVSQLEEWLRDKNLMNSGAKETLEPLIQAAQLLQVKKKTDDDAEAICSMCNALTTAQIVKVLNLYTPVNEFEERVSVSFIRTIQMRLRDRKDSPQLLMDAKHIFPVTFPFNPSSLALETIQIPASLGLGFISRV

SEQ ID NO: 54384 - protein, 1855 aa, Homo sapiens
  Payload ID: 10742
  Gene Symbol: MYO5A
  Gene Name: myosin VA
  ENSP ID: ENSP00000382179
MAASELYTKFARVWIPDPEEVWKSAELLKDYKPGDKVLLLHLEEGKDLEYHLDPKTKELPHLRNPDILVGENDLTALSYLHEPAVLHNLRVRFIDSKLIYTYCGIVLVAINPYEQLPIYGEDIINAYSGQNMGDMDPHIFAVAEEAYKQMARDERNQSIIVSGESGAGKTVSAKYAMRYFATVSGSASEANVEEKVLASNPIMESIGNAKTTRNDNSSRFGKYIEIGFDKRYRIIGANMRTYLLEKSRVVFQAEEERNYHIFYQLCASAKLPEFKMLRLGNADNFNYTKQGGSPVIEGVDDAKEMAHTRQACTLLGISESHQMGIFRILAGILHLGNVGFTSRDADSCTIPPKHEPLCIFCELMGVDYEEMCHWLCHRKLATATETYIKPISKLQATNARDALAKHIYAKLFNWIVDNVNQALHSAVKQHSFIGVLDIYGFETFEINSFEQFCINYANEKLQQQFNMHVFKLEQEEYMKEQIPWTLIDFYDNQPCINLIESKLGILDLLDEECKMPKGTDDTWAQKLYNTHLNKCALFEKPRLSNKAFIIQHFADKVEYQCEGFLEKNKDTVFEEQIKVLKSSKFKMLPELFQDDEKAISPTSATSSGRTPLTRTPAKPTKGRPGQMAKEHKKTVGHQFRNSLHLLMETLNATTPHYVRCIKPNDFKFPFTFDEKRAVQQLRACGVLETIRISAAGFPSRWTYQEFFSRYRVLMKQKDVLSDRKQTCKNVLEKLILDKDKYQFGKTKIFFRAGQVAYLEKLRADKLRAACIRIQKTIRGWLLRKKYLRMRKAAITMQRYVRGYQARCYAKFLRRTKAATIIQKYWRMYVVRRRYKIRRAATIVLQSYLRGFLARNRYRKILREHKAVIIQKRVRGWLARTHYKRSMHAIIYLQCCFRRMMAKRELKKLKIEARSVERYKKLHIGMENKIMQLQRKVDEQNKDYKCLVEKLTNLEGIYNSETEKLRSDLERLQLSEEEAKVATGRVLSLQEEIAKLRKDLEQTRSEKKCIEEHADRYKQETEQLVSNLKEENTLLKQEKEALNHRIVQQAKEMTETMEKKLVEETKQLELDLNDERLRYQNLLNEFSRLEERYDDLKEEMTLMVHVPKPGHKRTDSTHSSNESEYIFSSEIAEMEDIPSRTEEPSEKKVPLDMSLFLKLQKRVTELEQEKQVMQDELDRKEEQVLRSKAKEEERPQIRGAELEYESLKRQELESENKKLKNELNELRKALSEKSAPEVTAPGAPAYRVLMEQLTSVSEELDVRKEEVLILRSQLVSQKEAIQPKPSQNTMTDSTILLEDVQKMKDKGEIAQAYIGLKETNRSSALDYHELNEDGELWLVYEGLKQANRLLESQLQSQKRSHENEAEALRGEIQSLKEENNRQQQLLAQNLQLPPEARIEASLQHEITRLTNENLDLMEQLEKQDKTVRKLKKQLKVFAKKIGELEVGQMENISPGQIIDEPIRPVNIPRKEKDFQGMLEYKKEDEQKLVKNLILELKPRGVAVNLIPGLPAYILFMCVRHADYLNDDQKVRSLLTSTINSIKKVLKKRGDDFETVSFWLSNTCRFLHCLKQYSGEEGFMKHNTSRQNEHCLTNFDLAEYRQVLSDLAIQIYQQLVRVLENILQPMIVSGMLEHETIQGVSGVKPTGLRKRTSSIADEGTYTLDSILRQLNSFHSVMCQHGMDPELIKQVVKQMFYIIGAITLNNLLLRKDMCSWSKGMQIRYNVSQLEEWLRDKNLMNSGAKETLEPLIQAAQLLQVKKKTDDDAEAICSMCNALTTAQIVKVLNLYTPVNEFEERVSVSFIRTIQMRLRDRKDSPQLLMDAKHIFPVTFPFNPSSLALETIQIPASLGLGFISRV

SEQ ID NO: 54385 - protein, 1853 aa, Homo sapiens
  Payload ID: 10742
  Gene Symbol: MYO5A
  Gene Name: myosin VA
  ENSP ID: ENSP00000451109
MAASELYTKFARVWIPDPEEVWKSAELLKDYKPGDKVLLLHLEEGKDLEYHLDPKTKELPHLRNPDILVGENDLTALSYLHEPAVLHNLRVRFIDSKLIYTYCGIVLVAINPYEQLPIYGEDIINAYSGQNMGDMDPHIFAVAEEAYKQMARDERNQSIIVSGESGAGKTVSAKYAMRYFATVSGSASEANVEEKVLASNPIMESIGNAKTTRNDNSSRFGKYIEIGFDKRYRIIGANMRTYLLEKSRVVFQAEEERNYHIFYQLCASAKLPEFKMLRLGNADNFNYTKQGGSPVIEGVDDAKEMAHTRQACTLLGISESHQMGIFRILAGILHLGNVGFTSRDADSCTIPPKHEPLCIFCELMGVDYEEMCHWLCHRKLATATETYIKPISKLQATNARDALAKHIYAKLFNWIVDNVNQALHSAVKQHSFIGVLDIYGFETFEINSFEQFCINYANEKLQQQFNMHVFKLEQEEYMKEQIPWTLIDFYDNQPCINLIESKLGILDLLDEECKMPKGTDDTWAQKLYNTHLNKCALFEKPRLSNKAFIIQHFADKVEYQCEGFLEKNKDTVFEEQIKVLKSSKFKMLPELFQDDEKAISPTSATSSGRTPLTRTPAKPTKGRPGQMAKEHKKTVGHQFRNSLHLLMETLNATTPHYVRCIKPNDFKFPFTFDEKRAVQQLRACGVLETIRISAAGFPSRWTYQEFFSRYRVLMKQKDVLSDRKQTCKNVLEKLILDKDKYQFGKTKIFFRAGQVAYLEKLRADKLRAACIRIQKTIRGWLLRKKYLRMRKAAITMQRYVRGYQARCYAKFLRRTKAATIIQKYWRMYVVRRRYKIRRAATIVLQSYLRGFLARNRYRKILREHKAVIIQKRVRGWLARTHYKRSMHAIIYLQCCFRRMMAKRELKKLKIEARSVERYKKLHIGMENKIMQLQRKVDEQNKDYKCLVEKLTNLEGIYNSETEKLRSDLERLQLSEEEAKVATGRVLSLQEEIAKLRKDLEQTRSEKKCIEEHADRYKQETEQLVSNLKEENTLLKQEKEALNHRIVQQAKEMTETMEKKLVEETKQLELDLNDERLRYQNLLNEFSRLEERYDDLKEEMTLMVHVPKPGHKRTDSTHSSNESEYIFSSEIAEMEDIPSRTEEPSEKKVPLDMSLFLKLQKRVTELEQEKQVMQDELDRKEEQVLRSKAKEEERPQIRGAELEYESLKRQELESENKKLKNELNELRKALSEKSAPEVTAPGAPAYRVLMEQLTSVSEELDVRKEEVLILRSQLVSQKEAIQPKDDKNTMTDSTILLEDVQKMKDKGEIAQAYIGLKETNRLLESQLQSQKRSHENEAEALRGEIQSLKEENNRQQQLLAQNLQLPPEARIEASLQHEITRLTNENLYFEELYADDPKKYQSYRISLYKRMIDLMEQLEKQDKTVRKLKKQLKVFAKKIGELEVGQMENISPGQIIDEPIRPVNIPRKEKDFQGMLEYKKEDEQKLVKNLILELKPRGVAVNLIPGLPAYILFMCVRHADYLNDDQKVRSLLTSTINSIKKVLKKRGDDFETVSFWLSNTCRFLHCLKQYSGEEGFMKHNTSRQNEHCLTNFDLAEYRQVLSDLAIQIYQQLVRVLENILQPMIVSGMLEHETIQGVSGVKPTGLRKRTSSIADEGTYTLDSILRQLNSFHSVMCQHGMDPELIKQVVKQMFYIIGAITLNNLLLRKDMCSWSKGMQIRYNVSQLEEWLRDKNLMNSGAKETLEPLIQAAQLLQVKKKTDDDAEAICSMCNALTTAQIVKVLNLYTPVNEFEERVSVSFIRTIQMRLRDRKDSPQLLMDAKHIFPVTFPFNPSSLALETIQIPASLGLGFISRV

SEQ ID NO: 54386 - protein, 47 aa, Homo sapiens
  Payload ID: 10742
  Gene Symbol: MYO5A
  Gene Name: myosin VA
  ENSP ID: ENSP00000451178
MAASELYTKFARVWIPDPEEVWKSAELLKDYKPGDKVLLLHLEEGKV

SEQ ID NO: 54387 - protein, 231 aa, Homo sapiens
  Payload ID: 10742
  Gene Symbol: MYO5A
  Gene Name: myosin VA
  ENSP ID: ENSP00000458016
RQELESENKKLKNELNELRKALSEKSAPEVTAPGAPAYRVLMEQLTSVSEELDVRKEEVLILRSQLVSQKEAIQPKDDKNTMTDSTILLEDVQKMKDKGEIAQAYIGLKETNRSSALDYHELNEDGELWLVYEGLKQANRLLESQLQSQKRSHENEAEALRGEIQSLKEENNRQQQLLAQNLQLPPEARIEASLQHEITRLTNENLYFEELYADDPKKYQSYRISLYKRMI

SEQ ID NO: 54388 - protein, 1828 aa, Homo sapiens
  Payload ID: 10742
  Gene Symbol: MYO5A
  Gene Name: myosin VA
  ENSP ID: ENSP00000481420
MAASELYTKFARVWIPDPEEVWKSAELLKDYKPGDKVLLLHLEEGKDLEYHLDPKTKELPHLRNPDILVGENDLTALSYLHEPAVLHNLRVRFIDSKLIYTYCGIVLVAINPYEQLPIYGEDIINAYSGQNMGDMDPHIFAVAEEAYKQMARDERNQSIIVSGESGAGKTVSAKYAMRYFATVSGSASEANVEEKVLASNPIMESIGNAKTTRNDNSSRFGKYIEIGFDKRYRIIGANMRTYLLEKSRVVFQAEEERNYHIFYQLCASAKLPEFKMLRLGNADNFNYTKQGGSPVIEGVDDAKEMAHTRQACTLLGISESHQMGIFRILAGILHLGNVGFTSRDADSCTIPPKHEPLCIFCELMGVDYEEMCHWLCHRKLATATETYIKPISKLQATNARDALAKHIYAKLFNWIVDNVNQALHSAVKQHSFIGVLDIYGFETFEINSFEQFCINYANEKLQQQFNMHVFKLEQEEYMKEQIPWTLIDFYDNQPCINLIESKLGILDLLDEECKMPKGTDDTWAQKLYNTHLNKCALFEKPRLSNKAFIIQHFADKVEYQCEGFLEKNKDTVFEEQIKVLKSSKFKMLPELFQDDEKAISPTSATSSGRTPLTRTPAKPTKGRPGQMAKEHKKTVGHQFRNSLHLLMETLNATTPHYVRCIKPNDFKFPFTFDEKRAVQQLRACGVLETIRISAAGFPSRWTYQEFFSRYRVLMKQKDVLSDRKQTCKNVLEKLILDKDKYQFGKTKIFFRAGQVAYLEKLRADKLRAACIRIQKTIRGWLLRKKYLRMRKAAITMQRYVRGYQARCYAKFLRRTKAATIIQKYWRMYVVRRRYKIRRAATIVLQSYLRGFLARNRYRKILREHKAVIIQKRVRGWLARTHYKRSMHAIIYLQCCFRRMMAKRELKKLKIEARSVERYKKLHIGMENKIMQLQRKVDEQNKDYKCLVEKLTNLEGIYNSETEKLRSDLERLQLSEEEAKVATGRVLSLQEEIAKLRKDLEQTRSEKKCIEEHADRYKQETEQLVSNLKEENTLLKQEKEALNHRIVQQAKEMTETMEKKLVEETKQLELDLNDERLRYQNLLNEFSRLEERYDDLKEEMTLMVHVPKPGHKRTDSTHSSNESEYIFSSEIAEMEDIPSRTEEPSEKKVPLDMSLFLKLQKRVTELEQEKQVMQDELDRKEEQVLRSKAKEEERPQIRGAELEYESLKRQELESENKKLKNELNELRKALSEKSAPEVTAPGAPAYRVLMEQLTSVSEELDVRKEEVLILRSQLVSQKEAIQPKDDKNTMTDSTILLEDVQKMKDKGEIAQAYIGLKETNRLLESQLQSQKRSHENEAEALRGEIQSLKEENNRQQQLLAQNLQLPPEARIEASLQHEITRLTNENLDLMEQLEKQDKTVRKLKKQLKVFAKKIGELEVGQMENISPGQIIDEPIRPVNIPRKEKDFQGMLEYKKEDEQKLVKNLILGNKPRGVAVNLIPGLPAYILFMCVRHADYLNDDQKVRSLLTSTINSIKKVLKKRGDDFETVSFWLSNTCRFLHCLKQYSGEEGFMKHNTSRQNEHCLTNFDLAEYRQVLSDLAIQIYQQLVRVLENILQPMIVSGMLEHETIQGVSGVKPTGLRKRTSSIADEGTYTLDSILRQLNSFHSVMCQHGMDPELIKQVVKQMFYIIGAITLNNLLLRKDMCSWSKGMQIRYNVSQLEEWLRDKNLMNSGAKETLEPLIQAAQLLQVKKKTDDDAEAICSMCNALTTAQIVKVLNLYTPVNEFEERVSVSFIRTIQMRLRDRKDSPQLLMDAKHIFPVTFPFNPSSLALETIQIPASLGLGFISRV

SEQ ID NO: 54389 - protein, 1848 aa, Homo sapiens
  Payload ID: 10743
  Gene Symbol: MYO5B
  Gene Name: myosin VB
  Uniprot ID: Q9ULV0
  ENSP ID: ENSP00000285039
MSVGELYSQCTRVWIPDPDEVWRSAELTKDYKEGDKSLQLRLEDETILEYPIDVQRNQLPFLRNPDILVGENDLTALSYLHEPAVLHNLKVRFLESNHIYTYCGIVLVAINPYEQLPIYGQDVIYTYSGQNMGDMDPHIFAVAEEAYKQMARDEKNQSIIVSGESGAGKTVSAKYAMRYFATVGGSASETNIEEKVLASSPIMEAIGNAKTTRNDNSSRFGKYIQIGFDKRYHIIGANMRTYLLEKSRVVFQADDERNYHIFYQLCAAAGLPEFKELALTSAEDFFYTSQGGDTSIEGVDDAEDFEKTRQAFTLLGVKESHQMSIFKIIASILHLGSVAIQAERDGDSCSISPQDVYLSNFCRLLGVEHSQMEHWLCHRKLVTTSETYVKTMSLQQVINARNALAKHIYAQLFGWIVEHINKALHTSLKQHSFIGVLDIYGFETFEVNSFEQFCINYANEKLQQQFNSHVFKLEQEEYMKEQIPWTLIDFYDNQPCIDLIEAKLGILDLLDEECKVPKGTDQNWAQKLYDRHSSSQHFQKPRMSNTAFIIVHFADKVEYLSDGFLEKNRDTVYEEQINILKASKFPLVADLFHDDKDPVPATTPGKGSSSKISVRSARPPMKVSNKEHKKTVGHQFRTSLHLLMETLNATTPHYVRCIKPNDEKLPFHFDPKRAVQQLRACGVLETIRISAAGYPSRWAYHDFFNRYRVLVKKRELANTDKKAICRSVLENLIKDPDKFQFGRTKIFFRAGQVAYLEKLRADKFRTATIMIQKTVRGWLQKVKYHRLKGATLTLQRYCRGHLARRLAEHLRRIRAAVVLQKHYRMQRARQAYQRVRRAAVVIQAFTRAMFVRRTYRQVLMEHKATTIQKHVRGWMARRHFQRLRDAAIVIQCAFRMLKARRELKALRIEARSAEHLKRLNVGMENKVVQLQRKIDEQNKEFKTLSEQLSVTTSTYTMEVERLKKELVHYQQSPGEDTSLRLQEEVESLRTELQRAHSERKILEDAHSREKDELRKRVADLEQENALLKDEKEQLNNQILCQSKDEFAQNSVKENLMKKELEEERSRYQNLVKEYSQLEQRYDNLRDEMTIIKQTPGHRRNPSNQSSLESDSNYPSISTSEIGDTEDALQQVEEIGLEKAAMDMTVFLKLQKRVRELEQERKKLQVQLEKREQQDSKKVQAEPPQTDIDLDPNADLAYNSLKRQELESENKKLKNDLNELRKAVADQATQNNSSHGSPDSYSLLLNQLKLAHEELEVRKEEVLILRTQIVSADQRRLAGRNAEPNINARSSWPNSEKHVDQEDAIEAYHGVCQTNSKTEDWGYLNEDGELGLAYQGLKQVARLLEAQLQAQSLEHEEEVEHLKAQLEALKEEMDKQQQTFCQTLLLSPEAQVEFGVQQEISRLTNENLDLKELVEKLEKNERKLKKQLKIYMKKAQDLEAAQALAQSERKRHELNRQVTVQRKEKDFQGMLEYHKEDEALLIRNLVTDLKPQMLSGTVPCLPAYILYMCIRHADYTNDDLKVHSLLTSTINGIKKVLKKHNDDFEMTSFWLSNTCRLLHCLKQYSGDEGFMTQNTAKQNEHCLKNFDLTEYRQVLSDLSIQIYQQLIKIAEGVLQPMIVSAMLENESIQGLSGVKPTGYRKRSSSMADGDNSYCLEAIIRQMNAFHTVMCDQGLDPEIILQVFKQLFYMINAVTLNNLLLRKDVCSWSTGMQLRYNISQLEEWLRGRNLHQSGAVQTMEPLIQAAQLLQLKKKTQEDAEAICSLCTSLSTQQIVKILNLYTPLNEFEERVTVAFIRTIQAQLQERNDPQQLLLDAKHMFPVLFPFNPSSLTMDSIHIPACLNLEFLNEV

SEQ ID NO: 54390 - protein, 965 aa, Homo sapiens
  Payload ID: 10743
  Gene Symbol: MYO5B
  Gene Name: myosin VB
  ENSP ID: ENSP00000315531
VLMEHKATTIQKHVRGWMARRHFQRLRDAAIVIQCAFRMLKARRELKALRIEARSAEHLKRLNVGMENKVVQLQRKIDEQNKEFKTLSEQLSVTTSTYTMEVERLKKELVHYQQSPGEDTSLRLQEEVESLRTELQRAHSERKILEDAHSREKDELRKRVADLEQENALLKDEKEQLNNQILCQSKDEFAQNSVKENLMKKELEEERSRYQNLVKEYSQLEQRYDNLRDEMTIIKQTPGHRRNPSNQSSLESDSNYPSISTSEIGDTEDALQQVEEIGLEKAAMDMTVFLKLQKRVRELEQERKKLQVQLEKREQQDSKKVQAEPPQTDIDLDPNADLAYNSLKRQELESENKKLKNDLNELRKAVADQATQNNSSHGSPDSYSLLLNQLKLAHEELEVRKEEVLILRTQIVSADQRRLAGRNAEPNINARSSWPNSEKHVDQEDAIEAYHGVCQTNRLLEAQLQAQSLEHEEEVEHLKAQLEALKEEMDKQQQTFCQTLLLSPEAQVEFGVQQEISRLTNENLDLKELVEKLEKNERKLKKQLKIYMKKAQDLEAAQALAQSERKRHELNRQVTVQRKEKDFQGMLEYHKEDEALLIRNLVTDLKPQMLSGTVPCLPAYILYMCIRHADYTNDDLKVHSLLTSTINGIKKVLKKHNDDFEMTSFWLSNTCRLLHCLKQYSGDEGFMTQNTAKQNEHCLKNFDLTEYRQVLSDLSIQIYQQLIKIAEGVLQPMIVSAMLENESIQGLSGVKPTGYRKRSSSMADGDNSYCLEAIIRQMNAFHTVMCDQGLDPEIILQVFKQLFYMINAVTLNNLLLRKDVCSWSTGMQLRYNISQLEEWLRGRNLHQSGAVQTMEPLIQAAQLLQLKKKTQEDAEAICSLCTSLSTQQIVKILNLYTPLNEFEERVTVAFIRTIQAQLQERNDPQQLLLDAKHMFPVLFPFNPSSLTMDSIHIPACLNLEFLNEV

SEQ ID NO: 54391 - protein, 418 aa, Homo sapiens
  Payload ID: 10743
  Gene Symbol: MYO5B
  Gene Name: myosin VB
  Uniprot ID: Q9ULV0
  ENSP ID: ENSP00000466368
MKKAQDLEAAQALAQSERKRHELNRQVTVQRKEKDFQGMLEYHKEDEALLIRNLVTDLKPQMLSGTVPCLPAYILYMCIRHADYTNDDLKVHSLLTSTINGIKKVLKKHNDDFEMTSFWLSNTCRLLHCLKQYSGDEGFMTQNTAKQNEHCLKNFDLTEYRQVLSDLSIQIYQQLIKIAEGVLQPMIVSAMLENESIQGLSGVKPTGYRKRSSSMADGDNSYCLEAIIRQMNAFHTVMCDQGLDPEIILQVFKQLFYMINAVTLNNLLLRKDVCSWSTGMQLRYNISQLEEWLRGRNLHQSGAVQTMEPLIQAAQLLQLKKKTQEDAEAICSLCTSLSTQQIVKILNLYTPLNEFEERVTVAFIRTIQAQLQERNDPQQLLLDAKHMFPVLFPFNPSSLTMDSIHIPACLNLEFLNEV

SEQ ID NO: 54392 - protein, 720 aa, Homo sapiens
  Payload ID: 10743
  Gene Symbol: MYO5B
  Gene Name: myosin VB
  ENSP ID: ENSP00000479038
MHWPVTRECTRVWIPDPDEVWRSAELTKDYKEGDKSLQLRLEDETILEYPIDVQRNQLPFLRNPDILVGENDLTALSYLHEPAVLHNLKVRFLESNHIYTYCGIVLVAINPYEQLPIYGQDVIYTYSGQNMGDMDPHIFAVAEEAYKQMARDEKNQSIIVSGESGAGKTVSAKYAMRYFATVGGSASETNIEEKVLASSPIMEAIGNAKTTRNDNSSRFGKYIQIGFDKRYHIIGANMRTYLLEKSRVVFQADDERNYHIFYQLCAAAGLPEFKELALTSAEDFFYTSQGGDTSIEGVDDAEDFEKTRQAFTLLGVKESHQMSIFKIIASILHLGSVAIQAERDGDSCSISPQDVYLSNFCRLLGVEHSQMEHWLCHRKLVTTSETYVKTMSLQQVINARNALAKHIYAQLFGWIVEHINKALHTSLKQHSFIGVLDIYGFETFEVNSFEQFCINYANEKLQQQFNSHVFKLEQEEYMKEQIPWTLIDFYDNQPCIDLIEAKLGILDLLDEECKVPKGTDQNWAQKLYDRHSSSQHFQKPRMSNTAFIIVHFADKVEYLSDGFLEKNRDTVYEEQINILKASKFPLVADLFHDDKDPVPATTPGKGSSSKISVRSARPPMKVSNKEHKKTVGHQFRTSLSTQQIVKILNLYTPLNEFEERVTVAFIRTIQAQLQERNDPQQLLLDAKHMFPVLFPFNPSSLTMDSIHIPACLNLEFLNEV

SEQ ID NO: 54393 - protein, 1742 aa, Homo sapiens
  Payload ID: 10744
  Gene Symbol: MYO5C
  Gene Name: myosin VC
  Uniprot ID: Q9NQX4
  ENSP ID: ENSP00000261839
MAVAELYTQYNRVWIPDPEEVWKSAEIAKDYRVGDKVLRLLLEDGTELDYSVNPESLPPLRNPDILVGENDLTALSYLHEPAVLHNLRIRFAESKLIYTYSGIILVAMNPYKQLPIYGDAIIHAYSGQNMGDMDPHIFAVAEEAYKQMARNNRNQSIIVSGESGAGKTVSARYAMRYFATVSKSGSNAHVEDKVLASNPITEAVGNAKTTRNDNSSRFGKYTEISFDEQNQIIGANMSTYLLEKSRVVFQSENERNYHIFYQLCASAQQSEFKHLKLGSAEEFNYTRMGGNTVIEGVNDRAEMVETQKTFTLLGFKEDFQMDVFKILAAILHLGNVQITAVGNERSSVSEDDSHLKVFCELLGLESGRVAQWLCNRKIVTSSETVVKPMTRPQAVNARDALAKKIYAHLFDFIVERINQALQFSGKQHTFIGVLDIYGFETFDVNSFEQFCINYANEKLQQQFNMHVFKLEQEEYMKEDIPWTLIDFYDNQPVIDLIEAKMGILELLDEECLLPHGTDENWLQKLYNNFVNRNPLFEKPRMSNTSFVIQHFADKVEYKCEGFLEKNRDTVYDMLVEILRASKFHLCANFFQENPTPPSPFGSMITVKSAKQVIKPNSKHFRTTVGSKFRSSLYLLMETLNATTPHYVRCIKPNDEKLPFEFDSKRIVQQLRACGVLETIRISAQSYPSRWTYIEFYSRYGILMTKQELSFSDKKEVCKVVLHRLIQDSNQYQFGKTKIFFRAGQVAYLEKLRLDKLRQSCVMVQKHMRGWLQRKKFLRERRAALIIQQYFRGQQTVRKAITAVALKEAWAAIIIQKHCRGYLVRSLYQLIRMATITMQAYSRGFLARRRYRKMLEEHKAVILQKYARAWLARRRFQSIRRFVLNIQLTYRVQRLQKKLEDQNKENHGLVEKLTSLAALRAGDVEKIQKLEAELEKAATHRRNYEEKGKRYRDAVEEKLAKLQKHNSELETQKEQIQLKLQEKTEELKEKMDNLTKQLFDDVQKEERQRMLLEKSFELKTQDYEKQIQSLKEEIKALKDEKMQLQHLVEGEHVTSDGLKAEVARLSKQVKTISEFEKEIELLQAQKIDVEKHVQSQKREMREKMSEITKQLLESYDIEDVRSRLSVEDLEHLNEDGELWFAYEGLKKATRVLESHFQSQKDCYEKEIEALNFKVVHLSQEINHLQKLFREENDINESIRHEVTRLTSENMMIPDFKQQISELEKQKQDLEIRLNEQAEKMKGKLEELSNQLHRSQEEEGTQRKALEAQNEIHTKEKEKLIDKIQEMQEASDHLKKQFETESEVKCNFRQEASRLTLENRDLEEELDMKDRVIKKLQDQVKTLSKTIGKANDVHSSSGPKEYLGMLQYKREDEAKLIQNLILDLKPRGVVVNMIPGLPAHILFMCVRYADSLNDANMLKSLMNSTINGIKQVVKEHLEDFEMLSFWLSNTCHFLNCLKQYSGEEEFMKHNSPQQNKNCLNNFDLSEYRQILSDVAIRIYHQFIIIMEKNIQPIIVPGMLEYESLQGISGLKPTGFRKRSSSIDDTDGYTMTSVLQQLSYFYTTMCQNGLDPELVRQAVKQLFFLIGAVTLNSLFLRKDMCSCRKGMQIRCNISYLEEWLKDKNLQNSLAKETLEPLSQAAWLLQVKKTTDSDAKEIYERCTSLSAVQIIKILNSYTPIDDFEKRVTPSFVRKVQALLNSREDSSQLMLDTKYLFQVTFPFTPSPHALEMIQIPSSFKLGFLNRL

SEQ ID NO: 54394 - protein, 106 aa, Homo sapiens
  Payload ID: 10744
  Gene Symbol: MYO5C
  Gene Name: myosin VC
  ENSP ID: ENSP00000453514
MNPYKQLPIYGDAIIHAYSGQNMGDMDPHIFAVAEEAYKQMARNNRNQSIIVSGESGAGKTVSARYAMRYFATVSKSGSNAHVEDKVLASNPITEAVGNAKTTRND

SEQ ID NO: 54395 - protein, 153 aa, Homo sapiens
  Payload ID: 10744
  Gene Symbol: MYO5C
  Gene Name: myosin VC
  ENSP ID: ENSP00000453517
MAVAELYTQYNRVWIPDPEEVWKSAEIAKDYRVGDKVLRLLLEDGTELDYSVNPESLPPLRNPDILVGENDLTALSYLHEPAVLHNLRIRFAESKLIYTYSGIILVAMNPYKQLPIYGDAIIHAYSGQNMGDMDPHIFAVAEEAYKQMARWEI

SEQ ID NO: 54396 - protein, 269 aa, Homo sapiens
  Payload ID: 10744
  Gene Symbol: MYO5C
  Gene Name: myosin VC
  ENSP ID: ENSP00000453641
MAVAELYTQYNRVWIPDPEEVWKSAEIAKDYRVGDKVLRLLLEDGTELDYSVNPESLPPLRNPDILVGENDLTALSYLHEPAVLHNLRIRFAESKLIYTYSGIILVAMNPYKQLPIYGDAIIHAYSGQNMGDMDPHIFAVAEEAYKQMARNNRNQSIIVSGESGAGKTVSARYAMRYFATVSKSGSNAHVEDKVLASNPITEAVGNAKTTRNDNSSRFGKYTEISFDEQNQIIGANMSTYLLEKSRVVFQGVPKNLIIQEWEAILSLRV

SEQ ID NO: 54397 - protein, 430 aa, Homo sapiens
  Payload ID: 10744
  Gene Symbol: MYO5C
  Gene Name: myosin VC
  Uniprot ID: Q9NQX4
  ENSP ID: ENSP00000454064
MAVAELYTQYNRVWIPDPEEVWKSAEIAKDYRVGDKVLRLLLEDGTELDYSVNPESLPPLRNPDILVGENDLTALSYLHEPAVLHNLRIRFAESKLIYTYSGIILVAMNPYKQLPIYGDAIIHAYSGQNMGDMDPHIFAVAEEAYKQMARNNRNQSIIVSGESGAGKTVSARYAMRYFATVSKSGSNAHVEDKVLASNPITEAVGNAKTTRNDNSSRFGKYTEISFDEQNQIIGANMSTYLLEKSRVVFQSENERNYHIFYQLCASAQQSEFKHLKLGSAEEFNYTRMGGNTVIEGVNDRAEMVETQKTFTLLGFKEDFQMDVFKILAAILHLGNVQITAVGNERSSVSEDDSHLKVFCELLGLESGRVAQWLCNRKIVTSSETVVKPMTRPQAVNARDALAKKIYAHLFDFIVERINQALQFSVLKPLM

SEQ ID NO: 54398 - protein, 1253 aa, Homo sapiens
  Payload ID: 10745
  Gene Symbol: MYO6
  Gene Name: myosin VI
  ENSP ID: ENSP00000358992
MEDGKPVWAPHPTDGFQMGNIVDIGPDSLTIEPLNQKGKTFLALINQVFPAEEDSKKDVEDNCSLMYLNEATLLHNIKVRYSKDRIYTYVANILIAVNPYFDIPKIYSSEAIKSYQGKSLGTRPPHVFAIADKAFRDMKVLKMSQSIIVSGESGAGKTENTKFVLRYLTESYGTGQDIDDRIVEANPLLEAFGNAKTVRNNNSSRFGKFVEIHFNEKSSVVGGFVSHYLLEKSRICVQGKEERNYHIFYRLCAGASEDIREKLHLSSPDNFRYLNRGCTRYFANKETDKQILQNRKSPEYLKAGSMKDPLLDDHGDFIRMCTAMKKIGLDDEEKLDLFRVVAGVLHLGNIDFEEAGSTSGGCNLKNKSAQSLEYCAELLGLDQDDLRVSLTTRVMLTTAGGTKGTVIKVPLKVEQANNARDALAKTVYSHLFDHVVNRVNQCFPFETSSYFIGVLDIAGFEYFEHNSFEQFCINYCNEKLQQFFNERILKEEQELYQKEGLGVNEVHYVDNQDCIDLIEAKLVGILDILDEENRLPQPSDQHFTSAVHQKHKDHFRLTIPRKSKLAVHRNIRDDEGFIIRHFAGAVCYETTQFVEKNNDALHMSLESLICESRDKFIRELFESSTNNNKDTKQKAGKLSFISVGNKFKTQLNLLLDKLRSTGASFIRCIKPNLKMTSHHFEGAQILSQLQCSGMVSVLDLMQGGYPSRASFHELYNMYKKYMPDKLARLDPRLFCKALFKALGLNENDYKFGLTKVFFRPGKFAEFDQIMKSDPDHLAELVKRVNHWLTCSRWKKVQWCSLSVIKLKNKIKYRAEACIKMQKTIRMWLCKRRHKPRIDGLVKVGTLKKRLDKFNEVVSVLKDGKPEMNKQIKNLEISIDTLMAKIKSTMMTQEQIQKEYDALVKSSEELLSALQKKKQQEEEAERLRRIQEEMEKERKRREEDEKRRRKEEEERRMKLEMEAKRKQEEEERKKREDDEKRIQAEVEAQLARQKEEESQQQAVLEQERRDRELALRIAQSEAELISDEAQADLALRRGPAVLATKAAAGTKKYDLSKWKYAELRDTINTSCDIELLAACREEFHRRLKVYHAWKSKNKKRNTETEQRAPKSVTDYAQQNPAAQIPARQREIEMNRQQRFFRIPFIRPADQYKDPQSKKKGWWYAHFDGPWIARQMELHPDKPPILLVAGKDDMEMCELNLEETGLTRKRGAEILPRQFEEIWERCGGIQYLQNAIESRQARPTYATAMLQSLLK

SEQ ID NO: 54399 - protein, 1285 aa, Homo sapiens
  Payload ID: 10745
  Gene Symbol: MYO6
  Gene Name: myosin VI
  Uniprot ID: Q9UM54
  ENSP ID: ENSP00000358994
MEDGKPVWAPHPTDGFQMGNIVDIGPDSLTIEPLNQKGKTFLALINQVFPAEEDSKKDVEDNCSLMYLNEATLLHNIKVRYSKDRIYTYVANILIAVNPYFDIPKIYSSEAIKSYQGKSLGTRPPHVFAIADKAFRDMKVLKMSQSIIVSGESGAGKTENTKFVLRYLTESYGTGQDIDDRIVEANPLLEAFGNAKTVRNNNSSRFGKFVEIHFNEKSSVVGGFVSHYLLEKSRICVQGKEERNYHIFYRLCAGASEDIREKLHLSSPDNFRYLNRGCTRYFANKETDKQILQNRKSPEYLKAGSMKDPLLDDHGDFIRMCTAMKKIGLDDEEKLDLFRVVAGVLHLGNIDFEEAGSTSGGCNLKNKSAQSLEYCAELLGLDQDDLRVSLTTRVMLTTAGGTKGTVIKVPLKVEQANNARDALAKTVYSHLFDHVVNRVNQCFPFETSSYFIGVLDIAGFEYFEHNSFEQFCINYCNEKLQQFFNERILKEEQELYQKEGLGVNEVHYVDNQDCIDLIEAKLVGILDILDEENRLPQPSDQHFTSAVHQKHKDHFRLTIPRKSKLAVHRNIRDDEGFIIRHFAGAVCYETTQFVEKNNDALHMSLESLICESRDKFIRELFESSTNNNKDTKQKAGKLSFISVGNKFKTQLNLLLDKLRSTGASFIRCIKPNLKMTSHHFEGAQILSQLQCSGMVSVLDLMQGGYPSRASFHELYNMYKKYMPDKLARLDPRLFCKALFKALGLNENDYKFGLTKVFFRPGKFAEFDQIMKSDPDHLAELVKRVNHWLTCSRWKKVQWCSLSVIKLKNKIKYRAEACIKMQKTIRMWLCKRRHKPRIDGLVKVGTLKKRLDKFNEVVSVLKDGKPEMNKQIKNLEISIDTLMAKIKSTMMTQEQIQKEYDALVKSSEELLSALQKKKQQEEEAERLRRIQEEMEKERKRREEDEKRRRKEEEERRMKLEMEAKRKQEEEERKKREDDEKRIQAEVEAQLARQKEEESQQQAVLEQERRDRELALRIAQSEAELISDEAQADLALRRNDGTRPKMTPEQMAKEMSEFLSRGPAVLATKAAAGTKKYDLSKWKYAELRDTINTSCDIELLAACREEFHRRLKVYHAWKSKNKKRNTETEQRAPKSVTDYDFAPFLNNSPQQNPAAQIPARQREIEMNRQQRFFRIPFIRPADQYKDPQSKKKGWWYAHFDGPWIARQMELHPDKPPILLVAGKDDMEMCELNLEETGLTRKRGAEILPRQFEEIWERCGGIQYLQNAIESRQARPTYATAMLQSLLK

SEQ ID NO: 54400 - protein, 1295 aa, Homo sapiens [sequence omitted]

SEQ ID NO: 54401 - protein, 1262 aa, Homo sapiens
  Payload ID: 10745
  Gene Symbol: MYO6
  Gene Name: myosin VI
  Uniprot ID: Q9UM54
  ENSP ID: ENSP00000359002
MEDGKPVWAPHPTDGFQMGNIVDIGPDSLTIEPLNQKGKTFLALINQVFPAEEDSKKDVEDNCSLMYLNEATLLHNIKVRYSKDRIYTYVANILIAVNPYFDIPKIYSSEAIKSYQGKSLGTRPPHVFAIADKAFRDMKVLKMSQSIIVSGESGAGKTENTKFVLRYLTESYGTGQDIDDRIVEANPLLEAFGNAKTVRNNNSSRFGKFVEIHFNEKSSVVGGFVSHYLLEKSRICVQGKEERNYHIFYRLCAGASEDIREKLHLSSPDNFRYLNRGCTRYFANKETDKQILQNRKSPEYLKAGSMKDPLLDDHGDFIRMCTAMKKIGLDDEEKLDLFRVVAGVLHLGNIDFEEAGSTSGGCNLKNKSAQSLEYCAELLGLDQDDLRVSLTTRVMLTTAGGTKGTVIKVPLKVEQANNARDALAKTVYSHLFDHVVNRVNQCFPFETSSYFIGVLDIAGFEYFEHNSFEQFCINYCNEKLQQFFNERILKEEQELYQKEGLGVNEVHYVDNQDCIDLIEAKLVGILDILDEENRLPQPSDQHFTSAVHQKHKDHFRLTIPRKSKLAVHRNIRDDEGFIIRHFAGAVCYETTQFVEKNNDALHMSLESLICESRDKFIRELFESSTNNNKDTKQKAGKLSFISVGNKFKTQLNLLLDKLRSTGASFIRCIKPNLKMTSHHFEGAQILSQLQCSGMVSVLDLMQGGYPSRASFHELYNMYKKYMPDKLARLDPRLFCKALFKALGLNENDYKFGLTKVFFRPGKFAEFDQIMKSDPDHLAELVKRVNHWLTCSRWKKVQWCSLSVIKLKNKIKYRAEACIKMQKTIRMWLCKRRHKPRIDGLVKVGTLKKRLDKFNEVVSVLKDGKPEMNKQIKNLEISIDTLMAKIKSTMMTQEQIQKEYDALVKSSEELLSALQKKKQQEEEAERLRRIQEEMEKERKRREEDEKRRRKEEEERRMKLEMEAKRKQEEEERKKREDDEKRIQAEVEAQLARQKEEESQQQAVLEQERRDRELALRIAQSEAELISDEAQADLALRRGPAVLATKAAAGTKKYDLSKWKYAELRDTINTSCDIELLAACREEFHRRLKVYHAWKSKNKKRNTETEQRAPKSVTDYDFAPFLNNSPQQNPAAQIPARQREIEMNRQQRFFRIPFIRPADQYKDPQSKKKGWWYAHFDGPWIARQMELHPDKPPILLVAGKDDMEMCELNLEETGLTRKRGAEILPRQFEEIWERCGGIQYLQNAIESRQARPTYATAMLQSLLK

SEQ ID NO: 54402 - protein, 174 aa, Homo sapiens
  Payload ID: 10745
  Gene Symbol: MYO6
  Gene Name: myosin VI
  ENSP ID: ENSP00000399406
KRREEDEKRRRKEEEERRMKLEMEAKRKQEEEERKKREDDEKRIQAEVEAQLARQKEEESQQQAVLEQERRDRELALRIAQSEAELISDEAQADLALRSLDSYPVTSKNDGTRPKMTPGPAVLATKAAAGTKKYDLSKWKYAELRDTINTSCDIELLAACREEFHRRLKVYHAW

SEQ ID NO: 54403 - protein, 1262 aa, Homo sapiens; identical to SEQ ID NO: 54401
  Payload ID: 10745
  Gene Symbol: MYO6
  Gene Name: myosin VI
  Uniprot ID: Q9UM54
  ENSP ID: ENSP00000478013

SEQ ID NO: 54404 - protein, 1294 aa, Homo sapiens
  Payload ID: 10745
  Gene Symbol: MYO6
  Gene Name: myosin VI
  ENSP ID: ENSP00000487348
MEDGKPVWAPHPTDGFQMGNIVDIGPDSLTIEPLNQKGKTFLALINQVFPAEEDSKKDVEDNCSLMYLNEATLLHNIKVRYSKDRIYTYVANILIAVNPYFDIPKIYSSEAIKSYQGKSLGTRPPHVFAIADKAFRDMKVLKMSQSIIVSGESGAGKTENTKFVLRYLTESYGTGQDIDDRIVEANPLLEAFGNAKTVRNNNSSRFGKFVEIHFNEKSSVVGGFVSHYLLEKSRICVQGKEERNYHIFYRLCAGASEDIREKLHLSSPDNFRYLNRGCTRYFANKETDKQILQNRKSPEYLKAGSMKDPLLDDHGDFIRMCTAMKKIGLDDEEKLDLFRVVAGVLHLGNIDFEEAGSTSGGCNLKNKSAQSLEYCAELLGLDQDDLRVSLTTRVMLTTAGGTKGTVIKVPLKVEQANNARDALAKTVYSHLFDHVVNRVNQCFPFETSSYFIGVLDIAGFEYFEHNSFEQFCINYCNEKLQQFFNERILKEEQELYQKEGLGVNEVHYVDNQDCIDLIEAKLVGILDILDEENRLPQPSDQHFTSAVHQKHKDHFRLTIPRKSKLAVHRNIRDDEGFIIRHFAGAVCYETTQFVEKNNDALHMSLESLICESRDKFIRELFESSTNNNKDTKQKAGKLSFISVGNKFKTQLNLLLDKLRSTGASFIRCIKPNLKMTSHHFEGAQILSQLQCSGMVSVLDLMQGGYPSRASFHELYNMYKKYMPDKLARLDPRLFCKALFKALGLNENDYKFGLTKVFFRPGKFAEFDQIMKSDPDHLAELVKRVNHWLTCSRWKKVQWCSLSVIKLKNKIKYRAEACIKMQKTIRMWLCKRRHKPRIDGLVKVGTLKKRLDKFNEVVSVLKDGKPEMNKQIKNLEISIDTLMAKIKSTMMTQEQIQKEYDALVKSSEELLSALQKKKQQEEEAERLRRIQEEMEKERKRREEDEKRRRKEEEERRMKLEMEAKRKQEEEERKKREDDEKRIQAEVEAQLARQKEEESQQQAVLEQERRDRELALRIAQSEAELISDEAQADLALRSLDSYPVTSKNDGTRPKMTPEQMAKEMSEFLSRGPAVLATKAAAGTKKYDLSKWKYAELRDTINTSCDIELLAACREEFHRRLKVYHAWKSKNKKRNTETEQRAPKSVTDYDFAPFLNNSPQQNPAAQIPARQREIEMNRQQRFFRIPFIRPADQYKDPQSKKKGWWYAHFDGPWIARQMELHPDKPPILLVAGKDDMEMCELNLEETGLTRKRGAEILPRQFEEIWERCGGIQYLQNAIESRQARPTYATAMLQSLLK

SEQ ID NO: 54405 - protein, 2215 aa, Homo sapiens
  Payload ID: 10746
  Gene Symbol: MYO7A
  Gene Name: myosin VIIA
  Uniprot ID: Q13402
  ENSP ID: ENSP00000386331
MVILQQGDHVWMDLRLGQEFDVPIGAVVKLCDSGQVQVVDDEDNEHWISPQNATHIKPMHPTSVHGVEDMIRLGDLNEAGILRNLLIRYRDHLIYTYTGSILVAVNPYQLLSIYSPEHIRQYTNKKIGEMPPHIFAIADNCYFNMKRNSRDQCCIISGESGAGKTESTKLILQFLAAISGQHSWIEQQVLEATPILEAFGNAKTIRNDNSSRFGKYIDIHFNKRGAIEGAKIEQYLLEKSRVCRQALDERNYHVFYCMLEGMSEDQKKKLGLGQASDYNYLAMGNCITCEGRVDSQEYANIRSAMKVLMFTDTENWEISKLLAAILHLGNLQYEARTFENLDACEVLFSPSLATAASLLEVNPPDLMSCLTSRTLITRGETVSTPLSREQALDVRDAFVKGIYGRLFVWIVDKINAAIYKPPSQDVKNSRRSIGLLDIFGFENFAVNSFEQLCINFANEHLQQFFVRHVFKLEQEEYDLESIDWLHIEFTDNQDALDMIANKPMNIISLIDEESKFPKGTDTTMLHKLNSQHKLNANYIPPKNNHETQFGINHFAGIVYYETQGFLEKNRDTLHGDIIQLVHSSRNKFIKQIFQADVAMGAETRKRSPTLSSQFKRSLELLMRTLGACQPFFVRCIKPNEFKKPMLFDRHLCVRQLRYSGMMETIRIRRAGYPIRYSFVEFVERYRVLLPGVKPAYKQGDLRGTCQRMAEAVLGTHDDWQIGKTKIFLKDHHDMLLEVERDKAITDRVILLQKVIRGFKDRSNFLKLKNAATLIQRHWRGHNCRKNYGLMRLGFLRLQALHRSRKLHQQYRLARQRIIQFQARCRAYLVRKAFRHRLWAVLTVQAYARGMIARRLHQRLRAEYLWRLEAEKMRLAEEEKLRKEMSAKKAKEEAERKHQERLAQLAREDAERELKEKEAARRKKELLEQMERARHEPVNHSDMVDKMFGFLGTSGGLPGQEGQAPSGFEDLERGRREMVEEDLDAALPLPDEDEEDLSEYKFAKFAATYFQGTTTHSYTRRPLKQPLLYHDDEGDQLAALAVWITILRFMGDLPEPKYHTAMSDGSEKIPVMTKIYETLGKKTYKRELQALQGEGEAQLPEGQKKSSVRHKLVHLTLKKKSKLTEEVTKRLHDGESTVQGNSMLEDRPTSNLEKLHFIIGNGILRPALRDEIYCQISKQLTHNPSKSSYARGWILVSLCVGCFAPSEKFVKYLRNFIHGGPPGYAPYCEERLRRTFVNGTRTQPPSWLELQATKSKKPIMLPVTFMDGTTKTLLTDSATTAKELCNALADKISLKDRFGFSLYIALFDKVSSLGSGSDHVMDAISQCEQYAKEQGAQERNAPWRLFFRKEVFTPWHSPSEDNVATNLIYQQVVRGVKFGEYRCEKEDDLAELASQQYFVDYGSEMILERLLNLVPTYIPDREITPLKTLEKWAQLAIAAHKKGIYAQRRTDAQKVKEDVVSYARFKWPLLFSRFYEAYKFSGPSLPKNDVIVAVNWTGVYFVDEQEQVLLELSFPEIMAVSSSRECRVWLSLGCSDLGCAAPHSGWAGLTPAGPCSPCWSCRGAKTTAPSFTLATIKGDEYTFTSSNAEDIRDLVVTFLEGLRKRSKYVVALQDNPNPAGEESGFLSFAKGDLIILDHDTGEQVMNSGWANGINERTKQRGDFPTDSVYVMPTVTMPPREIVALVTMTPDQRQDVVRLLQLRTAEPEVRAKPYTLEEFSYDYFRPPPKHTLSRVMVSKARGKDRLWSHTREPLKQALLKKLLGSEELSQEACLAFIAVLKYMGDYPSKRTRSVNELTDQIFEGPLKAEPLKDEAYVQILKQLTDNHIRYSEERGWELLWLCTGLFPPSNILLPHVQRFLQSRKHCPLAIDCLQRLQKALRNGSRKYPPHLVEVEAIQHKTTQIFHKVYFPDDTDEAFEVESSTKAKDFCQNIATRLLLKSSEGFSLFVKIADKVLSVPENDFFFDFVRHLTDWIKKARPIKDGIVPSLTYQVFFMKKLWTTTVPGKDPMADSIFHYYQELPKYLRGYHKCTREEVLQLGALIYRVKFEEDKSYFPSIPKLLRELVPQDLIRQVSPDDWKRSIVAYFNKHAGKSKEEAKLAFLKLIFKWPTFGSAFFEVKQTTEPNFPEILLIAINKYGVSLIDPKTKDILTTHPFTKISNWSSGNTYFHITIGNLVRGSKLLCETSLGYKMDDLLTSYISQMLTAMSKQRGSRSGK

SEQ ID NO: 54406 - protein, 2166 aa, Homo sapiens
  Payload ID: 10746
  Gene Symbol: MYO7A
  Gene Name: myosin VIIA
  Uniprot ID: Q13402
  ENSP ID: ENSP00000386635
MDLRLGQEFDVPIGAVVKLCDSGQVQVVDDEDNEHWISPQNATHIKPMHPTSVHGVEDMIRLGDLNEAGILRNLLIRYRDHLIYTYTGSILVAVNPYQLLSIYSPEHIRQYTNKKIGEMPPHIFAIADNCYFNMKRNSRDQCCIISGESGAGKTESTKLILQFLAAISGQHSWIEQQVLEATPILEAFGNAKTIRNDNSSRFGKYIDIHFNKRGAIEGAKIEQYLLEKSRVCRQALDERNYHVFYCMLEGMSEDQKKKLGLGQASDYNYLAMGNCITCEGRVDSQEYANIRSAMKVLMFTDTENWEISKLLAAILHLGNLQYEARTFENLDACEVLFSPSLATAASLLEVNPPDLMSCLTSRTLITRGETVSTPLSREQALDVRDAFVKGIYGRLFVWIVDKINAAIYKPPSQDVKNSRRSIGLLDIFGFENFAVNSFEQLCINFANEHLQQFFVRHVFKLEQEEYDLESIDWLHIEFTDNQDALDMIANKPMNIISLIDEESKFPKGTDTTMLHKLNSQHKLNANYIPPKNNHETQFGINHFAGIVYYETQGFLEKNRDTLHGDIIQLVHSSRNKFIKQIFQADVAMGAETRKRSPTLSSQFKRSLELLMRTLGACQPFFVRCIKPNEFKKPMLFDRHLCVRQLRYSGMMETIRIRRAGYPIRYSFVEFVERYRVLLPGVKPAYKQGDLRGTCQRMAEAVLGTHDDWQIGKTKIFLKDHHDMLLEVERDKAITDRVILLQKVIRGFKDRSNFLKLKNAATLIQRHWRGHNCRKNYGLMRLGFLRLQALHRSRKLHQQYRLARQRIIQFQARCRAYLVRKAFRHRLWAVLTVQAYARGMIARRLHQRLRAEYLWRLEAEKMRLAEEEKLRKEMSAKKAKEEAERKHQERLAQLAREDAERELKEKEAARRKKELLEQMERARHEPVNHSDMVDKMFGFLGTSGGLPGQEGQAPSGFEDLERGRREMVEEDLDAALPLPDEDEEDLSEYKFAKFAATYFQGTTTHSYTRRPLKQPLLYHDDEGDQLAALAVWITILRFMGDLPEPKYHTAMSDGSEKIPVMTKIYETLGKKTYKRELQALQGEGEAQLPEGQKKSSVRHKLVHLTLKKKSKLTEEVTKRLHDGESTVQGNSMLEDRPTSNLEKLHFIIGNGILRPALRDEIYCQISKQLTHNPSKSSYARGWILVSLCVGCFAPSEKFVKYLRNFIHGGPPGYAPYCEERLRRTFVNGTRTQPPSWLELQATKSKKPIMLPVTFMDGTTKTLLTDSATTAKELCNALADKISLKDRFGFSLYIALFDKVSSLGSGSDHVMDAISQCEQYAKEQGAQERNAPWRLFFRKEVFTPWHSPSEDNVATNLIYQQVVRGVKFGEYRCEKEDDLAELASQQYFVDYGSEMILERLLNLVPTYIPDREITPLKTLEKWAQLAIAAHKKGIYAQRRTDAQKVKEDVVSYARFKWPLLFSRFYEAYKFSGPSLPKNDVIVAVNWTGVYFVDEQEQVLLELSFPEIMAVSSSRGAKTTAPSFTLATIKGDEYTFTSSNAEDIRDLVVTFLEGLRKRSKYVVALQDNPNPAGEESGFLSFAKGDLIILDHDTGEQVMNSGWANGINERTKQRGDFPTDSVYVMPTVTMPPREIVALVTMTPDQRQDVVRLLQLRTAEPEVRAKPYTLEEFSYDYFRPPPKHTLSRVMVSKARGKDRLWSHTREPLKQALLKKLLGSEELSQEACLAFIAVLKYMGDYPSKRTRSVNELTDQIFEGPLKAEPLKDEAYVQILKQLTDNHIRYSEERGWELLWLCTGLFPPSNILLPHVQRFLQSRKHCPLAIDCLQRLQKALRNGSRKYPPHLVEVEAIQHKTTQIFHKVYFPDDTDEAFEVESSTKAKDFCQNIATRLLLKSSEGFSLFVKIADKVLSVPENDFFFDFVRHLTDWIKKARPIKDGIVPSLTYQVFFMKKLWTTTVPGKDPMADSIFHYYQELPKYLRGYHKCTREEVLQLGALIYRVKFEEDKSYFPSIPKLLRELVPQDLIRQVSPDDWKRSIVAYFNKHAGKSKEEAKLAFLKLIFKWPTFGSAFFEVKQTTEPNFPEILLIAINKYGVSLIDPKTKDILTTHPFTKISNWSSGNTYFHITIGNLVRGSKLLCETSLGYKMDDLLTSYISQMLTAMSKQRGSRSGK

SEQ ID NO: 54407 - protein, 1178 aa, Homo sapiens
  Payload ID: 10746
  Gene Symbol: MYO7A
  Gene Name: myosin VIIA
  ENSP ID: ENSP00000386689
MVILQQGDHVWMDLRLGQEFDVPIGAVVKLCDSGQVQVVDDEDNEHWISPQNATHIKPMHPTSVHGVEDMIRLGDLNEAGILRNLLIRYRDHLIYTYTGSILVAVNPYQLLSIYSPEHIRQYTNKKIGEMPPHIFAIADNCYFNMKRNSRDQCCIISGESGAGKTESTKLILQFLAAISGQHSWIEQQVLEATPILEAFGNAKTIRNDNSSRFGKYIDIHFNKRGAIEGAKIEQYLLEKSRVCRQALDERNYHVFYCMLEGMSEDQKKKLGLGQASDYNYLAMGNCITCEGRVDSQEYANIRSAMKVLMFTDTENWEISKLLAAILHLGNLQYEARTFENLDACEVLFSPSLATAASLLEVNPPDLMSCLTSRTLITRGETVSTPLSREQALDVRDAFVKGIYGRLFVWIVDKINAAIYKPPSQDVKNSRRSIGLLDIFGFENFAVNSFEQLCINFANEHLQQFFVRHVFKLEQEEYDLESIDWLHIEFTDNQDALDMIANKPMNIISLIDEESKFPKGTDTTMLHKLNSQHKLNANYIPPKNNHETQFGINHFAGIVYYETQGFLEKNRDTLHGDIIQLVHSSRNKFIKQIFQADVAMGAETRKRSPTLSSQFKRSLELLMRTLGACQPFFVRCIKPNEFKKPMLFDRHLCVRQLRYSGMMETIRIRRAGYPIRYSFVEFVERYRVLLPGVKPAYKQGDLRGTCQRMAEAVLGTHDDWQIGKTKIFLKDHHDMLLEVERDKAITDRVILLQKVIRGFKDRSNFLKLKNAATLIQRHWRGHNCRKNYGLMRLGFLRLQALHRSRKLHQQYRLARQRIIQFQARCRAYLVRKAFRHRLWAVLTVQAYARGMIARRLHQRLRAEYLWRLEAEKMRLAEEEKLRKEMSAKKAKEEAERKHQERLAQLAREDAERELKEKEAARRKKELLEQMERARHEPVNHSDMVDKMFGFLGTSGGLPGQEGQAPSGFEDLERGRREMVEEDLDAALPLPDEDEEDLSEYKFAKFAATYFQGTTTHSYTRRPLKQPLLYHDDEGDQLAALAVWITILRFMGDLPEPKYHTAMSDGSEKIPVMTKIYETLGKKTYKRELQALQGEGEAQLPEGQKKSSVRHKLVHLTLKKKSKLTEEVTKRLHDGESTVQGNSMLEDRPTSNLEKLHFIIGNGILRPALRSVPGGGDTRA

SEQ ID NO: 54408 - protein, 2175 aa, Homo sapiens
  Payload ID: 10746
  Gene Symbol: MYO7A
  Gene Name: myosin VIIA
  Uniprot ID: Q13402
  ENSP ID: ENSP00000392185
MVILQQGDHVWMDLRLGQEFDVPIGAVVKLCDSGQVQVVDDEDNEHWISPQNATHIKPMHPTSVHGVEDMIRLGDLNEAGILRNLLIRYRDHLIYTYTGSILVAVNPYQLLSIYSPEHIRQYTNKKIGEMPPHIFAIADNCYFNMKRNSRDQCCIISGESGAGKTESTKLILQFLAAISGQHSWIEQQVLEATPILEAFGNAKTIRNDNSSRFGKYIDIHFNKRGAIEGAKIEQYLLEKSRVCRQALDERNYHVFYCMLEGMSEDQKKKLGLGQASDYNYLAMGNCITCEGRVDSQEYANIRSAMKVLMFTDTENWEISKLLAAILHLGNLQYEARTFENLDACEVLFSPSLATAASLLEVNPPDLMSCLTSRTLITRGETVSTPLSREQALDVRDAFVKGIYGRLFVWIVDKINAAIYKPPSQDVKNSRRSIGLLDIFGFENFAVNSFEQLCINFANEHLQQFFVRHVFKLEQEEYDLESIDWLHIEFTDNQDALDMIANKPMNIISLIDEESKFPKGTDTTMLHKLNSQHKLNANYIPPKNNHETQFGINHFAGIVYYETQGFLEKNRDTLHGDIIQLVHSSRNKFIKQIFQADVAMGAETRKRSPTLSSQFKRSLELLMRTLGACQPFFVRCIKPNEFKKPMLFDRHLCVRQLRYSGMMETIRIRRAGYPIRYSFVEFVERYRVLLPGVKPAYKQGDLRGTCQRMAEAVLGTHDDWQIGKTKIFLKDHHDMLLEVERDKAITDRVILLQKVIRGFKDRSNFLKLKNAATLIQRHWRGHNCRKNYGLMRLGFLRLQALHRSRKLHQQYRLARQRIIQFQARCRAYLVRKAFRHRLWAVLTVQAYARGMIARRLHQRLRAEYLWRLEAEKMRLAEEEKLRKEMSAKKAKEEAERKHQERLAQLAREDAERELKEKEAARRKKELLEQMERARHEPVNHSDMVDKMFGFLGTSGGLPGQEGQAPSGFEDLERGRREMVEEDLDAALPLPDEDEEDLSEYKFAKFAATYFQGTTTHSYTRRPLKQPLLYHDDEGDQLAALAVWITILRFMGDLPEPKYHTAMSDGSEKIPVMTKIYETLGKKTYKRELQALQGEGEAQLPEGQKKSSVRHKLVHLTLKKKSKLTEEVTKRLHDGESTVQGNSMLEDRPTSNLEKLHFIIGNGILRPALRDEIYCQISKQLTHNPSKSSYARGWILVSLCVGCFAPSEKFVKYLRNFIHGGPPGYAPYCEERLRRTFVNGTRTQPPSWLELQATKSKKPIMLPVTFMDGTTKTLLTDSATTAKELCNALADKISLKDRFGFSLYIALFDKVSSLGSGSDHVMDAISQCEQYAKEQGAQERNAPWRLFFRKEVFTPWHSPSEDNVATNLIYQQVVRGVKFGEYRCEKEDDLAELASQQYFVDYGSEMILERLLNLVPTYIPDREITPLKTLEKWAQLAIAAHKKGIYAQRRTDAQKVKEDVVSYARFKWPLLFSRFYEAYKFSGPSLPKNDVIVAVNWTGVYFVDEQEQVLLELSFPEIMAVSSSRGAKTTAPSFTLATIKGDEYTFTSSNAEDIRDLVVTFLEGLRKRSKYVVALQDNPNPAGEESGFLSFAKGDLIILDHDTGEQVMNSGWANGINERTKQRGDFPTDSVYVMPTVTMPPREIVALVTMTPDQRQDVVRLLQLRTAEPEVRAKPYTLEEFSYDYFRPPPKHTLSRVMVSKARGKDRLWSHTREPLKQALLKKLLGSEELSQEACLAFIAVLKYMGDYPSKRTRSVNELTDQIFEGPLKAEPLKDEAYVQILKQLTDNHIRYSEERGWELLWLCTGLFPPSNILLPHVQRFLQSRKHCPLAIDCLQRLQKALRNGSRKYPPHLVEVEAIQHKTTQIFHKVYFPDDTDEAFEVESSTKAKDFCQNIATRLLLKSSEGFSLFVKIADKVLSVPENDFFFDFVRHLTDWIKKARPIKDGIVPSLTYQVFFMKKLWTTTVPGKDPMADSIFHYYQELPKYLRGYHKCTREEVLQLGALIYRVKFEEDKSYFPSIPKLLRELVPQDLIRQVSPDDWKRSIVAYFNKHAGKSKEEAKLAFLKLIFKWPTFGSAFFEQTTEPNFPEILLIAINKYGVSLIDPKTKDILTTHPFTKISNWSSGNTYFHITIGNLVRGSKLLCETSLGYKMDDLLTSYISQMLTAMSKQRGSRSGK

SEQ ID NO: 54409 - protein, 1357 aa, Homo sapiens
  Payload ID: 10746
  Gene Symbol: MYO7A
  Gene Name: myosin VIIA
  ENSP ID: ENSP00000417017
FQARCRAYLVRKAFRHRLWAVLTVQAYARGMIARRLHQRLRAEYLWRLEAEKMRLAEEEKLRKEMSAKKAKEEAERKHQERLAQLAREDAERELKEKEAARRKKELLEQMERARHEPVNHSDMVDKMFGFLGTSGGLPGQEGQAPSGFEDLERGRREMVEEDLDAALPLPDEDEEDLSEYKFAKFAATYFQGTTTHSYTRRPLKQPLLYHDDEGDQLAALAVWITILRFMGDLPEPKYHTAMSDGSEKIPVMTKIYETLGKKTYKRELQALQGEGEAQLPEGQKKSSVRHKLVHLTLKKKSKLTEEVTKRLHDGESTVQGNSMLEDRPTSNLEKLHFIIGNGILRPALRDEIYCQISKQLTHNPSKSSYARGWILVSLCVGCFAPSEKFVKYLRNFIHGGPPGYAPYCEERLRRTFVNGTRTQPPSWLELQATKSKKPIMLPVTFMDGTTKTLLTDSATTAKELCNALADKISLKDRFGFSLYIALFDKVSSLGSGSDHVMDAISQCEQYAKEQGAQERNAPWRLFFRKEVFTPWHSPSEDNVATNLIYQQVVRGVKFGEYRCEKEDDLAELASQQYFVDYGSEMILERLLNLVPTYIPDREITPLKTLEKWAQLAIAAHKKGIYAQRRTDAQKVKEDVVSYARFKWPLLFSRFYEAYKFSGPSLPKNDVIVAVNWTGVYFVDEQEQVLLELSFPEIMAVSSSRGAKTTAPSFTLATIKGDEYTFTSSNAEDIRDLVVTFLEGLRKRSKYVVALQDNPNPGEESGFLSFAKGDLIILDHDTGEQVMNSGWANGINERTKQRGDFPTDSVYVMPTVTMPPREIVALVTMTPDQRQDVVRLLQLRTAEPEVRAKPYTLEEFSYDYFRPPPKHTLSRVMVSKARGKDRLWSHTREPLKQALLKKLLGSEELSQEACLAFIAVLKYMGDYPSKRTRSVNELTDQIFEGPLKAEPLKDEAYVQILKQLTDNHIRYSEERGWELLWLCTGLFPPSNILLPHVQRFLQSRKHCPLAIDCLQRLQKALRNGSRKYPPHLVEVEAIQHKTTQIFHKVYFPDDTDEAFEVESSTKAKDFCQNIATRLLLKSSEGFSLFVKIADKVLSVPENDFFFDFVRHLTDWIKKARPIKDGIVPSLTYQVFFMKKLWTTTVPGKDPMADSIFHYYQELPKYLRGYHKCTREEVLQLGALIYRVKFEEDKSYFPSIPKLLRELVPQDLIRQVSPDDWKRSIVAYFNKHAGKSKEEAKLAFLKLIFKWPTFGSAFFEVKQTTEPNFPEILLIAINKYGVSLIDPKTKDILTTHPFTKISNWSSGNTYFHITIGNLVRGSKLLCETSLGYKMDDLLTSYISQMLTAMSKQRGSRSGK

SEQ ID NO: 54410 - protein, 1198 aa, Homo sapiens
  Payload ID: 10746
  Gene Symbol: MYO7A
  Gene Name: myosin VIIA
  ENSP ID: ENSP00000477640
MVILQQGDHVWMDLRLGQEFDVPIGAVVKLCDSGQVQVVDDEDNEHWISPQNATHIKPMHPTSVHGVEDMIRLGDLNEAGILRNLLIRYRDHLIYTYTGSILVAVNPYQLLSIYSPEHIRQYTNKKIGEMPPHIFAIADNCYFNMKRNSRDQCCIISGESGAGKTESTKLILQFLAAISGQHSWIEQQVLEATPILEAFGNAKTIRNDNSSRFGKYIDIHFNKRGAIEGAKIEQYLLEKSRVCRQALDERNYHVFYCMLEGMSEDQKKKLGLGQASDYNYLAMGNCITCEGRVDSQEYANIRSAMKVLMFTDTENWEISKLLAAILHLGNLQYEARTFENLDACEVLFSPSLATAASLLEVNPPDLMSCLTSRTLITRGETVSTPLSREQALDVRDAFVKGIYGRLFVWIVDKINAAIYKPPSQDVKNSRRSIGLLDIFGFENFAVNSFEQLCINFANEHLQQFFVRHVFKLEQEEYDLESIDWLHIEFTDNQDALDMIANKPMNIISLIDEESKFPKGTDTTMLHKLNSQHKLNANYIPPKNNHETQFGINHFAGIVYYETQGFLEKNRDTLHGDIIQLVHSSRNKFIKQIFQADVAMGAETRKRSPTLSSQFKRSLELLMRTLGACQPFFVRCIKPNEFKKPMLFDRHLCVRQLRYSGMMETIRIRRAGYPIRYSFVEFVERYRVLLPGVKPAYKQGDLRGTCQRMAEAVLGTHDDWQIGKTKIFLKDHHDMLLEVERDKAITDRVILLQKVIRGFKDRSNFLKLKNAATLIQRHWRGHNCRKNYGLMRLGFLRLQALHRSRKLHQQYRLARQRIIQFQARCRAYLVRKAFRHRLWAVLTVQAYARGMIARRLHQRLRAEYLWRLEAEKMRLAEEEKLRKEMSAKKAKEEAERKHQERLAQLAREDAERELKEKEAARRKKELLEQMERARHEPVNHSDMVDKMFGFLGTSGGLPGQEGQAPSGFEDLERGRREMVEEDLDAALPLPDEDEEDLSEYKFAKFAATYFQGTTTHSYTRRPLKQPLLYHDDEGDQLAALAVWITILRFMGDLPEPKYHTAMSDGSEKIPVMTKIYETLGKKTYKRELQALQGEGEVLQAQLPEGQKKSSVRHKLVHLTLKKKSKLTEEVTKRLHDGESTVQGNSMLEDRPTSNLEKLHFIIGNGILRTPGPESLLVAEWCLCQPSKRLSRPGFGFAAS

SEQ ID NO: 54411 - protein, 859 aa, Homo sapiens
  Payload ID: 10747
  Gene Symbol: MYRIP
  Gene Name: myosin VIIA and Rab interacting protein
  Uniprot ID: Q8NFW9
  ENSP ID: ENSP00000301972
MGRKLDLSGLTDDETEHVLQVVQRDFNLRKKEEERLSELKQKLDEEGSKCSILSKHQQFVEHCCMRCCSPFTFLVNTKRQCGDCKFNVCKSCCSYQKHEKAWVCCVCQQARLLRAQSLEWFYNNVKSRFKRFGSAKVLKNLYRKHRLESGACFDILGGSLFESNLENEGSISGSDSTFYRQSEGHSVMDTLAVALRVAEEAIEEAISKAEAYGDSLDKQNEASYLRDHKEELTEELATTILQKIIRKQKSKSEQQVEEEPGWPHPQSCSTKVADEGTSASPGGYRAPAALWRSQSAFSITGEEALKTPPVEAPSRQPRDQGQHPRAESALPSWKSVDRLDETNLAPVLQSPDGNWVALKDGAPPPTRLLAKPKSGTFQALEVASSVASAYDEMGSDSEEDFDWSEALSKLCPRSRALPRNPQPQPTQAQSSDQGPIAASPSSALSPNPEAMCSDSETSSAGSSREVGHQARLSWLQRKAPRNPAAEKMRLHGELDVNFNPQLASRETSDSSEPEEAPHTTDRRARRWRRARLGSEEPSKEPSSPSAQLRDLDTHQVSDDLSETDISNEARDPQTLTDTTEEKRRNRLYELAMKMSEKETSSGEDQESEPKTESENQKESLSSEDNSQSVQEELKKKFSAVSLCNISTEVLKVINATEELIAGSTGPWESPQVPPDRQKGMFPRGTDQVRLDEQLTSLEENVYLAAGTVYGLETQLTELEDAARCIHSGTDETHLADLEDQVATAAAQVHHAELQISDIESRISALTIAGLNIAPCVRFTRRRDQKQRTQVQTIDTSRQQRRKLPAPPVKAEKIETSSVTTIKTFNHNFILQGSSTNRTKERKGTTKDLMEPALESAVMY

SEQ ID NO: 54412 - protein, 770 aa, Homo sapiens
  Payload ID: 10747
  Gene Symbol: MYRIP
  Gene Name: myosin VIIA and Rab interacting protein
  Uniprot ID: Q8NFW9
  ENSP ID: ENSP00000379519
MRKAASAASSRSTSSLWSTAACAAARPSPSSSTPSASVEIANSMSARAAAPTRSTKRPGSAASASKRGGSLFESNLENEGSISGSDSTFYRQSEGHSVMDTLAVALRVAEEAIEEAISKAEAYGDSLDKQNEASYLRDHKEELTEELATTILQKIIRKQKSKSEQQVEEEPGWPHPQSCSTKVADEGTSASPGGYRAPAALWRSQSAFSITGEEALKTPPVEAPSRQPRDQGQHPRAESALPSWKSVDRLDETNLAPVLQSPDGNWVALKDGAPPPTRLLAKPKSGTFQALEVASSVASAYDEMGSDSEEDFDWSEALSKLCPRSRALPRNPQPQPTQAQSSDQGPIAASPSSALSPNPEAMCSDSETSSAGSSREVGHQARLSWLQRKAPRNPAAEKMRLHGELDVNFNPQLASRETSDSSEPEEAPHTTDRRARRWRRARLGSEEPSKEPSSPSAQLRDLDTHQVSDDLSETDISNEARDPQTLTDTTEEKRRNRLYELAMKMSEKETSSGEDQESEPKTESENQKESLSSEDNSQSVQEELKKKFSAVSLCNISTEVLKVINATEELIAGSTGPWESPQVPPDRQKGMFPRGTDQVRLDEQLTSLEENVYLAAGTVYGLETQLTELEDAARCIHSGTDETHLADLEDQVATAAAQVHHAELQISDIESRISALTIAGLNIAPCVRFTRRRDQKQRTQVQTIDTSRQQRRKLPAPPVKAEKIETSSVTTIKTFNHNFILQGSSTNRTKERKGTTKDLMEPALESAVMY

SEQ ID NO: 54413 - protein, 794 aa, Homo sapiens
  Payload ID: 10747
  Gene Symbol: MYRIP
  Gene Name: myosin VIIA and Rab interacting protein
  Uniprot ID: Q8NFW9
  ENSP ID: ENSP00000389323
MGRKLDLSGLTDDETEHVLQVVQRDFNLRKKEEERLSELKQKLDEEGSKCSILSKHQQFVEHCCMRCCSPFTFLVNTKRQCGDCKFNVCKSCCSYQKHEKAWVCCVCQQARLLRAQSLEWFYNNVKSRFKRFGSAKVLKNLYRKHRLESGACFDILGGSLFESNLENEGSISGSDSTFYRQSEGHSVMDTLAVALRVAEEAIEEAISKAEAYGDSLDKQNEASYLRDHKEELTEELATTILQKIIRKQKSKSEQQVEEEPGWPHPQSCSTKVADEGTSASPGGYRAPAALWRSQSAFSITGEEALKTPPVEAPSRQPRDQGQHPRAESALPSWKSVDRLDETNLAPVLQSPDGNWVALKDGAPPPTRLLAKPKSGTFQALEVASSVASAYDEMGSDSEEDFDWSEALSKLCPRSRALPRNPQPQPTQAQSSDQGPIAASPSSALSPNPEAMCSDSETSSAGSSREVGHQARLSWLQRKAPRNPAAEKMRLHGELDVNFNPQLASRETSDSSEPEEAPHTTDRRARRWRRARLGSEEPSKEPSSPSAQLRDLDTHQVSDDLSETDISNEARDPQTLTDTTEEKRRNRLYELAMKMSEKETSSGEDQESEPKTESENQKESLSSEDNSQSVQEELKKVYLAAGTVYGLETQLTELEDAARCIHSGTDETHLADLEDQVATAAAQVHHAELQISDIESRISALTIAGLNIAPCVRFTRRRDQKQRTQVQTIDTSRQQRRKLPAPPVKAEKIETSSVTTIKTFNHNFILQGSSTNRTKERKGTTKDLMEPALESAVMY

SEQ ID NO: 54414 - protein, 859 aa, Homo sapiens; identical to SEQ ID NO: 54411
  Payload ID: 10747
  Gene Symbol: MYRIP
  Gene Name: myosin VIIA and Rab interacting protein
  Uniprot ID: Q8NFW9
  ENSP ID: ENSP00000398665

SEQ ID NO: 54415 - protein, 115 aa, Homo sapiens
  Payload ID: 10747
  Gene Symbol: MYRIP
  Gene Name: myosin VIIA and Rab interacting protein
  ENSP ID: ENSP00000400916
MGRKLDLSGLTDDETEHVLQVVQRDFNLRKKEEERLSELKQKLDEEGSKCSILSKHQQFVEHCCMRCCSPFTFLVNTKRQCGDCKFNVCKSCCSYQKHEKAWVCCVCQQARRKPF

SEQ ID NO: 54416 - protein, 637 aa, Homo sapiens
  Payload ID: 10747
  Gene Symbol: MYRIP
  Gene Name: myosin VIIA and Rab interacting protein
  Uniprot ID: Q8NFW9
  ENSP ID: ENSP00000413392
MGRKLDLSGLTDDETEHVLQVVQRDFNLRKKEEERLSELKQKLDEEGSKCSILSKHQQFVEHCCMRCCSPFTFLVNTKRQCGDCKFNVCKSCCSYQKHEKAWVCCVCQQARLLRAQSLEWFYNNVKSRFKRFGSAKVLKNLYRKHRLESGACFDILGGSLFESNLENEGSISGSDSTFYRQSEGHSVMDTLAVALRVAEEAIEEAISKAEAYGDSLDKQNEASYLRDHKEELTEELATTILQKIIRKQKSKSEQQVEEEPGWPHPQSCSTKVADEGTSASPGGYRAPAALWRSQSAFSITGEEALKTPPVEAPSRQPRDQGQHPRAESALPSWKSVDRLDETNLAPVLQSPDGNWVALKDGAPPPTRLLAKPKSGTFQALEVASSVASAYDEMGSDSEEDFDWSEALSKLCPRSRALPRNPQPQPTQAQSSDQGPIAASPSSALSPNPEAMCSDSETSSAGSSREVGHQARLSWLQRKAPRNPAAEKMRLHGELDVNFNPQLASRETSDSSEPEEAPHTTDRRARRWRRARLGSEEPSKEPSSPSAQLRDLDTHQVSDDLSETDISNEARDPQTLTDTTEEKRRNRLYELAMKMSEKETSSGEDQESEPKTESENQKESLSSEDNSQSVQEELKKKS

SEQ ID NO: 54417 - protein, 672 aa, Homo sapiens
  Payload ID: 10747
  Gene Symbol: MYRIP
  Gene Name: myosin VIIA and Rab interacting protein
  Uniprot ID: Q8NFW9
  ENSP ID: ENSP00000438297
MDTLAVALRVAEEAIEEAISKAEAYGDSLDKQNEASYLRDHKEELTEELATTILQKIIRKQKSKSEQQVEEEPGWPHPQSCSTKVADEGTSASPGGYRAPAALWRSQSAFSITGEEALKTPPVEAPSRQPRDQGQHPRAESALPSWKSVDRLDETNLAPVLQSPDGNWVALKDGAPPPTRLLAKPKSGTFQALEVASSVASAYDEMGSDSEEDFDWSEALSKLCPRSRALPRNPQPQPTQAQSSDQGPIAASPSSALSPNPEAMCSDSETSSAGSSREVGHQARLSWLQRKAPRNPAAEKMRLHGELDVNFNPQLASRETSDSSEPEEAPHTTDRRARRWRRARLGSEEPSKEPSSPSAQLRDLDTHQVSDDLSETDISNEARDPQTLTDTTEEKRRNRLYELAMKMSEKETSSGEDQESEPKTESENQKESLSSEDNSQSVQEELKKKFSAVSLCNISTEVLKVINATEELIAGSTGPWESPQVPPDRQKGMFPRGTDQVRLDEQLTSLEENVYLAAGTVYGLETQLTELEDAARCIHSGTDETHLADLEDQVATAAAQVHHAELQISDIESRISALTIAGLNIAPCVRFTRRRDQKQRTQVQTIDTSRQQRRKLPAPPVKAEKIETSSVTTIKTFNHNFILQGSSTNRTKERKGTTKDLMEPALESAVMY

SEQ ID NO: 54418 - protein, 2116 aa, Homo sapiens
  Payload ID: 10748
  Gene Symbol: MYO7B
  Gene Name: myosin VIIB
  Uniprot ID: Q6PIF6
  ENSP ID: ENSP00000386461
MSGFRLGDHVWLEPPSTHKTGVAIGGIIKEAKPGKVLVEDDEGKEHWIRAEDFGVLSPMHPNSVQGVDDMIRLGDLNEAGMVHNLLIRYQQHKIYTYTGSILVAVNPFQVLPLYTLEQVQLYYSRHMGELPPHVFAIANNCYFSMKRNKRDQCCIISGESGAGKTETTKLILQFLATISGQHSWIEQQVLEANPILEAFGNAKTIRNDNSSRFGKYIDIYFNPSGVIEGARIEQFLLEKSRVCRQAPEERNYHIFYCMLMGVSAEDKQLLSLGTPSEYHYLTMGNCTSCEGLNDAKDYAHIRSAMKILQFSDSESWDVIKLLAAILHLGNVGFMASVFENLDASDVMETPAFPTVMKLLEVQHQELRDCLIKHTILIRGEFVTRSLNIAQAADRRDAFVKGIYGHLFLWIVKKINAAIFTPPAQDPKNVRRAIGLLDIFGFENFENNSFEQLCINFANEHLQQFFVQHVFTMEQEEYRSENISWDYIHYTDNRPTLDLLALKPMSIISLLDEESRFPQGTDLTMLQKLNSVHANNKAFLQPKNIHDARFGIAHFAGEVYYQAEGFLEKNRDVLSTDILTLVYSSKNKFLREIFNLELAETKLGHGTIRQAKAGNHLFKSADSNKRPSTLGSQFKQSLDQLMKILTNCQPYFIRCIKPNEYKKPLLFDRELCLRQLRYSGMMETVHIRKSGFPIRYTFEEFSQRFGVLLPNAMRMQLQGKLRQMTLGITDVWLRTDKDWKAGKTKIFLRDHQDTLLEVQRSQVLDRAALSIQKVLRGYRYRKEFLRQRRAAVTLQAWWRGYCNRRNFKLILVGFERLQAIARSQPLARQYQAMRQRTVQLQALCRGYLVRQQVQAKRRAVVVIQAHARGMAARRNFQQRKANAPLVIPAEGQKSQGALPAKKRRSIYDTVTDTEMVEKVFGFLPAMIGGQEGQASPHFEDLESKTQKLLEVDLDTVPMAEEPEEDVDGLAEYTFPKFAVTYFQKSASHTHIRRPLRYPLLYHEDDTDCLAALVIWNVILRFMGDLPEPVLYARSSQQGSSVMRQIHDTLGREHGAQVPQHSRSAQVASQLNIGEEALEPDGLGADRPMSNLEKVHFIVGYAILRPSLRDEIYCQICKQLSENFKTSSLARGWILLSLCLGCFPPSERFMKYLLNFIGQGPATYGPFCAERLRRTYANGVRAEPPTWLELQAVKSKKHIPIQVILATGESLTVPVDSASTSREMCMHIAHKQGLSDHLGFSLQVAVYDKFWSLGSGRDHMMDAIARCEQMAQERGESQRQSPWRIYFRKEFFTPWHDSREDPVSTELIYRQVLRGVWSGEYSFEKEEELVELLARHCYVQLGASAESKAVQELLPSCIPHKLYRTKPPDRWASLVTAACAKAPYTQKQVTPLAVREQVVDAARLQWPLLFSRLFEVITLSGPRLPKTQLILAVNWKGLCFLDQQEKMLLELSFPEVMGLATNREAQGGQRLLLSTMHEEYEFVSPSSVAIAELVALFLEGLKERSIFAMALQDRKATDDTTLLAFKKGDLLVLTKKQGLLASENWTLGQNDRTGKTGLVPMACLYTIPTVTKPSAQLLSLLAMSPEKRKLAAQEGQFTEPRPEEPPKEKLHTLEEFSYEFFRAPEKDMVSMAVLPLARARGHLWAYSCEPLRQPLLKRVHANVDLWDIACQIFVAILRYMGDYPSRQAWPTLELTDQIFTLALQHPALQDEVYCQILKQLTHNSNRHSEERGWQLLWLCTGLFPPSKGLLPHAQKFIDTRRGKLLAPDCSRRIQKVLRTGPRKQPPHQVEVEAAEQNVSRICHKIYFPNDTSEMLEVVANTRVRDVCDSIATRLQLASWEGCSLFIKISDKVISQKEGDFFFDSLREVSDWVKKNKPQKEGAPVTLPYQVYFMRKLWLNISPGKDVNADTILHYHQELPKYLRGFHKCSREDAIHLAGLIYKAQFNNDRSQLASVPKILRELVPENLTRLMSSEEWKKSILLAYDKHKDKTVEEAKVAFLKWICRWPTFGSAFFEVKQTSEPSYPDVILIAINRHGVLLIHPKTKDLLTTYPFTKISSWSSGSTYFHMALGSLGRGSRLLCETSLGYKMDDLLTSYVQQLLSAMNKQRGSKAPALAST

SEQ ID NO: 54419 - protein, 969 aa, Homo sapiens
  Payload ID: 10748
  Gene Symbol: MYO7B
  Gene Name: myosin VIIB
  ENSP ID: ENSP00000386850
MKYLLNFIGQGPATYGPFCAERLRRTYANGVRAEPPTWLELQAVKSKKHIPIQVILATGESLTVPVDSASTSREMCMHIAHKQGLSDHLGFSLQVAVYDKFWSLGSGRDHMMDAIARCEQMAQERGESQRQSPWRIYFRKEFFTPWHDSREDPVSTELIYRQVLRGVWSGEYSFEKEEELVELLARHCYVQLGASAESKAVQELLPSCIPHKLYRTKPPDRWASLVTAACAKAPYTQKQVTPLAVREQVVDAARLQWPLLFSRLFEVITLSGPRLPKTQLILAVNWKGLCFLDQQEKMLLELSFPEVMGLATNREAQGGQRLLLSTMHEEYEFVSPSSVAIAELVALFLEGLKERSIFAMALQDRKATDDTTLLAFKKGDLLVLTKKQGLLASENWTLGQNDRTGKTGLVPMACLYTIPTVTKPSAQLLSLLAMSPEKRKLAAQEGQFTEPRPEEPPKEKLHTLEEFSYEFFRAPEKDMVSMAVLPLARARGHLWAYSCEPLRQPLLKRVHANVDLWDIACQIFVAILRYMGDYPSRQAWPTLELTDQIFTLALQHPALQDEVYCQILKQLTHNSNRHSEERGWQLLWLCTGLFPPSKGLLPHAQKFIDTRRGKLLAPDCSRRIQKVLRTGPRKQPPHQVEVEAAEQNVSRICHKIYFPNDTSEMLEVVANTRVRDVCDSIATRLQLASWEGCSLFIKISDKVISQKEGDFFFDSLREVSDWVKKNKPQKEGAPVTLPYQVYFMRKLWLNISPGKDVNADTILHYHQELPKYLRGFHKCSREDAIHLAGLIYKAQFNNDRSQLASVPKILRELVPENLTRLMSSEEWKKSILLAYDKHKDKTVEEAKVAFLKWICRWPTFGSAFFEVKQTSEPSYPDVILIAINRHGVLLIHPKTKDLLTTYPFTKISSWSSGSTYFHMALGSLGRGSRLLCETSLGYKMDDLLTSYVQQLLSAMNKQRGSKAPALAST

SEQ ID NO: 54420 - protein, 176 aa, Homo sapiens
  Payload ID: 10748
  Gene Symbol: MYO7B
  Gene Name: myosin VIIB
  ENSP ID: ENSP00000404927
MKYLLNFIGQGPATYGPFCAERLRRTYANGVRAEPPTWLELQAVKSKKHIPIQVILATGESLTVPVDSASTSREMCMHIAHKQGLSDHLGFSLQVAVYDKFWSLGSGRDHMMDAIARCEQMAQERGESQRQSPWRIYFRKEFFTPWHDSREDPVSTELIYRQVLRGVWSGEYSFEK

SEQ ID NO: 54421 - protein, 2116 aa, Homo sapiens; identical to SEQ ID NO: 54418
  Payload ID: 10748
  Gene Symbol: MYO7B
  Gene Name: myosin VIIB
  Uniprot ID: Q6PIF6
  ENSP ID: ENSP00000415090

SEQ ID NO: 54422 - protein, 90 aa, Homo sapiens
  Payload ID: 10748
  Gene Symbol: MYO7B
  Gene Name: myosin VIIB
  ENSP ID: ENSP00000456661
  MOD_RES (1)..(1): Any amino acid
XLVIWNVILRFMGDLPEPVLYARSSQQGSSVMRQIHDTLGREHGAQVPQHSRSAQRSGCKDKGTKDISSMKLKRSSRITGQVASQLNIGE

SEQ ID NO: 54423 - protein, 2069 aa, Homo sapiens
  Payload ID: 10749
  Gene Symbol: MYO10
  Gene Name: myosin X
  ENSP ID: ENSP00000274203
MDNFFTEGTRVWLRENGQHFPSTVNSCAEGIVVFRTDYGQVFTYKQSTITHQKVTAMHPTNEEGVDDMASLTELHGGSIMYNLFQRYKRNQIYTYIGSILASVNPYQPIAGLYEPATMEQYSRRHLGELPPHIFAIANECYRCLWKRHDNQCILISGESGAGKTESTKLILKFLSVISQQSLELSLKEKTSCVERAILESSPIMEAFGNAKTVYNNNSSRFGKFVQLNICQKGNIQGGRIVDYLLEKNRVVRQNPGERNYHIFYALLAGLEHEEREEFYLSTPENYHYLNQSGCVEDKTISDQESFREVITAMDVMQFSKEEVREVSRLLAGILHLGNIEFITAGGAQVSFKTALGRSAELLGLDPTQLTDALTQRSMFLRGEEILTPLNVQQAVDSRDSLAMALYACCFEWVIKKINSRIKGNEDFKSIGILDIFGFENFEVNHFEQFNINYANEKLQEYFNKHIFSLEQLEYSREGLVWEDIDWIDNGECLDLIEKKLGLLALINEESHFPQATDSTLLEKLHSQHANNHFYVKPRVAVNNFGVKHYAGEVQYDVRGILEKNRDTFRDDLLNLLRESRFDFIYDLFEHVSSRNNQDTLKCGSKHRRPTVSSQFKDSLHSLMATLSSSNPFFVRCIKPNMQKMPDQFDQAVVLNQLRYSGMLETVRIRKAGYAVRRPFQDFYKRQEGAELDSLSFQRVLMRNLALPEDVRGKCTSLLQLYDASNSEWQLGKTKVFLRESLEQKLEKRREEEVSHAAMVIRAHVLGFLARKQYRKVLYCVVIIQKNYRAFLLRRRFLHLKKAAIVFQKQLRGQIARRVYRQLLAEKREQEEKKKQEEEEKKKREEEERERERERREAELRAQQEEETRKQQELEALQKSQKEAELTRELEKQKENKQVEEILRLEKEIEDLQRMKEQQELSLTEASLQKLQERRDQELRRLEEEACRAAQEFLESLNFDEIDECVRNIERSLSVGSEFSSELAESACEEKPNFNFSQPYPEEEVDEGFEADDDAFKDSPNPSEHGHSDQRTSGIRTSDDSSEEDPYMNDTVVPTSPSADSTVLLAPSVQDSGSLHNSSSGESTYCMPQNAGDLPSPDGDYDYDQDDYEDGAITSGSSVTFSNSYGSQWSPDYRCSVGTYNSSGAYRFSSEGAQSSFEDSEEDFDSRFDTDDELSYRRDSVYSCVTLPYFHSFLYMKGGLMNSWKRRWCVLKDETFLWFRSKQEALKQGWLHKKGGGSSTLSRRNWKKRWFVLRQSKLMYFENDSEEKLKGTVEVRTAKEIIDNTTKENGIDIIMADRTFHLIAESPEDASQWFSVLSQVHASTDQEIQEMHDEQANPQNAVGTLDVGLIDSVCASDSPDRPNSFVIITANRVLHCNADTPEEMHHWITLLQRSKGDTRVEGQEFIVRGWLHKEVKNSPKMSSLKLKKRWFVLTHNSLDYYKSSEKNALKLGTLVLNSLCSVVPPDEKIFKETGYWNVTVYGRKHCYRLYTKLLNEATRWSSAIQNVTDTKAPIDTPTQQLIQDIKENCLNSDVVEQIYKRNPILRYTHHPLHSPLLPLPYGDINLNLLKDKGYTTLQDEAIKIFNSLQQLESMSDPIPIIQGILQTGHDLRPLRDELYCQLIKQTNKVPHPGSVGNLYSWQILTCLSCTFLPSRGILKYLKFHLKRIREQFPGSEMEKYALFTYESLKKTKCREFVPSRDEIEALIHRQEMTSTVYCHGGGSCKITINSHTTAGEVVEKLIRGLAMEDSRNMFALFEYNGHVDKAIESRTVVADVLAKFEKLAATSEVGDLPWKFYFKLYCFLDTDNVPKDSVEFAFMFEQAHEAVIHGHHPAPEENLQVLAALRLQYLQGDYTLHAAIPPLEEVYSLQRLKARISQSTKTFTPCERLEKRRTSFLEGTLRRSFRTGSVVRQKVEEEQMLDMWIKEEVSSARASIIDKWRKFQGMNQEQAMAKYMALIKEWPGYGSTLFDVECKEGGFPQELWLGVSADAVSVYKRGEGRPLEVFQYEHILSFGAPLANTYKIVVDERELLFETSEVVDVAKLMKAYISMIVKKRYSTTRSASSQGSSR

SEQ ID NO: 54424 - protein, 1397 aa, Homo sapiens
  Payload ID: 10749
  Gene Symbol: MYO10
  Gene Name: myosin X
  ENSP ID: ENSP00000421170
MLETVRIRKAGYAVRRPFQDFYKRYKVLMRNLALPEDVRGKCTSLLQLYDASNSEWQLGKTKVFLRESLEQKLEKRREEEVSHAAMVIRAHVLGFLARKQYRKVLYCVVIIQKNYRAFLLRRRFLHLKKAAIVFQKQLRGQIARRVYRQLLAEKREQEEKKKQEEEEKKKREEEERERERERREAELRAQQEEETRKQQELEALQKSQKEAELTRELEKQKENKQVEEILRLEKEIEDLQRMKEQQELSLTEASLQKLQERRDQELRRLEEEACRAAQEFLESLNFDEIDECVRNIERSLSVGSEFSSELAESACEEKPNFNFSQPYPEEEVDEGFEADDDAFKDSPNPSEHGHSDQRTSGIRTSDDSSEEDPYMNDTVVPTSPSADSTVLLAPSVQDSGSLHNSSSGESTYCMPQNAGDLPSPDGDYDYDQDDYEDGAITSGSSVTFSNSYGSQWSPDYRCSVGTYNSSGAYRFSSEGAQSSFEDSEEDFDSRFDTDDELSYRRDSVYSCVTLPYFHSFLYMKGGLMNSWKRRWCVLKDETFLWFRSKQEALKQGWLHKKGGGSSTLSRRNWKKRWFVLRQSKLMYFENDSEEKLKGTVEVRTAKEIIDNTTKENGIDIIMADRTFHLIAESPEDASQWFSVLSQVHASTDQEIQEMHDEQANPQNAVGTLDVGLIDSVCASDSPDRPNSFVIITANRVLHCNADTPEEMHHWITLLQRSKGDTRVEGQEFIVRGWLHKEVKNSPKMSSLKLKKRWFVLTHNSLDYYKSSEKNALKLGTLVLNSLCSVVPPDEKIFKETGYWNVTVYGRKHCYRLYTKLLNEATRWSSAIQNVTDTKAPIDTPTQQLIQDIKENCLNSDVVEQIYKRNPILRYTHHPLHSPLLPLPYGDINLNLLKDKGYTTLQDEAIKIFNSLQQLESMSDPIPIIQGILQTGHDLRPLRDELYCQLIKQTNKVPHPGSVGNLYSWQILTCLSCTFLPSRGILKYLKFHLKRIREQFPGSEMEKYALFTYESLKKTKCREFVPSRDEIEALIHRQEMTSTVYCHGGGSCKITINSHTTAGEVVEKLIRGLAMEDSRNMFALFEYNGHVDKAIESRTVVADVLAKFEKLAATSEVGDLPWKFYFKLYCFLDTDNVPKDSVEFAFMFEQAHEAVIHGHHPAPEENLQVLAALRLQYLQGDYTLHAAIPPLEEVYSLQRLKARISQSTKTFTPCERLEKRRTSFLEGTLRRSFRTGSVVRQKVEEEQMLDMWIKEEVSSARASIIDKWRKFQGMNQEQAMAKYMALIKEWPGYGSTLFDVECKEGGFPQELWLGVSADAVSVYKRGEGRPLEVFQYEHILSFGAPLANTYKIVVDERELLFETSEVVDVAKLMKAYISMIVKKRYSTTRSASSQGSSR

SEQ ID NO: 54425 - protein, 2058 aa, Homo sapiens
  Payload ID: 10749
  Gene Symbol: MYO10
  Gene Name: myosin X
  Uniprot ID: Q9HD67
  ENSP ID: ENSP00000421280
MDNFFTEGTRVWLRENGQHFPSTVNSCAEGIVVFRTDYGQVFTYKQSTITHQKVTAMHPTNEEGVDDMASLTELHGGSIMYNLFQRYKRNQIYTYIGSILASVNPYQPIAGLYEPATMEQYSRRHLGELPPHIFAIANECYRCLWKRHDNQCILISGESGAGKTESTKLILKFLSVISQQSLELSLKEKTSCVERAILESSPIMEAFGNAKTVYNNNSSRFGKFVQLNICQKGNIQGGRIVDYLLEKNRVVRQNPGERNYHIFYALLAGLEHEEREEFYLSTPENYHYLNQSGCVEDKTISDQESFREVITAMDVMQFSKEEVREVSRLLAGILHLGNIEFITAGGAQVSFKTALGRSAELLGLDPTQLTDALTQRSMFLRGEEILTPLNVQQAVDSRDSLAMALYACCFEWVIKKINSRIKGNEDFKSIGILDIFGFENFEVNHFEQFNINYANEKLQEYFNKHIFSLEQLEYSREGLVWEDIDWIDNGECLDLIEKKLGLLALINEESHFPQATDSTLLEKLHSQHANNHFYVKPRVAVNNFGVKHYAGEVQYDVRGILEKNRDTFRDDLLNLLRESRFDFIYDLFEHVSSRNNQDTLKCGSKHRRPTVSSQFKDSLHSLMATLSSSNPFFVRCIKPNMQKMPDQFDQAVVLNQLRYSGMLETVRIRKAGYAVRRPFQDFYKRYKVLMRNLALPEDVRGKCTSLLQLYDASNSEWQLGKTKVFLRESLEQKLEKRREEEVSHAAMVIRAHVLGFLARKQYRKVLYCVVIIQKNYRAFLLRRRFLHLKKAAIVFQKQLRGQIARRVYRQLLAEKREQEEKKKQEEEEKKKREEEERERERERREAELRAQQEEETRKQQELEALQKSQKEAELTRELEKQKENKQVEEILRLEKEIEDLQRMKEQQELSLTEASLQKLQERRDQELRRLEEEACRAAQEFLESLNFDEIDECVRNIERSLSVGSEFSSELAESACEEKPNFNFSQPYPEEEVDEGFEADDDAFKDSPNPSEHGHSDQRTSGIRTSDDSSEEDPYMNDTVVPTSPSADSTVLLAPSVQDSGSLHNSSSGESTYCMPQNAGDLPSPDGDYDYDQDDYEDGAITSGSSVTFSNSYGSQWSPDYRCSVGTYNSSGAYRFSSEGAQSSFEDSEEDFDSRFDTDDELSYRRDSVYSCVTLPYFHSFLYMKGGLMNSWKRRWCVLKDETFLWFRSKQEALKQGWLHKKGGGSSTLSRRNWKKRWFVLRQSKLMYFENDSEEKLKGTVEVRTAKEIIDNTTKENGIDIIMADRTFHLIAESPEDASQWFSVLSQVHASTDQEIQEMHDEQANPQNAVGTLDVGLIDSVCASDSPDRPNSFVIITANRVLHCNADTPEEMHHWITLLQRSKGDTRVEGQEFIVRGWLHKEVKNSPKMSSLKLKKRWFVLTHNSLDYYKSSEKNALKLGTLVLNSLCSVVPPDEKIFKETGYWNVTVYGRKHCYRLYTKLLNEATRWSSAIQNVTDTKAPIDTPTQQLIQDIKENCLNSDVVEQIYKRNPILRYTHHPLHSPLLPLPYGDINLNLLKDKGYTTLQDEAIKIFNSLQQLESMSDPIPIIQGILQTGHDLRPLRDELYCQLIKQTNKVPHPGSVGNLYSWQILTCLSCTFLPSRGILKYLKFHLKRIREQFPGSEMEKYALFTYESLKKTKCREFVPSRDEIEALIHRQEMTSTVYCHGGGSCKITINSHTTAGEVVEKLIRGLAMEDSRNMFALFEYNGHVDKAIESRTVVADVLAKFEKLAATSEVGDLPWKFYFKLYCFLDTDNVPKDSVEFAFMFEQAHEAVIHGHHPAPEENLQVLAALRLQYLQGDYTLHAAIPPLEEVYSLQRLKARISQSTKTFTPCERLEKRRTSFLEGTLRRSFRTGSVVRQKVEEEQMLDMWIKEEVSSARASIIDKWRKFQGMNQEQAMAKYMALIKEWPGYGSTLFDVECKEGGFPQELWLGVSADAVSVYKRGEGRPLEVFQYEHILSFGAPLANTYKIVVDERELLFETSEVVDVAKLMKAYISMIVKKRYSTTRSASSQGSSR

SEQ ID NO: 54426 - protein, 830 aa, Homo sapiens
  Payload ID: 10749
  Gene Symbol: MYO10
  Gene Name: myosin X
  ENSP ID: ENSP00000421309
MTSLPRLRLNTRDQAIQLGTRVWLRENGQHFPSTVNSCAEGIVVFRTDYGQVFTYKQSTITHQKVTAMHPTNEEGVDDMASLTELHGGSIMYNLFQRYKRNQIYTYIGSILASVNPYQPIAGLYEPATMEQYSRRHLGELPPHIFAIANECYRCLWKRHDNQCILISGESGAGKTESTKLILKFLSVISQQSLELSLKEKTSCVERAILESSPIMEAFGNAKTVYNNNSSRFGKFVQLNICQKGNIQGGRIVDYLLEKNRVVRQNPGERNYHIFYALLAGLEHEEREEFYLSTPENYHYLNQSGCVEDKTISDQESFREVITAMDVMQFSKEEVREVSRLLAGILHLGNIEFITAGGAQVSFKTALGRSAELLGLDPTQLTDALTQRSMFLRGEEILTPLNVQQAVDSRDSLAMALYACCFEWVIKKINSRIKGNEDFKSIGILDIFGFENFEVNHFEQFNINYANEKLQEYFNKHIFSLEQLEYSREGLVWEDIDWIDNGECLDLIEKKLGLLALINEESHFPQATDSTLLEKLHSQHANNHFYVKPRVAVNNFGVKHYAGEVQYDVRGILEKNRDTFRDDLLNLLRESRFDFIYDLFEHVSSRNNQDTLKCGSKHRRPTVSSQFKDSLHSLMATLSSSNPFFVRCIKPNMQKMPDQFDQAVVLNQLRYSGMLETVRIRKAGYAVRRPFQDFYKRYKVLMRNLALPEDVRGKCTSLLQLYDASNSEWQLGKTKVFLRESLEQKLEKRREEEVSHAAMVIRAHVLGFLARKQYRKVLYCVVIIQKNYRAFLLRRRFLHLKKAAIVFQKQLRGQIARRVYRQLLAEKREQE

SEQ ID NO: 54427 - protein, 1397 aa, Homo sapiens; identical to SEQ ID NO: 54424
  Payload ID: 10749
  Gene Symbol: MYO10
  Gene Name: myosin X
  ENSP ID: ENSP00000425051

SEQ ID NO: 54428 - protein, 97 aa, Homo sapiens
  Payload ID: 10749
  Gene Symbol: MYO10
  Gene Name: myosin X
  Uniprot ID: Q9HD67
  ENSP ID: ENSP00000426664
MDNFFTEGTRVWLRENGQHFPSTVNSCAEGIVVFRTDYGQVFTYKQSTITHQKVTAMHPTNEEGVDDMASLTELHGGSIMYNLFQRYKRNQIYVQIG

SEQ ID NO: 54429 - protein, 212 aa, Homo sapiens
  Payload ID: 10749
  Gene Symbol: MYO10
  Gene Name: myosin X
  ENSP ID: ENSP00000426783
MDNFFTEVFTYKQSTITHQKVTAMHPTNEEGVDDMASLTELHGGSIMYNLFQRYKRNQIYTYIGSILASVNPYQPIAGLYEPATMEQYSRRHLGELPPHIFAIANECYRCLWKRHDNQCILISGESGAGKTESTKLILKFLSVISQQSLELSLKEKTSCVERAILESSPIMEAFGNAKTVYNNNSSRFGKFVQLNICQKGNIQGGRIVDYLL

SEQ ID NO: 54430 - protein, 317 aa, Homo sapiens
  Payload ID: 10750
  Gene Symbol: MYO19
  Gene Name: myosin XIX
  Uniprot ID: Q96H55
  ENSP ID: ENSP00000477559
MLQQVNGHNPGSDGQAREYLREDLQEFLGGEVLLYKLDDLTRVNPVTLETVLRCLQARYMADTFYTNAGCTLVALNPFKPVPQLYSPELMREYHAAPQPQKLKPHVFTVGEQTYRNVKSLIEPVNQSIVVSGESGAGKTWTSRCLMKFYAVVATSPASWESHKIAERIEQRILNSNPVMEAFGNACTLRNNNSSRFGKFIQLQLNRAQQMTGAAVQTYLLEKTRVACQASSERNFHIFYQICKGASEDERLQWHLPEGAAFSWLPNPERSLEEDCFEVTREAMLHLGIDTPTQNNIFKVRRKATPLKFGRDDGQPFA

SEQ ID NO: 54431 - protein, 770 aa, Homo sapiens
  Payload ID: 10750
  Gene Symbol: MYO19
  Gene Name: myosin XIX
  Uniprot ID: Q96H55
  ENSP ID: ENSP00000478355
MLQQVNGHNPGSDGQAREYLREDLQEFLGGEVLLYKLDDLTRVNPVTLETVLRCLQARYMADTFYTNAGCTLVALNPFKPVPQLYSPELMREYHAAPQPQKLKPHVFTVGEQTYRNVKSLIEPVNQSIVVSGESGAGKTWTSRCLMKFYAVVATSPASWESHKIAERIEQRILNSNPVMEAFGNACTLRNNNSSRFGKFIQLQLNRAQQMTGAAVQTYLLEKTRVACQASSERNFHIFYQICKGASEDERLQWHLPEGAAFSWLPNPERSLEEDCFEVTREAMLHLGIDTPTQNNIFKVLAGLLHLGNIQFAASEDEAQPCQPMDDAKYSVRTAASLLGLPEDVLLEMVQIRTIRAGRQQQVFRKPCARAECDTRRDCLAKLIYARLFDWLVSVINSSICADTDSWTTFIGLLDVYGFESFPDNSLEQLCINYANEKLQLEACGLVETIHISAAGFPIRVSHRNFVERYKLLRRLHPCTSSGPDSPYPAKGLPEWCPHSEEATLEPLIQDILHTLPVLTQAAAITGDSAEAMPAPMHCGRTKVFMTDSMLELLECGRARVLEQCARCIQGGWRRHRHREQERQWRAVMLIQAAIRSWLTRKHIQRLHAAATVIKRAWQKWRIRMACLAAKELDGVEEKHFSQAPCSLSTSPLQTRLLEAIIRLWPLGLVLANTAMGVGSFQRKLVVWACLQLPRGSPSSYTVQTAQDQAGVTSIRALPQGSIKFHCRKSPLRYADICPEPSPYSITGFNQILLERHRLIHVTSSAFTGLG

SEQ ID NO: 54432 - protein, 176 aa, Homo sapiens
  Payload ID: 10750
  Gene Symbol: MYO19
  Gene Name: myosin XIX
  ENSP ID: ENSP00000478381
MLQQVNGHNPGSDGQAREYLREDLQEFLGGEVLLYKLDDLTRVNPVTLETVLRCLQARYMADTFYTNAGCTLVALNPFKPVPQLYSPELMREYHAAPQPQKLKPHVFTVGEQTYRNVKSLIEPVNQSIVVSGESGAGKTWTSRCLMKFYAVVATSPASWESHKIAERIEQRILNSN

SEQ ID NO: 54433 - protein, 770 aa, Homo sapiens; identical to SEQ ID NO: 54431
  Payload ID: 10750
  Gene Symbol: MYO19
  Gene Name: myosin XIX
  Uniprot ID: Q96H55
  ENSP ID: ENSP00000478437

SEQ ID NO: 54434 - protein, 15 aa, Homo sapiens
  Payload ID: 10750
  Gene Symbol: MYO19
  Gene Name: myosin XIX
  ENSP ID: ENSP00000479433
  MOD_RES (1)..(1): Any amino acid
XTPTQNNIFKSSRRG

SEQ ID NO: 54435 - protein, 970 aa, Homo sapiens
  Payload ID: 10750
  Gene Symbol: MYO19
  Gene Name: myosin XIX
  Uniprot ID: Q96H55
  ENSP ID: ENSP00000479518
MLQQVNGHNPGSDGQAREYLREDLQEFLGGEVLLYKLDDLTRVNPVTLETVLRCLQARYMADTFYTNAGCTLVALNPFKPVPQLYSPELMREYHAAPQPQKLKPHVFTVGEQTYRNVKSLIEPVNQSIVVSGESGAGKTWTSRCLMKFYAVVATSPASWESHKIAERIEQRILNSNPVMEAFGNACTLRNNNSSRFGKFIQLQLNRAQQMTGAAVQTYLLEKTRVACQASSERNFHIFYQICKGASEDERLQWHLPEGAAFSWLPNPERSLEEDCFEVTREAMLHLGIDTPTQNNIFKVLAGLLHLGNIQFAASEDEAQPCQPMDDAKYSVRTAASLLGLPEDVLLEMVQIRTIRAGRQQQVFRKPCARAECDTRRDCLAKLIYARLFDWLVSVINSSICADTDSWTTFIGLLDVYGFESFPDNSLEQLCINYANEKLQQHFVAHYLRAQQEEYAVEGLEWSFINYQDNQPCLDLIEGSPISICSLINEECRLNRPSSAAQLQTRIETALAGSPCLGHNKLSREPSFIVVHYAGPVRYHTAGLVEKNKDPIPPELTRLLQQSQDPLLMGLFPTNPKEKTQEEPPGQSRAPVLTVVSKFKASLEQLLQVLHSTTPHYIRCIKPNSQGQAQTFLQEEVLSQLEACGLVETIHISAAGFPIRVSHRNFVERYKLLRRLHPCTSSGPDSPYPAKGLPEWCPHSEEATLEPLIQDILHTLPVLTQAAAITGDSAEAMPAPMHCGRTKVFMTDSMLELLECGRARVLEQCARCIQGGWRRHRHREQERQWRAVMLIQAAIRSWLTRKHIQRLHAAATVIKRAWQKWRIRMACLAAKELDGVEEKHFSQAPCSLSTSPLQTRLLEAIIRLWPLGLVLANTAMGVGSFQRKLVVWACLQLPRGSPSSYTVQTAQDQAGVTSIRALPQGSIKFHCRKSPLRYADICPEPSPYSITGFNQILLERHRLIHVTSSAFTGLG

SEQ ID NO: 54436 - protein, 183 aa, Homo sapiens
  Payload ID: 10750
  Gene Symbol: MYO19
  Gene Name: myosin XIX
  ENSP ID: ENSP00000479566
MLQQTWTSRCLMKFYAVVATSPASWESHKIAERIEQRILNSNPVMEAFGNACTLRNNNSSRFGKFIQLQLNRAQQMTGAAVQTYLLEKTRVACQASSERNFHIFYQICKGASEDERLQWHLPEGAAFSWLPNPERSLEEDCFEVTREAMLHLGIDTPTQNNIFKVRRKATPLKFGRDDGQPFA

SEQ ID NO: 54437 - protein, 109 aa, Homo sapiens
  Payload ID: 10750
  Gene Symbol: MYO19
  Gene Name: myosin XIX
  ENSP ID: ENSP00000479711
  MOD_RES (1)..(1): Any amino acid
XIRTIRAGRQQQVFRKPCARAECDTRRDCLAKLIYARLFDWLVSVINSSICADTDSWTTFIGSKASLCWEHSRKRAIKPWMERQEPWVHCVTLGSSFPFFVSSCICLPA

SEQ ID NO: 54438 - protein, 44 aa, Homo sapiens
  Payload ID: 10750
  Gene Symbol: MYO19
  Gene Name: myosin XIX
  ENSP ID: ENSP00000479838
MLQQVNGHNPGSDGQAREYLREDLQEFLGGEVLLYKLDDLTRVN

SEQ ID NO: 54439 - protein, 636 aa, Homo sapiens
  Payload ID: 10750
  Gene Symbol: MYO19
  Gene Name: myosin XIX
  Uniprot ID: Q96H55
  ENSP ID: ENSP00000480125
MLQQVNGHNPGSDGQAREYLREDLQEFLGGEVLLYKLDDLTRVNPVTLETVLRCLQARYMADTFYTNAGCTLVALNPFKPVPQLYSPELMREYHAAPQPQKLKPHVFTVGEQTYRNVKSLIEPVNQSIVVSGESGAGKTWTSRCLMKFYAVVATSPASWESHKIAERIEQRILNSNPVMEAFGNACTLRNNNSSRFGKFIQLQLNRAQQMTGAAVQTYLLEKTRVACQASSERNFHIFYQICKGASEDERLQWHLPEGAAFSWLPNPERSLEEDCFEVTREAMLHLGIDTPTQNNIFKVLAGLLHLGNIQFAASEDEAQPCQPMDDAKYSVRTAASLLGLPEDVLLEMVQIRTIRAGRQQQVFRKPCARAECDTRRDCLAKLIYARLFDWLVSVINSSICADTDSWTTFIGLLDVYGFESFPDNSLEQLCINYANEKLQQHFVAHYLRAQQEEYAVEGLEWSFINYQDNQPCLDLIEGSPISICSLINEECRLNRPSSAAQLQTRIETALAGSPCLGHNKLSREPSFIVVHYAGPVRYHTAGLVEKNKDPIPPELTRLLQQSQDPLLMGLFPTNPKEKTQEEPPGQSRAPVLTVVSKFKASLEQLLQVLHSTTPHYIRCIKPNSQGQAQTFLQEEA

SEQ ID NO: 54440 - protein, 970 aa, Homo sapiens; identical to SEQ ID NO: 54435
  Payload ID: 10750
  Gene Symbol: MYO19
  Gene Name: myosin XIX
  Uniprot ID: Q96H55
  ENSP ID: ENSP00000480242

SEQ ID NO: 54441 - protein, 186 aa, Homo sapiens
  Payload ID: 10750
  Gene Symbol: MYO19
  Gene Name: myosin XIX
  ENSP ID: ENSP00000481514
MLQQVNGHNPGSDGQAREYLREDLQEFLGGEVLLYKLDDLTRVNPVTLETVLRCLQARYMADTFYTNAGCTLVALNPFKPVPQLYSPELMREYHAAPQPQKLKPHVFTVGEQTYRNVKSLIEPVNQSIVVSGESGAGKTWTSRCLMKFYAVVATSPASWESHKIAERIEQRILNSNPVMEAFGLSK

SEQ ID NO: 54442 - protein, 65 aa, Homo sapiens
  Payload ID: 10750
  Gene Symbol: MYO19
  Gene Name: myosin XIX
  ENSP ID: ENSP00000482079
MLQQVNGHNPGSDGQAREYLREDLQEFLGGEVLLYKLDDLTRVNPVTLETVLRCLQARYMADTFY

SEQ ID NO: 54443 - protein, 162 aa, Homo sapiens
  Payload ID: 10750
  Gene Symbol: MYO19
  Gene Name: myosin XIX
  ENSP ID: ENSP00000482828
MLQQVNGHNPGSDGQAREYLREDLQEFLGGEVLLYKLDDLTRVNPVTLETVLRCLQARYMADTFYTNAGCTLVALNPFKPVPQLYSPELMREYHAAPQPQKLKPHVFTVGEQTYRNVKSLIEPVNQSIVVSGESGAGKTWTSRCLMKFYAVVATSPASWESH

SEQ ID NO: 54444 - protein, 636 aa, Homo sapiens; identical to SEQ ID NO: 54439
  Payload ID: 10750
  Gene Symbol: MYO19
  Gene Name: myosin XIX
  Uniprot ID: Q96H55
  ENSP ID: ENSP00000487617

SEQ ID NO: 54445 - protein, 44 aa, Homo sapiens; identical to SEQ ID NO: 54438
  Payload ID: 10750
  Gene Symbol: MYO19
  Gene Name: myosin XIX
  ENSP ID: ENSP00000487708

SEQ ID NO: 54446 - protein, 162 aa, Homo sapiens; identical to SEQ ID NO: 54443
  Payload ID: 10750
  Gene Symbol: MYO19
  Gene Name: myosin XIX
  ENSP ID: ENSP00000487967

SEQ ID NO: 54447 - protein, 65 aa, Homo sapiens; identical to SEQ ID NO: 54442
  Payload ID: 10750
  Gene Symbol: MYO19
  Gene Name: myosin XIX
  ENSP ID: ENSP00000487988

SEQ ID NO: 54448 - protein, 15 aa, Homo sapiens
  Payload ID: 10750
  Gene Symbol: MYO19
  Gene Name: myosin XIX
  ENSP ID: ENSP00000487992
  MOD_RES (1)..(1): Any amino acid
XTPTQNNIFKSSRRG

SEQ ID NO: 54449 - protein, 317 aa, Homo sapiens; identical to SEQ ID NO: 54430
  Payload ID: 10750
  Gene Symbol: MYO19
  Gene Name: myosin XIX
  Uniprot ID: Q96H55
  ENSP ID: ENSP00000488204

SEQ ID NO: 54450 - protein, 176 aa, Homo sapiens; identical to SEQ ID NO: 54432
  Payload ID: 10750
  Gene Symbol: MYO19
  Gene Name: myosin XIX
  ENSP ID: ENSP00000488502

SEQ ID NO: 54451 - protein, 109 aa, Homo sapiens; identical to SEQ ID NO: 54437
  Payload ID: 10750
  Gene Symbol: MYO19
  Gene Name: myosin XIX
  ENSP ID: ENSP00000488511
  MOD_RES (1)..(1): Any amino acid

SEQ ID NO: 54452 - protein, 183 aa, Homo sapiens; identical to SEQ ID NO: 54436
  Payload ID: 10750
  Gene Symbol: MYO19
  Gene Name: myosin XIX
  ENSP ID: ENSP00000488557

SEQ ID NO: 54453 - protein, 186 aa, Homo sapiens; identical to SEQ ID NO: 54441
  Payload ID: 10750
  Gene Symbol: MYO19
  Gene Name: myosin XIX
  ENSP ID: ENSP00000488792

SEQ ID NO: 54454 - protein, 3530 aa, Homo sapiens
  Payload ID: 10751
  Gene Symbol: MYO15A
  Gene Name: myosin XVA
  Uniprot ID: Q9UKN7
  ENSP ID: ENSP00000205890
MAKEEDEEKKAKKGKKGKKAPEPEKPKRSLKGTSRLFMGFRDRTPKISKKGQFRSASAFFWGLHTGPQKTKRKRKARTVLKSTSKLMTQMRMGKKKRAMKGKKPSFMVIRFPGRRGYGRLRPRARSLSKASTAINWLTKKFLLKKAEESGSEQATVDAWLQRSSSRMGSRKLPFPSGAEILRPGGRLRRFPRSRSIYASGEPLGFLPFEDEAPFHHSGSRKSLYGLEGFQDLGEYYDYHRDGDDYYDRQSLHRYEEQEPYLAGLGPYSPAWPPYGDHYYGYPPEDPYDYYHPDYYGGPFDPGYTYGYGYDDYEPPYAPPSGYSSPYSYHDGYEGEAHPYGYYLDPYAPYDAPYPPYDLPYHTPYDVPYFDPYGVHYTVPYAEGVYGGGDEAIYPPEVPYFYPEESASAFVYPWVPPPIPSPHNPYAHAMDDIAELEEPEDAGVERQGTSFRLPSAAFFEQQGMDKPARSKLSLIRKFRLFPRPQVKLFGKEKLEVPLPPSLDIPLPLGDADEEEDEEELPPVSAVPYGHPFWGFLTPRQRNLQRALSAFGAHRGLGFGPEFGRPVPRPATSLARFLKKTLSEKKPIARLRGSQKARAGGPAVREAAYKRFGYKLAGMDPEKPGTPIVLRRAQPRARSSNDARRPPAPQPAPRTLSHWSALLSPPVPPRPPSSGPPPAPPLSPALSGLPRPASPYGSLRRHPPPWAAPAHVPPAPQASWWAFVEPPAVSPEVPPDLLAFPGPRPSFRGSRRRGAAFGFPGASPRASRRRAWSPLASPQPSLRSSPGLGYCSPLAPPSPQLSLRTGPFQPPFLPPARRPRSLQESPAPRRAAGRLGPPGSPLPGSPRPPSPPLGLCHSPRRSSLNLPSRLPHTWRRLSEPPTRAVKPQVRLPFHRPPRAGAWRAPLEHRESPREPEDSETPWTVPPLAPSWDVDMPPTQRPPSPWPGGAGSRRGFSRPPPVPENPFLQLLGPVPSPTLQPEDPAADMTRVFLGRHHEPGPGQLTKSAGPTPEKPEEEATLGDPQLPAETKPPTPAPPKDVTPPKDITPPKDVLPEQKTLRPSLSYPLAACDQTRATWPPWHRWGTLPQAAAPLAPIRAPEPLPKGGERRQAAPGRFAVVMPRVQKLSSFQRVGPATLKPQVQPIQDPKPRACSLRWSCLWLRADAYGPWPRVHTHPQSCHLGPGAACLSLRGSWEEVGPPSWRNKMHSIRNLPSMRFREQHGEDGVEDMTQLEDLQETTVLSNLKIRFERNLIYTYIGSILVSVNPYQMFGIYGPEQVQQYNGRALGENPPHLFAVANLAFAKMLDAKQNQCIIISGESGSGKTEATKLILRYLAAMNQKREVMQQIKILEATPLLESFGNAKTVRNDNSSRFGKFVEIFLEGGVISGAITSQYLLEKSRIVFQAKNERNYHIFYELLAGLPAQLRQAFSLQEAETYYYLNQGGNCEIAGKSDADDFRRLLAAMEVLGFSSEDQDSIFRILASILHLGNVYFEKYETDAQEVASVVSAREIQAVAELLQISPEGLQKAITFKVTETMREKIFTPLTVESAVDARDAIAKVLYALLFSWLITRVNALVSPRQDTLSIAILDIYGFEDLSFNSFEQLCINYANENLQYLFNKIVFQEEQEEYIREQIDWQEITFADNQPCINLISLKPYGILRILDDQCCFPQATDHTFLQKCHYHHGANPLYSKPKMPLPEFTIKHYAGKVTYQVHKFLDKNHDQVRQDVLDLFVRSRTRVVAHLFSSHAPQAAPQRLGKSSSVTRLYKAHTVAAKFQQSLLDLVEKMERCNPLFMRCLKPNHKKEPGLFEPDVVMAQLRYSGVLETVRIRKEGFPVRLPFQGFIDRYCCLVALKHDLPANGDMCVSVLSRLCKVMPNMYRVGVSKLFLKEHLYQLLESMREHVLNLAALTLQRCLRGFFIKRRFRSLRHKIILLQSRARGYLARQRYQQMRRSLVKFRSLVHAYVSRRRYLKLRAEWRCQVEGALLWEQEELSKREVVAVGHLEVPAELAGLLQAVAGLGLAQVPQVAPVRTPRLQAEPRVTLPLDINNYPMAKFVQCHFKEPAFGMLTVPLRTPLTQLPAEHHAEAVSIFKLILRFMGDPHLHGARENIFGNYIVQKGLAVPELRDEILAQLANQVWHNHNAHNAERGWLLLAACLSGFAPSPCFNKYLLKFVSDYGRNGFQAVCQHRLMQAMGRAQQQGSGAARTLPPTQLEWTATYEKASMALDVGCFNGDQFSCPVHSWSTGEEVAGDILRHRGLADGWRGWTVAMKNGVQWAELAGHDYVLDLVSDLELLRDFPRQKSYFIVGTEGPAASRGGPKVVFGNSWDSDEDMSTRPQPQEHMPKVLDSDGYSSHNQDGTNGETEAQRGTATHQESDSLGEPAVPHKGLDCYLDSLFDPVLSYGDADLEKPTAIAYRMKGGGQPGGGSSSGTEDTPRRPPEPKPIPGLDASTLALQQAFIHKQAVLLAREMTLQATALQQQPLSAALRSLPAEKPPAPEAQPTSVGTGPPAKPVLLRATPKPLAPAPLAKAPRLPIKPVAAPVLAQDQASPETTSPSPELVRYSTLNSEHFPQPTQQIKNIVRQYQQPFRGGRPEALRKDGGKVFMKRPDPHEEALMILKGQMTHLAAAPGTQVSREAVALVKPVTSAPRPSMAPTSALPSRSLEPPEELTQTRLHRLINPNFYGYQDAPWKIFLRKEVFYPKDSYSHPVQLDLLFRQILHDTLSEACLRISEDERLRMKALFAQNQLDTQKPLVTESVKRAVVSTARDTWEVYFSRIFPATGSVGTGVQLLAVSHVGIKLLRMVKGGQEAGGQLRVLRAYSFADILFVTMPSQNMLEFNLASEKVILFSARAHQVKTLVDDFILELKKDSDYVVAVRNFLPEDPALLAFHKGDIIHLQPLEPPRVGYSAGCVVRRKVVYLEELRRRGPDFGWRFGTIHGRVGRFPSELVQPAAAPDFLQLPTEPGRGRAAAVAAAVASAAAAQEVGRRREGPPVRARSADHGEDALALPPYTMLEFAQKYFRDPQRRPQDGLRLKSKEPRESRTLEDMLCFTKTPLQESLIELSDSSLSKMATDMFLAVMRFMGDAPLKGQSDLDVLCNLLKLCGDHEVMRDECYCQVVKQITDNTSSKQDSCQRGWRLLYIVTAYHSCSEVLHPHLTRFLQDVSRTPGLPFQGIAKACEQNLQKTLRFGGRLELPSSIELRAMLAGRSSKRQLFLLPGGLERHLKIKTCTVALDVVEEICAEMALTRPEAFNEYVIFVVTNRGQHVCPLSRRAYILDVASEMEQVDGGYMLWFRRVLWDQPLKFENELYVTMHYNQVLPDYLKGLFSSVPASRPSEQLLQQVSKLASLQHRAKDHFYLPSVREVQEYIPAQLYRTTAGSTWLNLVSQHRQQTQALSPHQARAQFLGLLSALPMFGSSFFFIQSCSNIAVPAPCILAINHNGLNFLSTETHELMVKFPLKEIQSTRTQRPTANSSYPYVEIALGDVAAQRTLQLQLEQGLELCRVVAVHVENLLSAHEKRLTLPPSEITLL

SEQ ID NO: 54455 - protein, 797 aa, Homo sapiens
  Payload ID: 10751
  Gene Symbol: MYO15A
  Gene Name: myosin XVA
  Uniprot ID: Q9UKN7
  ENSP ID: ENSP00000408800
MKALFAQNQLDTQKPLVTESVKRAVVSTARDTWEVYFSRIFPATGSVGTGVQLLAVSHVGIKLLRMVKGGQEAGGQLRVLRAYSFADILFVTMPSQNMLEFNLASEKVILFSARAHQVKTLVDDFILELKKDSDYVVAVRNFLPEDPALLAFHKGDIIHLQPLEPPRVGYSAGCVVRRKVVYLEELRRRGPDFGWRFGTIHGRVGRFPSELVQPAAAPDFLQLPTEPGRGRAAAVAAAVASAAAAQEVGRRREGPPVRARSADHGEDALALPPYTMLEFAQKYFRDPQRRPQDGLRLKSKEPRESRTLEDMLCFTKTPLQESLIELSDSSLSKMATDMFLAVMRFMGDAPLKGQSDLDVLCNLLKLCGDHEVMRDECYCQVVKQITDNTSSKQDSCQRGWRLLYIVTAYHSCSEVLHPHLTRFLQDVSRTPGLPFQGIAKACEQNLQKTLRFGGRLELPSSIELRAMLAGRSSKRQLFLLPGGLERHLKIKTCTVALDVVEEICAEMALTRPEAFNEYVIFVVTNRGQHVCPLSRRAYILDVASEMEQVDGGYMLWFRRVLWDQPLKFENELYVTMHYNQVLPDYLKGLFSSVPASRPSEQLLQQVSKLASLQHRAKDHFYLPSVREVQEYIPAQLYRTTAGSTWLNLVSQHRQQTQALSPHQARAQFLGLLSALPMFGSSFFFIQSCSNIAVPAPCILAINHNGLNFLSTETHELMVKFPLKEIQSTRTQRPTANSSYPYVEIALGDVAAQRTLQLQLEQVRAGEVLDGRGLSLSPAGTGTVSCGGRARGEPAQCP

SEQ ID NO: 54456 - protein, 153 aa, Homo sapiens
  Payload ID: 10751
  Gene Symbol: MYO15A
  Gene Name: myosin XVA
  ENSP ID: ENSP00000451782
MLCFTKTPLQESLIELSDSSLSKMATDMFLAVMRFMGDAPLKGQSDLDVLCNLLKLCGDHEVMRDECYCQVVKQITDNTSSKQDSCQRGWRLLYIVTAYHSCSEVLHPHLTRFLQDVSRTPGLPFQGIAKACEQNLQKTLRFGGRLELPSSIE

SEQ ID NO: 54457 - protein, 35 aa, Homo sapiens
  Payload ID: 10751
  Gene Symbol: MYO15A
  Gene Name: myosin XVA
  ENSP ID: ENSP00000451925
MLCFTKTPLQESLIELSDSSLSKMATDMFLAVRGP

SEQ ID NO: 54458 - protein, 103 aa, Homo sapiens
  Payload ID: 10751
  Gene Symbol: MYO15A
  Gene Name: myosin XVA
  ENSP ID: ENSP00000464462
MKALFAQNQLDTQKPLVTESVKRAVVSTARDTWEVYFSRIFPATRGHWCAAPSCVPRGHQTPEDGQGWPGGRRAAAGPACIQLCRYPVCDHALPEHAGVQPGQ

SEQ ID NO: 54459 - protein, 257 aa, Homo sapiens
  Payload ID: 10751
  Gene Symbol: MYO15A
  Gene Name: myosin XVA
  ENSP ID: ENSP00000465910
LCNLLKLCGDHEVMRDECYCQVVKQITDNTSSKQDSCQRGWRLLYIVTAYHSCSEVLHPHLTRFLQDVSRTPGLPFQGIAKACEQNLQKTLRFGGRLELPSSIELRAMLAGRSSKRQLFLLPGGLERHLKIKTCTVALDVVEEICAEMALTRPEAFNEYVIFVVTNRGGKSRSTSQPSSTVQRQARPGSTWSASTGSRHRRSAPTRPVPSFWASSAPYLCSAPPSSSSRAAATLLCQPLASLPSTTMASTFSAQRLM

SEQ ID NO: 54460 - protein, 120 aa, Homo sapiens
  Payload ID: 10751
  Gene Symbol: MYO15A
  Gene Name: myosin XVA
  ENSP ID: ENSP00000466630
  MOD_RES (1)..(1): Any amino acid
XSCSEVLHPHLTRFLQDVSRTPGLPFQGIAKACEQNLQKTLRFGGRLELPSSIELRAMLAGRSSKRQLFLLPGGLERHLKIKTCTVALDVVEEICAEMALTRPEAFNEYVIFVVTNRGPA

SEQ ID NO: 54461 - protein, 123 aa, Homo sapiens
  Payload ID: 10751
  Gene Symbol: MYO15A
  Gene Name: myosin XVA
  ENSP ID: ENSP00000467989
MLCFTKTPLQESLIELSDSSLSKMATDMFLAVMRFMGDAPLKGQSDLDVLCNLLKLCGDHEVMRDECYCQVVKQITDNTSSKQDSCQRGWRLLYIVTAYHSCSEVLHPHLTRFLQDVSRTPGL

SEQ ID NO: 54462 - protein, 3530 aa, Homo sapiens
  Payload ID: 10751
  Gene Symbol: MYO15A
  Gene Name: myosin XVA
  ENSP ID: ENSP00000481642
MAKEEDEEKKAKKGKKGKKAPEPEKPKRSLKGTSRLFMGFRDRTPKISKKGQFRSASAFFWGLHTGPQKTKRKRKARTVLKSTSKLMTQMRMGKKKRAMKGKKPSFMVIRFPGRRGYGRLRPRARSLSKASTAINWLTKKFLLKKAEESGSEQATVDAWLQRSSSRMGSRKLPFPSGAEILRPGGRLRRFPRSRSIYASGEPLGFLPFEDEAPFHHSGSRKSLYGLEGFQDLGEYYDYHRDGDDYYDRQSLHRYEEQEPYLAGLGPYSPAWPPYGDHYYGYPPEDPYDYYHPDYYGGPFDPGYTYGYGYDDYEPPYAPPSGYSSPYSYHDGYEGEAHPYGYYLDPYAPYDAPYPPYDLPYHTPYDVPYFDPYGVHYTVPYAEGVYGGGDEAIYPPEVPYFYPEESASAFVYPWVPPPIPSPHNPYAHAMDDIAELEEPEDAGVERQGTSFRLPSAAFFEQQGMDKPARSKLSLIRKFRLFPRPQVKLFGKEKLEVPLPPSLDIPLPLGDADEEEDEEELPPVSAVPYGHPFWGFLTPRQRNLQRALSAFGAHRGLGFGPEFGRPVPRPATSLARFLKKTLSEKKPIARLRGSQKARAGGPAVREAAYKRFGYKLAGMDPEKPGTPIVLRRAQPRARSSNDARRPPAPQPAPRTLSHWSALLSPPVPPRPPSSGPPPAPPLSPALSGLPRPASPYGSLRRHPPPWAAPAHVPPAPQASWWAFVEPPAVSPEVPPDLLAFPGPRPSFRGSRRRGAAFGFPGASPRASRRRAWSPLASPQPSLRSSPGLGYCSPLAPPSPQLSLRTGPFQPPFLPPARRPRSLQESPAPRRAAGRLGPPGSPLPGSPRPPSPPLGLCHSPRRSSLNLPSRLPHTWRRLSEPPTRAVKPQVRLPFHRPPRAGAWRAPLEHRESPREPEDSETPWTVPPLAPSWDVDMPPTQRPPSPWPGGAGSRRGFSRPPPVPENPFLQLLGPVPSPTLQPEDPAADMTRVFLGRHHEPGPGQLTKSAGPTPEKPEEEATLGDPQLPAETKPPTPAPPKDVTPPKDITPPKDVLPEQKTLRPSLSYPLAACDQTRATWPPWHRWGTLPQAAAPLAPIRAPEPLPKGGERRQAAPGRFAVVMPRVQKLSSFQRVGPATLKPQVQPIQDPKPRACSLRWSCLWLRADAYGPWPRVHTHPQSCHLGPGAACLSLRGSWEEVGPPSWRNKMHSIRNLPSMRFREQHGEDGVEDMTQLEDLQETTVLSNLKIRFERNLIYTYIGSILVSVNPYQMFGIYGPEQVQQYNGRALGENPPHLFAVANLAFAKMLDAKQNQCIIISGESGSGKTEATKLILRYLAAMNQKREVMQQVQILEATPLLESFGNAKTVRNDNSSRFGKFVEIFLEGGVISGAITSQYLLEKSRIVFQAKNERNYHIFYELLAGLPAQLRQAFSLQEAETYYYLNQGGNCEIAGKSDADDFRRLLAAMEVLGFSSEDQDSIFRILASILHLGNVYFEKYETDAQEVASVVSAREIQAVAELLQISPEGLQKAITFKVTETMREKIFTPLTVESAVDARDAIAKVLYALLFSWLITRVNALVSPRQDTLSIAILDIYGFEDLSFNSFEQLCINYANENLQYLFNKIVFQEEQEEYIREQIDWQEITFADNQPCINLISLKPYGILRILDDQCCFPQATDHTFLQKCHYHHGANPLYSKPKMPLPEFTIKHYAGKVTYQVHKFLDKNHDQVRQDVLDLFVRSRTRVVAHLFSSHAPQAAPQRLGKSSSVTRLYKAHTVAAKFQQSLLDLVEKMERCNPLFMRCLKPNHKKEPGLFEPDVVMAQLRYSGVLETVRIRKEGFPVRLPFQGFIDRYCCLVALKHDLPANGDMCVSVLSRLCKVMPNMYRVGVSKLFLKEHLYQLLESMREHVLNLAALTLQRCLRGFFIKRRFRSLRHKIILLQSRARGYLARQRYQQMRRSLVKFRSLVHAYVSRRRYLKLRAEWRCQVEGALLWEQEELSKREVVAVGHLEVPAELAGLLQAVAGLGLAQVPQVAPVRTPRLQAEPRVTLPLDINNYPMAKFVQCHFKEPAFGMLTVPLRTPLTQLPAEHHAEAVSIFKLILRFMGDPHLHGARENIFGNYIVQKGLAVPELRDEILAQLANQVWHNHNAHNAERGWLLLAACLSGFAPSPCFNKYLLKFVSDYGRNGFQAVCQHRLMQAMGRAQQQGSGAARTLPPTQLEWTATYEKASMALDVGCFNGDQFSCPVHSWSTGEEVAGDILRHRGLADGWRGWTVAMKNGVQWAELAGHDYVLDLVSDLELLRDFPRQKSYFIVGTEGPAASRGGPKVVFGNSWDSDEDMSTRPQPQEHMPKVLDSDGYSSHNQDGTNGETEAQRGTATHQESDSLGEPAVPHKGLDCYLDSLFDPVLSYGDADLEKPTAIAYRMKGGGQPGGGSSSGTEDTPRRPPEPKPIPGLDASTLALQQAFIHKQAVLLAREMTLQATALQQQPLSAALRSLPAEKPPAPEAQPTSVGTGPPAKPVLLRATPKPLAPAPLAKAPRLPIKPVAAPVLAQDQASPETTSPSPELVRYSTLNSEHFPQPTQQIKNIVRQYQQPFRGGRPEALRKDGGKVFMKRPDPHEEALMILKGQMTHLAAAPGTQVSREAVALVKPVTSAPRPSMAPTSALPSRSLEPPEELTQTRLHRLINPNFYGYQDAPWKIFLRKEVFYPKDSYSHPVQLDLLFRQILHDTLSEACLRISEDERLRMKALFAQNQLDTQKPLVTESVKRAVVSTARDTWEVYFSRIFPATGSVGTGVQLLAVSHVGIKLLRMVKGGQEAGGQLRVLRAYSFADILFVTMPSQNMLEFNLASEKVILFSARAHQVKTLVDDFILELKKDSDYVVAVRNFLPEDPALLAFHKGDIIHLQPLEPPRVGYSAGCVVRRKVVYLEELRRRGPDFGWRFGTIHGRVGRFPSELVQPAAAPDFLQLPTEPGRGRAAAVAAAVASAAAAQEVGRRREGPPVRARSADHGEDALALPPYTMLEFAQKYFRDPQRRPQDGLRLKSKEPRESRTLEDMLCFTKTPLQESLIELSDSSLSKMATDMFLAVMRFMGDAPLKGQSDLDVLCNLLKLCGDHEVMRDECYCQVVKQITDNTSSKQDSCQRGWRLLYIVTAYHSCSEVLHPHLTRFLQDVSRTPGLPFQGIAKACEQNLQKTLRFGGRLELPSSIELRAMLAGRSSKRQLFLLPGGLERHLKIKTCTVALDVVEEICAEMALTRPEAFNEYVIFVVTNRGQHVCPLSRRAYILDVASEMEQVDGGYMLWFRRVLWDQPLKFENELYVTMHYNQVLPDYLKGLFSSVPASRPSEQLLQQVSKLASLQHRAKDHFYLPSVREVQEYIPAQLYRTTAGSTWLNLVSQHRQQTQALSPHQARAQFLGLLSALPMFGSSFFFIQSCSNIAVPAPCILAINHNGLNFLSTETHELMVKFPLKEIQSTRTQRPTANSSYPYVEIALGDVAAQRTLQLQLEQGLELCRVVAVHVENLLSAHEKRLTLPPSEITLL

SEQ ID NO: 54463 - protein, 20 aa, Homo sapiens
  Payload ID: 10752
  Gene Symbol: MYO15B
  Gene Name: myosin XVB
  ENSP ID: ENSP00000487598
  MOD_RES (1)..(1): Any amino acid
XLPVATLEPAPCPPLEPGTQ

SEQ ID NO: 54464 - protein, 1530 aa, Homo sapiens
  Payload ID: 10752
  Gene Symbol: MYO15B
  Gene Name: myosin XVB
  ENSP ID: ENSP00000487744
MKEASGVGGGHSPMCPPHCHMPPGPAGEWPGATVQQPRQRAPTALLQPDAAGPGGGGVSAGVAVLGACPSASEGVLPRPPGRSAPQPPEYPGRPDMAVPGWSAMVRSRLTATSTSQATDHTFLQKSHYHHGDHPSYAKPRLPLPVFTVRHYAGTVTYQVHKFLNRNRDQLDPAVVEMLGQSQLQLVGSLFQEAEPQSRGGRGRPTLASRFQQALEDLIARLGRSHVYFIQCLTPNPGKLPGLFDVGHVTEQLHQAAILEAVGTRSANFPVRVPFEAFLASFQALGSEGQEDLSDREKCGAVLSQVLGAESPLYHLGATKVLLQEQGWQRLEELRDQQRSQALVDLHRSFHTCISRQRVLPRMQARMRGFQARKRYLRRRAALGQLNTILLVAQPLLQRRQRLQLGRWQGWHSSERALERVPSMELGRLEIPAELAVMLKTAESHRDALAGSITECLPPEVPARPSLTLPADIDLFPFSSFVAIGFQEPSLPRPGQPLAKPLTQLDGDNPQRALDINKVMLRLLGDGSLESWQRQIMGAYLVRQGQCRPGLRNELFSQLVAQLWQNPDEQQSQRGWALMAVLLSAFPPLPVLQKPLLKFVSDQAPRGMAALCQHKLLGALEQSQLASGATRAHPPTQLEWLAGWRRGRMALDVFTFSEECYSAEVESWTTGEQLAGWILQSRGLEAPPRGWSVSLHSRDAWQDLAGCDFVLDLISQTEDLGDPARPRSYPITPLGSAEAIPLAPGIQAPSLPPGPPPGPAPTLPSRDHTGEVQRSGSLDGFLDQIFQPVISSGLSDLEQSWALSSRMKGGGAIGPTQQGYPMVYPGMIQMPAYQPGMVPAPMPMMPAMGTVPAMPAMVVPPQPPLPSLDAGQLAVQQQNFIQQQALILAQQMTAQAMSLSLEQQMQQRQQQARASEAASQASPSAVTSKPRKPPTPPEKPQRDLGSEGGCLRETSEEAEDRPYQPKSFQQKRNYFQRMGQPQITVRTMKPPAKVHIPQGEAQEEEEEEEEEEEQEEQEVETRAVPSPPPPPIVKKPLKQGGAKAPKEAEAEPAKETAAKGHGQGPAQGRGTVVRSSDSKPKRPQPSREIGNIIRMYQSRPGPVPVPVQPSRPPKAFLRKIDPKDEALAKLGINGAHSSPPMLSPSPGKGPPPAVAPRPKAPLQLGPSSSIKEKQGPLLDLFGQKLPIAHTPPPPPAPPLPLPEDPGTLSAERRCLTQPVEDQGVSTQLLAPSGSVCFSYTGTPWKLFLRKEVFYPRENFSHPYYLRLLCEQILRDTFSESCIRISQNERRKMKDLLGGLEVDLDSLTTTEDSVKKRIVVAARDNWANYFSRFFPVSGESGSDVQLLAVSHRGLRLLKVTQGPGLRPDQLKILCSYSFAEVLGVECRGGSTLELSLKSEQLVLHTARARAIEALVELFLNELKKDSGYVIALRSYITDNCSLLSFHRGDLIKLLPVATLEPGWQFGSAGGRSGLFPADIVQPAAAPDFSFSKEQRSGWHKGQLSNGEPGLARWDRASEVRKMGEGQAEARPA

SEQ ID NO: 54465 - protein, 278 aa, Homo sapiens
  Payload ID: 10752
  Gene Symbol: MYO15B
  Gene Name: myosin XVB
  ENSP ID: ENSP00000487752
  MOD_RES (1)..(1): Any amino acid
XATSLSSVAYAFLPDSHSYTMQEFARRYFRRSQALLGQTDGGAAGKDTDSLVQYTKAPIQESLLSLSDDVSKLAVASFLALMRFMGDQSKPRGKDEMDLLYELLKLCQQEKLRDEIYCQVIKQVTGHPRPLMPYLTKFLQDSGPSQELARSSQEHLQRTVKYGGRRRMPPPGEMKAFLKGQAIRLLLIHLPGGVDYRTNIQTFTVAAEVQEELCRQMGITEPQEVQEFALFLIKEKSQLVRPLQPAEYLNSVVVDQDVSLHSRRLHWETPLHFDNSTY

SEQ ID NO: 54466 - protein, 1543 aa, Homo sapiens
  Payload ID: 10752
  Gene Symbol: MYO15B
  Gene Name: myosin XVB
  ENSP ID: ENSP00000487811
MGRNQRKAPQRLERPGRPASGEQESGSASADGAPSRERRSDRGQADRAKPAAEPATAGGQGTPGGRRKPTAEGNGGCRRPGAGLSPKAQERQSNAQRQGRGPRGGRGGRLEEGSLSGGEELGGRRRRKRKDKGPSARRGRRTPRSLNGDTSGGDGGSSCPDSETREAQESGSQRGTARELRPTPEPTDMGSEGTKTGPESALEPSSDGLDSDWPHADTRGREGSSGTGPLGASEHSGGDSDSSPLGTGPGRGSRAAMASRTFEDSSRAPRDTGPAKDASDNRAQRGAEPETMQASTARAPRHQVGKAVGQVPAAAGEGEAGAAAGAGPEDPAPLAALLVVRRLLARPPPGAASQAVGPRRAGLKERLLSVARALGLLRWLRRRLRLRRRPPEGEGQGTGPRASEGWGRRKPDEGRGHGRGSKGRGRGKADEGRGHERGDEGRGRGKADEGRGHERGYEGRGCGKADEGRGHERGDEGRDHQRGYEGWGREPGLRHRLALRLAGLAGLGGMPRASPGGRSPQVPTSPVPGDPFDQEDETPDPKFAVVFPRIHRAGRASSSRSSEEASADAPTGEGRGWPRAGVGGHSEGCRTSGEGVSGLRRGSLLAPTAPDGPSLDESGSSSEAELETLNDEPPVRWAQGSGPHEGPRLGAAVLLPRLSLETRLQQEGDPGLRGSLRELWEPEDEDEAVLERDLELSLRPGLEAPPFPGAKGRSLGDGLEDMEDLARLRHIFAIVASAYDLAQNTGQDPCILLCGHSGSGKTEAAKKIMQFLSSLEQDQTGNRECQVEDMLPILSSFGHAKTILNANASRFGQVFCLYLQQGVIVGASVSHYLLETSRVVFQAQAERSFHVFYKLLAGLDSIERERLSLQGPETYYYLNQGQACRLQGKEDAQDFEGLLKALQGLGLCPEELNAVWAVLAAILQLGNICFSSSERESQEVAAVSSWAEIHTAARLLRVPPECLEGAVTRRVTETPYGQVSRSLPVESAFDARDALAKALYSRLFHRLLRRTNARLAPPGEGGSIGTVTVVDAYGFEALRVNGLEQLCNNLASERLQLFSSQMLLAQEEPPRESCLDLLVDQPHSLLSILDAQTWLSQATDHTFLQKSHYHHGDHPSYAKPRLPLPVFTVRHYAGTVTYQVHKFLNRNRDQLDPAVVEMLGQSQLQLVGSLFQEAEPQSRGGRGRPTLASRFQQALEDLIARLGRSHVYFIQCLTPNPGKLPGLFDVGHVTEQLHQAAILEAVGTRSANFPVRVPFEAFLASFQALGSEGQEDLSDREKCGAVLSQVLGAESPLYHLGATKVLLQEQGWQRLEELRDQQRSQALVDLHRSFHTCISRQRVLPRMQARMRGFQARSAGVGARAEVGGPVFTHSSNSCWLTVCLIYPWARCWKRYLRRRAALGQLNTILLVAQPLLQRRQRLQELGRLEIPAELAVMLKTAESHRDALAGSITECLPPEVPARPSLTLPADIDLFPFSSFVAIGFQARAATGEAPNPAGWRQPSACPGHQQSDAAAPGGRIPGVLAEADHGRIPGAAGAVPARAAE

SEQ ID NO: 54467 - protein, 760 aa, Homo sapiens
  Payload ID: 10752
  Gene Symbol: MYO15B
  Gene Name: myosin XVB
  ENSP ID: ENSP00000487864
MGRNQRKAPQRLERPGRPASGEQESGSASADGAPSRERRSDRGQADRAKPAAEPATAGGQGTPGGRRKPTAEGNGGCRRPGAGLSPKAQERQSNAQRQGRGPRGGRGGRLEEGSLSGGEELGGRRRRKRKDKGPSARRGRRTPRSLNGDTSGGDGGSSCPDSETREAQESGSQRGTARELRPTPEPTDMGSEGTKTGPESALEPSSDGLDSDWPHADTRGREGSSGTGPLGASEHSGGDSDSSPLGTGPGRGSRAAMASRTFEDSSRAPRDTGPAKDASDNRAQRGAEPETMQASTARAPRHQVGKAVGQVPAAAGEGEAGAAAGAGPEDPAPLAALLVVRRLLARPPPGAASQAVGPRRAGLKERLLSVARALGLLRWLRRRLRLRRRPPEGEGQGTGPRASEGWGRRKPDEGRGHGRGSKGRGRGKADEGRGHERGDEGRGRGKADEGRGHERGYEGRGCGKADEGRGHERGDEGRDHQRGYEGWGREPGLRHRLALRLAGLAGLGGMPRASPGGRSPQVPTSPVPGDPFDQEDETPDPKFAVVFPRIHRAGRASSSRSSEEASADAPTGEGRGWPRAGVGGHSEGCRTSGEGVSGLRRGSLLAPTAPDGPSLDESGSSSEAELETLNDEPPVRWAQGSGPHEGPRLGAAVLLPRLSLETRLQQEGDPGLRGSLRELWEPEDEDEAVLERDLELSLRPGLEAPPFPGAKGRSLGDGLEDMEDLARLRLAGAVPKLPSPAHSSSYPPCPHLYELRVDPY

SEQ ID NO: 54468 - protein, 66 aa, Homo sapiens
  Payload ID: 10752
  Gene Symbol: MYO15B
  Gene Name: myosin XVB
  ENSP ID: ENSP00000487895
TKVLLQEQGWQRLEELRDQQRSQALVDLHRSFHTCISRQRVLPRMQARMRGFQASLSSHIPPTAVG

SEQ ID NO: 54469 - protein, 112 aa, Homo sapiens
  Payload ID: 10752
  Gene Symbol: MYO15B
  Gene Name: myosin XVB
  ENSP ID: ENSP00000487954
CNNLASERLQLFSSQMLLAQEEEECRRELLSWVPVPQPPRESCLDLLVDQPHSLLSILDAQTWLSQTEFGSCCPGWSAMVRSRLTATSTSQATDHTFLQKSHYHHGDHPSYA

SEQ ID NO: 54470 - protein, 256 aa, Homo sapiens
  Payload ID: 10752
  Gene Symbol: MYO15B
  Gene Name: myosin XVB
  ENSP ID: ENSP00000488194
VHKFLNRNRDQLDPAVVEMLGQSQLQLVGSLFQEAEPQSRGGRGRPTLASRFQQALEDLIARLGRSHVYFIQCLTPNPGKLPGLFDVGHVTEQLHQAAILEAVGTRSANFPVRVPFEAFLASFQALGSEGQEDLSDREKCGAVLSQVLGAESPLYHLGATKVLLQEQGWQRLEELRDQQRSQALVDLHRSFHTCISRQRVLPRMQARMRGFQARKRYLRRRAALGQLNTILLVAQPLLQRRQRLQLGRWQGWHSSE

SEQ ID NO: 54471 - protein, 192 aa, Homo sapiens
  Payload ID: 10752
  Gene Symbol: MYO15B
  Gene Name: myosin XVB
  ENSP ID: ENSP00000488226
  MOD_RES (1)..(1): Any amino acid
XKQVTGHPRPEHCTRGWSFLSLLTGFFPPSTRLMPYLTKFLQDSGPSQELARSSQEHLQRTVKYGGRRRMPPPGEMKAFLKGQAIRLLLIHLPGGVDYRTNIQTFTVAAEVQEELCRQMGITEPQEVQEFALFLIKEKSKLGDGASRWGHSPAQGPAGAAPAARRIPQQRGSGPGREPAQPAAPLGDPTALR

SEQ ID NO: 54472 - protein, 85 aa, Homo sapiens
  Payload ID: 10752
  Gene Symbol: MYO15B
  Gene Name: myosin XVB
  ENSP ID: ENSP00000488316
  MOD_RES (1)..(1): Any amino acid
XPKRPQPSREIGNIIRMYQSRPGPVPVPVQPSSFPEENRPQGRGSGQAGYQRCPLVPADAVPQPRKGPPASCGSSTQGPATAWAL

SEQ ID NO: 54473 - protein, 156 aa, Homo sapiens
  Payload ID: 10752
  Gene Symbol: MYO15B
  Gene Name: myosin XVB
  ENSP ID: ENSP00000488354
  MOD_RES (1)..(1): Any amino acid
XFAEVLGVECRGGSTLELSLKSEQLVLHTARARAIEALVELFLNELKKDSGYVIALRSYITDNCSLLSFHRGDLIKLLPVATLEPGWQFGSAGGRSGLFPADIVQPAAAPDFSFSKEQRSGWHKGQLSNGEPGLARWDRASEVRKMGEGQAEARPA

SEQ ID NO: 54474 - protein, 103 aa, Homo sapiens
  Payload ID: 10752
  Gene Symbol: MYO15B
  Gene Name: myosin XVB
  ENSP ID: ENSP00000488398
QEKLRDEIYCQVIKQVTGHPRPEHCTRGWSFLSLLTGFFPPSTRLMPYLTKFLQDSGPSQELARSSQEHLQRTVKYGGRRRMPPPERTSDSPASYSPAGGCGL

SEQ ID NO: 54475 - protein, 105 aa, Homo sapiens
  Payload ID: 10752
  Gene Symbol: MYO15B
  Gene Name: myosin XVB
  ENSP ID: ENSP00000488495
  MOD_RES (1)..(1): Any amino acid
XAYQPGMVPAPMPMMPAMGTVPAMPATASQPGCRAAGRPAAELYPAAGANPGPADDSPGHVPVPGAADAAAAAAGSGLRGCVPGLTLSRHLQAQEAPHTPGEATA

SEQ ID NO: 54476 - protein, 72 aa, Homo sapiens
  Payload ID: 10752
  Gene Symbol: MYO15B
  Gene Name: myosin XVB
  ENSP ID: ENSP00000488510
  MOD_RES (1)..(1): Any amino acid
XQDVSLHSRRLHWETPLHFDNSTYISTHYSQVLWDYLQGKLPVSAKADAQLARLAALQHLSKANRNTPSGTC

SEQ ID NO: 54477 - protein, 3064 aa, Homo sapiens
  Payload ID: 10752
  Gene Symbol: MYO15B
  Gene Name: myosin XVB
  ENSP ID: ENSP00000488624
MGRNQRKAPQRLERPGRPASGEQESGSASADGAPSRERRSDRGQADRAKPAAEPATAGGQGTPGGRRKPTAEGNGGCRRPGAGLSPKAQERQSNAQRQGRGPRGGRGGRLEEGSLSGGEELGGRRRRKRKDKGPSARRGRRTPRSLNGDTSGGDGGSSCPDSETREAQESGSQRGTARELRPTPEPTDMGSEGTKTGPESALEPSSDGLDSDWPHADTRGREGSSGTGPLGASEHSGGDSDSSPLGTGPGRGSRAAMASRTFEDSSRAPRDTGPAKDASDNRAQRGAEPETMQASTARAPRHQVGKAVGQVPAAAGEGEAGAAAGAGPEDPAPLAALLVVRRLLARPPPGAASQAVGPRRAGLKERLLSVARALGLLRWLRRRLRLRRRPPEGEGQGTGPRASEGWGRRKPDEGRGHGRGSKGRGRGKADEGRGHERGDEGRGRGKADEGRGHERGYEGRGCGKADEGRGHERGDEGRDHQRGYEGWGREPGLRHRLALRLAGLAGLGGMPRASPGGRSPQVPTSPVPGDPFDQEDETPDPKFAVVFPRIHRAGRASSSRSSEEASADAPTGEGRGWPRAGVGGHSEGCRTSGEGVSGLRRGSLLAPTAPDGPSLDESGSSSEAELETLNDEPPVRWAQGSGPHEGPRLGAAVLLPRLSLETRLQQEGDPGLRGSLRELWEPEDEDEAVLERDLELSLRPGLEAPPFPGAKGRSLGDGLEDMEDLARLRHIFAIVASAYDLAQNTGQDPCILLCGHSGSGKTEAAKKIMQFLSSLEQDQTGNRECQVEDMLPILSSFGHAKTILNANASRFGQVFCLYLQQGVIVGASVSHYLLETSRVVFQAQAERSFHVFYKLLAGLDSIERERLSLQGPETYYYLNQGQACRLQGKEDAQDFEGLLKALQGLGLCPEELNAVWAVLAAILQLGNICFSSSERESQEVAAVSSWAEIHTAARLLRVPPECLEGAVTRRVTETPYGQVSRSLPVESAFDARDALAKALYSRLFHRLLRRTNARLAPPGEGGSIGTVTVVDAYGFEALRVNGLEQLCNNLASERLQLFSSQMLLAQEEPPRESCLDLLVDQPHSLLSILDAQTWLSQTEFGSCCPGWSAMVRSRLTATSTSQATDHTFLQKSHYHHGDHPSYAKPRLPLPVFTVRHYAGTVTYQVHKFLNRNRDQLDPAVVEMLGQSQLQLVGSLFQEAEPQSRGGRGRPTLASRFQQALEDLIARLGRSHVYFIQCLTPNPGKLPGLFDVGHVTEQLHQAAILEAVGTRSANFPVRVPFEAFLASFQALGSEGQEDLSDREKCGAVLSQVLGAESPLYHLGATKVLLQEQGWQRLEELRDQQRSQALVDLHRSFHTCISRQRVLPRMQARMRGFQARSAGVGARAEVGGPVFTHSSNSCWLTVCLIYPWARCWKRYLRRRAALGQLNTILLVAQPLLQRRQRLQLGRWQGWHSSERALERVPSMELGRLEIPAELAVMLKTAESHRDALAGSITECLPPEVPARPSLTLPADIDLFPFSSFVAIGFQEPSLPRPGQPLAKPLTQLDGDNPQRALDINKVMLRLLGDGSLESWQRQIMGAYLVRQGQCRPGLRNELFSQLVAQLWQNPDEQQSQRGWALMAVLLSAFPPLPVLQKPLLKFVSDQAPRGMAALCQHKLLGALEQSQLASGATRAHPPTQLEWLAGWRRGRMALDVFTFSEECYSAEVESWTTGEQLAGWILQSRDAWQDLAGCDFVLDLISQTEDLGDPARPRSYPITPLGSAEAIPLAPGIQAPSLPPGPPPGPAPTLPSRDHTGEVQRSGSLDGFLDQIFQPVISSGLSDLEQSWALSSRMKGGGAIGPTQQGYPMVYPGMIQMPAYQPGMVPAPMPMMPAMGTVPAMPAMVVPPQPPLPSLDAGQLAVQQQNFIQQQALILAQQMTAQAMSLSLEQQMQQRQQQARASEAASQASPSAVTSKPRKPPTPPEKPQRDLGSEGGCLRETSEEAEDRPYQPKSFQQKRNYFQRMGQPQITVRTMKPPAKVHIPQGEAQEEEEEEEEEEEQEEQEVETRAVPSPPPPPIVKKPLKQGGAKAPKEAEAEPAKETAAKGHGQGPAQGRGTVVRSSDSKPKRPQPSREIGNIIRMYQSRPGPVPVPVQPSRPPKAFLRKIDPKDEALAKLGINGAHSSPPMLSPSPGKGPPPAVAPRPKAPLQLGPSSSIKEKQGPLLDLFGQKLPIAHTPPPPPAPPLPLPEDPGTLSAERRCLTQPVEDQGVSTQLLAPSGSVCFSYTGTPWKLFLRKEVFYPRENFSHPYYLRLLCEQILRDTFSESCIRISQNERRKMKDLLGGLEVDLDSLTTTEDSVKKRIVVAARDNWANYFSRFFPVSGESGSDVQLLAVSHRALAHDPGLEVGAGGKVTSVHARSLRSFAEVLGVECRGGSTLELSLKSEQLVLHTARARAIEALVELFLNELKKDSGYVIALRSYITDNCSLLSFHRGDLIKLLPVATLEPGWQFGSAGGRSGLFPADIVQPAAAPDFSFSKEQRSGWHKGQLSNGEPGLARWDRASERPAHPWSQAHSDDSEATSLSSVAYAFLPDSHSYTMQEFARRYFRRSQALLGQTDGGAAGKDTDSLVQYTKAPIQESLLSLSDDVSKLAVASFLALMRFMGDQSKPRGKDEMDLLYELLKLCQQEKLRDEIYCQVIKQVTGHPRPEHCTRGWSFLSLLTGFFPPSTRLMPYLTKFLQDSGPSQELARSSQEHLQRTVKYGGRRRMPPPGEMKAFLVAAEVQEELCRQMGITEPQEVQEFALFLIKEKSQLVRPLQPAEYLNSVVVDQDVSLHSRRLHWETPLHFDNSTYISTHYSQVLWDYLQGKLPVSAKADAQLARLAALQHLSKANRNTPSGQDLLAYVPKQLQRQVNTASIKNLMGQELRRLEGHSPQEAQISFIADLGDQAEQVPGPQQSDFLPAPSPPAEAMSQLPLFGYTVYGVLRVSMQALSGPTLLGLNRQHLILMDPSSQSLYCRIALKSLQRLHLLSPLEEKGPPGLEVNYGSADNPQTIWFELPQAQELLYTTVFLIDSSASCTEWPSIN

SEQ ID NO: 54478 - protein, 101 aa, Homo sapiens
  Payload ID: 10752
  Gene Symbol: MYO15B
  Gene Name: myosin XVB
  ENSP ID: ENSP00000488771
  MOD_RES (1)..(1): Any amino acid
XFVSDQAPRGMAALCQHKLLGALEQSQLASGATRAHPPTQLEWLAGWRRGRMALDVFTFSEECYSAEVESWTTGEQLAGWILQSRSEKKCPCWSPCGSGGP

SEQ ID NO: 54479 - protein, 760 aa, Homo sapiens; identical to SEQ ID NO: 54467
  Payload ID: 10752
  Gene Symbol: MYO15B
  Gene Name: myosin XVB
  ENSP ID: ENSP00000488884

SEQ ID NO: 54480 - protein, 940 aa, Homo sapiens; identical to SEQ ID NO: 54119
  Payload ID: 10753
  Gene Symbol: MYO16
  Gene Name: myosin XVI
  Uniprot ID: Q9Y6X6
  ENSP ID: ENSP00000251041

SEQ ID NO: 54481 - protein, 1858 aa, Homo sapiens; identical to SEQ ID NO: 54117
  Payload ID: 10753
  Gene Symbol: MYO16
  Gene Name: myosin XVI
  Uniprot ID: Q9Y6X6
  ENSP ID: ENSP00000349145

SEQ ID NO: 54482 - protein, 1858 aa, Homo sapiens; identical to SEQ ID NO: 54117
  Payload ID: 10753
  Gene Symbol: MYO16
  Gene Name: myosin XVI
  Uniprot ID: Q9Y6X6
  ENSP ID: ENSP00000350160

SEQ ID NO: 54483 - protein, 1880 aa, Homo sapiens; identical to SEQ ID NO: 54118
  Payload ID: 10753
  Gene Symbol: MYO16
  Gene Name: myosin XVI
  ENSP ID: ENSP00000401633

SEQ ID NO: 54484 - protein, 2039 aa, Homo sapiens
  Payload ID: 10754
  Gene Symbol: MYO18A
  Gene Name: myosin XVIIIA
  Uniprot ID: Q92614
  ENSP ID: ENSP00000434228
MFNLMKKDKDKDGGRKEKKEKKEKKERMSAAELRSLEEMSLRRGFFNLNRSSKRESKTRLEISNPIPIKVASGSDLHLTDIDSDSNRGSVILDSGHLSTASSSDDLKGEEGSFRGSVLQRAAKFGSLAKQNSQMIVKRFSFSQRSRDESASETSTPSEHSAAPSPQVEVRTLEGQLVQHPGPGIPRPGHRSRAPELVTKKFPVDLRLPPVVPLPPPTLRELELQRRPTGDFGFSLRRTTMLDRGPEGQACRRVVHFAEPGAGTKDLALGLVPGDRLVEINGHNVESKSRDEIVEMIRQSGDSVRLKVQPIPELSELSRSWLRSGEGPRREPSDAKTEEQIAAEEAWNETEKVWLVHRDGFSLASQLKSEELNLPEGKVRVKLDHDGAILDVDEDDVEKANAPSCDRLEDLASLVYLNESSVLHTLRQRYGASLLHTYAGPSLLVLGPRGAPAVYSEKVMHMFKGCRREDMAPHIYAVAQTAYRAMLMSRQDQSIILLGSSGSGKTTSCQHLVQYLATIAGISGNKVFSVEKWQALYTLLEAFGNSPTIINGNATRFSQILSLDFDQAGQVASASIQTMLLEKLRVARRPASEATFNVFYYLLACGDGTLRTELHLNHLAENNVFGIVPLAKPEEKQKAAQQFSKLQAAMKVLGISPDEQKACWFILAAIYHLGAAGATKEAAEAGRKQFARHEWAQKAAYLLGCSLEELSSAIFKHQHKGGTLQRSTSFRQGPEESGLGDGTGPKLSALECLEGMAAGLYSELFTLLVSLVNRALKSSQHSLCSMMIVDTPGFQNPEQGGSARGASFEELCHNYTQDRLQRLFHERTFVQELERYKEENIELAFDDLEPPTDDSVAAVDQASHQSLVRSLARTDEARGLLWLLEEEALVPGASEDTLLERLFSYYGPQEGDKKGQSPLLHSSKPHHFLLGHSHGTNWVEYNVTGWLNYTKQNPATQNAPRLLQDSQKKIISNLFLGRAGSATVLSGSIAGLEGGSQLALRRATSMRKTFTTGMAAVKKKSLCIQMKLQVDALIDTIKKSKLHFVHCFLPVAEGWAGEPRSASSRRVSSSSELDLPSGDHCEAGLLQLDVPLLRTQLRGSRLLDAMRMYRQGYPDHMVFSEFRRRFDVLAPHLTKKHGRNYIVVDERRAVEELLECLDLEKSSCCMGLSRVFFRAGTLARLEEQRDEQTSRNLTLFQAACRGYLARQHFKKRKIQDLAIRCVQKNIKKNKGVKDWPWWKLFTTVRPLIEVQLSEEQIRNKDEEIQQLRSKLEKAEKERNELRLNSDRLESRISELTSELTDERNTGESASQLLDAETAERLRAEKEMKELQTQYDALKKQMEVMEMEVMEARLIRAAEINGEVDDDDAGGEWRLKYERAVREVDFTKKRLQQEFEDKLEVEQQNKRQLERRLGDLQADSEESQRALQQLKKKCQRLTAELQDTKLHLEGQQVRNHELEKKQRRFDSELSQAHEEAQREKLQREKLQREKDMLLAEAFSLKQQLEEKDMDIAGFTQKVVSLEAELQDISSQESKDEASLAKVKKQLRDLEAKVKDQEEELDEQAGTIQMLEQAKLRLEMEMERMRQTHSKEMESRDEEVEEARQSCQKKLKQMEVQLEEEYEDKQKVLREKRELEGKLATLSDQVNRRDFESEKRLRKDLKRTKALLADAQLMLDHLKNSAPSKREIAQLKNQLEESEFTCAAAVKARKAMEVEIEDLHLQIDDIAKAKTALEEQLSRLQREKNEIQNRLEEDQEDMNELMKKHKAAVAQASRDLAQINDLQAQLEEANKEKQELQEKLQALQSQVEFLEQSMVDKSLVSRQEAKIRELETRLEFERTQVKRLESLASRLKENMEKLTEERDQRIAAENREKEQNKRLQRQLRDTKEEMGELARKEAEASRKKHELEMDLESLEAANQSLQADLKLAFKRIGDLQAAIEDEMESDENEDLINSEGDSDVDSELEDRVDGVKSWLSKNKGPSKAASDDGSLKSSSPTSYWKSLAPDRSDDEHDPLDNTSRPRYSHSYLSDSDTEAKLTETNA

SEQ ID NO: 54485 - protein, 27 aa, Homo sapiens
  Payload ID: 10754
  Gene Symbol: MYO18A
  Gene Name: myosin XVIIIA
  ENSP ID: ENSP00000434817
  MOD_RES (1)..(1): Any amino acid
XVSLLWAAPGQAMRKVCCYEDSMRRPV

SEQ ID NO: 54486 - protein, 2002 aa, Homo sapiens
  Payload ID: 10754
  Gene Symbol: MYO18A
  Gene Name: myosin XVIIIA
  Uniprot ID: Q92614
  ENSP ID: ENSP00000435932
MFNLMKKDKDKDGGRKEKKEKKEKKERMSAAELRSLEEMSLRRGFFNLNRSSKRESKTRLEISNPIPIKVASGSDLHLTDIDSDSNRGSVILDSGHLSTASSSDDLKGEEGSFRGSVLQRAAKFGSLAKQNSQMIVKRFSFSQRSRDESASETSTPSEHSAAPSPQVEVRTLEGQLVQHPGPGIPRPGHRSRAPELVTKKFPVDLRLPPVVPLPPPTLRELELQRRPTGDFGFSLRRTTMLDRGPEGQACRRVVHFAEPGAGTKDLALGLVPGDRLVEINGHNVESKSRDEIVEMIRQSGDSVRLKVQPIPELSELSRSWLRSGEGPRREPSDAKTEEQIAAEEAWNETEKVWLVHRDGFSLASQLKSEELNLPEGKVRVKLDHDGAILDVDEDDVEKANAPSCDRLEDLASLVYLNESSVLHTLRQRYGASLLHTYAGPSLLVLGPRGAPAVYSEKVMHMFKGCRREDMAPHIYAVAQTAYRAMLMSRQDQSIILLGSSGSGKTTSCQHLVQYLATIAGISGNKVFSVEKWQALYTLLEAFGNSPTIINGNATRFSQILSLDFDQAGQVASASIQTMLLEKLRVARRPASEATFNVFYYLLACGDGTLRTELHLNHLAENNVFGIVPLAKPEEKQKAAQQFSKLQAAMKVLGISPDEQKACWFILAAIYHLGAAGATKEAAEAGRKQFARHEWAQKAAYLLGCSLEELSSAIFKHQHKGGTLQRSTSFRQGPEESGLGDGTGPKLSALECLEGMAAGLYSELFTLLVSLVNRALKSSQHSLCSMMIVDTPGFQNPEQGGSARGASFEELCHNYTQDRLQRLFHERTFVQELERYKEENIELAFDDLEPPTDDSVAAVDQASHQSLVRSLARTDEARGLLWLLEEEALVPGASEDTLLERLFSYYGPQEGDKKGQSPLLHSSKPHHFLLGHSHGTNWVEYNVTGWLNYTKQNPATQNAPRLLQDSQKKIISNLFLGRAGSATVLSGSIAGLEGGSQLALRRATSMRKTFTTGMAAVKKKSLCIQMKLQVDALIDTIKKSKLHFVHCFLPVAEGWAGEPRSASSRRVSSSSELDLPSGDHCEAGLLQLDVPLLRTQLRGSRLLDAMRMYRQGYPDHMVFSEFRRRFDVLAPHLTKKHGRNYIVVDERRAVEELLECLDLEKSSCCMGLSRVFFRAGTLARLEEQRDEQTSRNLTLFQAACRGYLARQHFKKRKIQDLAIRCVQKNIKKNKGVKDWPWWKLFTTVRPLIEVQLSEEQIRNKDEEIQQLRSKLEKAEKERNELRLNSDRLESRISELTSELTDERNTGESASQLLDAETAERLRAEKEMKELQTQYDALKKQMEVMEMEVMEARLIRAAEINGEVDDDDAGGEWRLKYERAVREVDFTKKRLQQEFEDKLEVEQQNKRQLERRLGDLQADSEESQRALQQLKKKCQRLTAELQDTKLHLEGQQVRNHELEKKQRRFDSELSQAHEEAQREKLQREKLQREKDMLLAEAFSLKQQLEEKDMDIAGFTQKVVSLEAELQDISSQESKDEASLAKVKKQLRDLEAKVKDQEEELDEQAGTIQMLEQLKQMEVQLEEEYEDKQKVLREKRELEGKLATLSDQVNRRDFESEKRLRKDLKRTKALLADAQLMLDHLKNSAPSKREIAQLKNQLEESEFTCAAAVKARKAMEVEIEDLHLQIDDIAKAKTALEEQLSRLQREKNEIQNRLEEDQEDMNELMKKHKAAVAQASRDLAQINDLQAQLEEANKEKQELQEKLQALQSQVEFLEQSMVDKSLVSRQEAKIRELETRLEFERTQVKRLESLASRLKENMEKLTEERDQRIAAENREKEQNKRLQRQLRDTKEEMGELARKEAEASRKKHELEMDLESLEAANQSLQADLKLAFKRIGDLQAAIEDEMESDENEDLINSEGDSDVDSELEDRVDGVKSWLSKNKGPSKAASDDGSLKSSSPTSYWKSLAPDRSDDEHDPLDNTSRPRYSHSYLSDSDTEAKLTETNA

SEQ ID NO: 54487 - protein, 197 aa, Homo sapiens
  Payload ID: 10754
  Gene Symbol: MYO18A
  Gene Name: myosin XVIIIA
  ENSP ID: ENSP00000436660
  MOD_RES (1)..(1): Any amino acid
XFELLTEPEQHQSGVSLLWAAPGQAMRLDSEAASHAHSQAKTEEQIAAEEAWNETEKVWLVHRDGFSLASQLKSEELNLPEGKVRVKLDHDGAILDVDEDDVEKANAPSCDRLEDLASLVYLNESSVLHTLRQRYGASLLHTYAGPSLLVLGPRGAPAVYSEKVMHMFKGCRREDMAPHIYAVAQTAYRAMLMSRQD

SEQ ID NO: 54488 - protein, 2054 aa, Homo sapiens
  Payload ID: 10754
  Gene Symbol: MYO18A
  Gene Name: myosin XVIIIA
  Uniprot ID: Q92614
  ENSP ID: ENSP00000437073
MFNLMKKDKDKDGGRKEKKEKKEKKERMSAAELRSLEEMSLRRGFFNLNRSSKRESKTRLEISNPIPIKVASGSDLHLTDIDSDSNRGSVILDSGHLSTASSSDDLKGEEGSFRGSVLQRAAKFGSLAKQNSQMIVKRFSFSQRSRDESASETSTPSEHSAAPSPQVEVRTLEGQLVQHPGPGIPRPGHRSRAPELVTKKFPVDLRLPPVVPLPPPTLRELELQRRPTGDFGFSLRRTTMLDRGPEGQACRRVVHFAEPGAGTKDLALGLVPGDRLVEINGHNVESKSRDEIVEMIRQSGDSVRLKVQPIPELSELSRSWLRSGEGPRREPSDAKTEEQIAAEEAWNETEKVWLVHRDGFSLASQLKSEELNLPEGKVRVKLDHDGAILDVDEDDVEKANAPSCDRLEDLASLVYLNESSVLHTLRQRYGASLLHTYAGPSLLVLGPRGAPAVYSEKVMHMFKGCRREDMAPHIYAVAQTAYRAMLMSRQDQSIILLGSSGSGKTTSCQHLVQYLATIAGISGNKVFSVEKWQALYTLLEAFGNSPTIINGNATRFSQILSLDFDQAGQVASASIQTMLLEKLRVARRPASEATFNVFYYLLACGDGTLRTELHLNHLAENNVFGIVPLAKPEEKQKAAQQFSKLQAAMKVLGISPDEQKACWFILAAIYHLGAAGATKEAAEAGRKQFARHEWAQKAAYLLGCSLEELSSAIFKHQHKGGTLQRSTSFRQGPEESGLGDGTGPKLSALECLEGMAAGLYSELFTLLVSLVNRALKSSQHSLCSMMIVDTPGFQNPEQGGSARGASFEELCHNYTQDRLQRLFHERTFVQELERYKEENIELAFDDLEPPTDDSVAAVDQASHQSLVRSLARTDEARGLLWLLEEEALVPGASEDTLLERLFSYYGPQEGDKKGQSPLLHSSKPHHFLLGHSHGTNWVEYNVTGWLNYTKQNPATQNAPRLLQDSQKKIISNLFLGRAGSATVLSGSIAGLEGGSQLALRRATSMRKTFTTGMAAVKKKSLCIQMKLQVDALIDTIKKSKLHFVHCFLPVAEGWAGEPRSASSRRVSSSSELDLPSGDHCEAGLLQLDVPLLRTQLRGSRLLDAMRMYRQGYPDHMVFSEFRRRFDVLAPHLTKKHGRNYIVVDERRAVEELLECLDLEKSSCCMGLSRVFFRAGTLARLEEQRDEQTSRNLTLFQAACRGYLARQHFKKRKIQDLAIRCVQKNIKKNKGVKDWPWWKLFTTVRPLIEVQLSEEQIRNKDEEIQQLRSKLEKAEKERNELRLNSDRLESRISELTSELTDERNTGESASQLLDAETAERLRAEKEMKELQTQYDALKKQMEVMEMEVMEARLIRAAEINGEVDDDDAGGEWRLKYERAVREVDFTKKRLQQEFEDKLEVEQQNKRQLERRLGDLQADSEESQRALQQLKKKCQRLTAELQDTKLHLEGQQVRNHELEKKQRRFDSELSQAHEEAQREKLQREKLQREKDMLLAEAFSLKQQLEEKDMDIAGFTQKVVSLEAELQDISSQESKDEASLAKVKKQLRDLEAKVKDQEEELDEQAGTIQMLEQAKLRLEMEMERMRQTHSKEMESRDEEVEEARQSCQKKLKQMEVQLEEEYEDKQKVLREKRELEGKLATLSDQVNRRDFESEKRLRKDLKRTKALLADAQLMLDHLKNSAPSKREIAQLKNQLEESEFTCAAAVKARKAMEVEIEDLHLQIDDIAKAKTALEEQLSRLQREKNEIQNRLEEDQEDMNELMKKHKAAVAQASRDLAQINDLQAQLEEANKEKQELQEKLQALQSQVEFLEQSMVDKSLVSRQEAKIRELETRLEFERTQVKRLESLASRLKENMEKLTEERDQRIAAENREKEQNKRLQRQLRDTKEEMGELARKEAEASRKKHELEMDLESLEAANQSLQADLKLAFKRIGDLQAAIEDEMESDENEDLINSLQDMVTKYQKRKNKLEGDSDVDSELEDRVDGVKSWLSKNKGPSKAASDDGSLKSSSPTSYWKSLAPDRSDDEHDPLDNTSRPRYSHSYLSDSDTEAKLTETNA

SEQ ID NO: 54489 - protein, 93 aa, Homo sapiens
  Payload ID: 10754
  Gene Symbol: MYO18A
  Gene Name: myosin XVIIIA
  ENSP ID: ENSP00000465542
  MOD_RES (1)..(1): Any amino acid
XPRSSPWTLTKLARWPQPPFRQCFWRSCVWLGAQPVKPHSTSSTTCWPVGMAPSGQSSTSTTWQRTMCLGLCHWPSLRKSRRQLSSLVSCRRP

SEQ ID NO: 54490 - protein, 2038 aa, Homo sapiens
  Payload ID: 10754
  Gene Symbol: MYO18A
  Gene Name: myosin XVIIIA
  ENSP ID: ENSP00000486682
MFNLMKKDKDKDGGRKEKKEKKEKKERMSAAELRSLEEMSLRRGFFNLNRSSKRESKTRLEISNPIPIKVASGSDLHLTDIDSDSNRGSVILDSGHLSTASSSDDLKGEEGSFRGSVLQRAAKFGSLAKQNSQMIVKRFSFSQRSRDESASETSTPSEHSAAPSPQVEVRTLEGQLVQHPGPGIPRPGHRSRAPELVTKKFPVDLRLPPVVPLPPPTLRELELQRRPTGDFGFSLRRTTMLDRGPEGQACRRVVHFAEPGAGTKDLALGLVPGDRLVEINGHNVESKSRDEIVEMIRQSGDSVRLKVQPIPELSELSRSWLRSGEGPRREPSDAKTEEQIAAEEAWNETEKVWLVHRDGFSLASQLKSEELNLPEGKVRVKLDHDGAILDVDEDDVEKANAPSCDRLEDLASLVYLNESSVLHTLRQRYGASLLHTYAGPSLLVLGPRGAPAVYSEKVMHMFKGCRREDMAPHIYAVAQTAYRAMLMSRQDQSIILLGSSGSGKTTSCQHLVQYLATIAGISGNKVFSVEKWQALYTLLEAFGNSPTIINGNATRFSQILSLDFDQAGQVASASIQTMLLEKLRVARRPASEATFNVFYYLLACGDGTLRTELHLNHLAENNVFGIVPLAKPEEKQKAAQQFSKLQAAMKVLGISPDEQKACWFILAAIYHLGAAGATKPAVAGRKQFARHEWAQKAAYLLGCSLEELSSAIFKHQHKGGTLQRSTSFRQGPEESGLGDGTGPKLSALECLEGMAAGLYSELFTLLVSLVNRALKSSQHSLCSMMIVDTPGFQNPEQGGSARGASFEELCHNYTQDRLQRLFHERTFVQELERYKEENIELAFDDLEPPTDDSVAAVDQASHQSLVRSLARTDEARGLLWLLEEEALVPGASEDTLLERLFSYYGPQEGDKKGQSPLLHSSKPHHFLLGHSHGTNWVEYNVTGWLNYTKQNPATQNAPRLLQDSQKKIISNLFLGRAGSATVLSGSIAGLEGGSQLALRRATSMRKTFTTGMAAVKKKSLCIQMKLQVDALIDTIKKSKLHFVHCFLPVAEGWAGEPRSASSRRVSSSSELDLPSGDHCEAGLLQLDVPLLRTQLRGSRLLDAMRMYRQGYPDHMVFSEFRRRFDVLAPHLTKKHGRNYIVVDERRAVEELLECLDLEKSSCCMGLSRVFFRAGTLARLEEQRDEQTSRNLTLFQAACRGYLARQHFKKRKIQDLAIRCVQKNIKKNKGVKDWPWWKLFTTVRPLIEVQLSEEQIRNKDEEIQQLRSKLEKAEKERNELRLNSDRLESRISELTSELTDERNTGESASQLLDAETAERLRAEKEMKELQTQYDALKKQMEVMEMEVMEARLIRAAEINGEVDDDDAGGEWRLKYERAVREVDFTKKRLQQEFEDKLEVEQQNKRQLERRLGDLQADSEESQRALQQLKKKCQRLTAELQDTKLHLEGQQVRNHELEKKQRRFDSELSQAHEEAQREKLQREKLQREKDMLLAEAFSLKQQLEEKDMDIAGFTQKVVSLEAELQDISSQESKDEASLAKVKKQLRDLEAKVKDQEEELDEQAGTIQMLEQAKLRLEMEMERMRQTHSKEMESRDEEVEEARQSCQKKLKQMEVQLEEEYEDKQKVLREKRELEGKLATLSDQVNRRDFESEKRLRKDLKRTKALLADAQLMLDHLKNSAPSKREIAQLKNQLEESEFTCAAAVKARKAMEVEIEDLHLQIDDIAKAKTALEEQLSRLQREKNEIQNRLEEDQEDMNELMKKHKAAVAQASRDLAQINDLQAQLEEANKEKQELQEKLQALQSQVEFLEQSMVDKSLVSRQEAKIRELETRLEFERTQVKRLESLASRLKENMEKLTEERDQRIAAENREKEQNKRLQRQLRDTKEEMGELARKEAEASRKKHELEMDLESLEAANQSLQADLKLAFKRIGDLQAAIEDEMESDENEDLINSEGDSDVDSELEDRVDGVKSWLSKNKGPSKAASDDGSLKSSSPTSYWKSLAPDRSDDEHDPLDNTSRPRYSHSYLSDSDTEAKLTETNA

SEQ ID NO: 54491 - protein, 2567 aa, Homo sapiens
  Payload ID: 10755
  Gene Symbol: MYO18B
  Gene Name: myosin XVIIIB
  ENSP ID: ENSP00000334563
MAISSRLALWEQKIREEDKSPPPSSPPPLFSVIPGGFIKQLVRGTEKEAKEARQRKQLAVASPEREIPEISISQPNSKSSSGTRSGSQQISQDDQSSSPGSSDILGKESEGSRSPDPEQMTSINGEKAQELGSSATPTKKTVPFKRGVRRGDVLLMVAKLDPDSAKPEKTHPHDAPPCKTSPPATDTGKEKKGETSRTPCGSQASTEILAPKAEKTRTGGLGDPGQGTVALKKGEEGQSIVGKGLGTPKTTELKEAEPQGKDRQGTRPQAQGPGEGVRPGKAEKEGAEPTNTVEKGNVSKDVGSEGKHVRPQIPGRKWGGFLGRRSKWDGPQNKKDKEGVLLSKAEKTGEPQTQMEKTSQVQGELGDDLRMGEKAGELRSTTGKAGESWDKKEKMGQPQGKSGNAGEARSQTEKGCEAPKEVSTMVESPAAPGKGGWPGSRGQEAEEPCSRAGDGAGALETELEGPSQPALEKDAERPRIRKENQDGPAPQEEGKGGQSRDSDQAPEDRWYEAEKVWLAQKDGFTLATVLKPDEGTADLPAGRVRLWIDADKTITEVDEEHVHRANPPELDQVEDLASLISVNESSVLNTLLQRYKAQLLHTCTGPDLIVLQPRGPSVPSAGKVPKGRRDGLPAHIGSMAQRAYWALLNQRRDQSIVALGWSGAGKTTCCEQVLEHLVGMAGSVDGRVSVEKIRATFTVLRAFGSVSMAHSRSATRFSMVMSLDFNATGRITAAQLQTMLLEKSRVARQPEGESNFLVFSQMLAGLDLDLRTELNLHQMADSSSFGMGVWSKPEDKQKAAAAFAQLQGAMEMLGISESEQRAVWRVLAAIYHLGAAGACKVGRKQFMRFEWANYAAEALGCEYEELNTATFKHHLRQIIQQMTFGPSRWGLEDEETSSGLKMTGVDCVEGMASGLYQELFAAVVSLINRSFSSHHLSMASIMVVDSPGFQNPRHQGKDRAATFEELCHNYAHERLQLLFYQRTFVSTLQRYQEEGVPVQFDLPDPSPGTTVAVVDQNPSQVRLPAGGGAQDARGLFWVLDEEVHVEGSSDSVVLERLCAAFEKKGAGTEGSSALRTCEQPLQCEIFHQLGWDPVRYDLTGWLHRAKPNLSALDAPQVLHQSKREELRSLFQARAKLPPVCRAVAGLEGTSQQALQRSRMVRRTFASSLAAVRRKAPCSQIKLQMDALTSMIKRSRLHFIHCLVPNPVVESRSGQESPPPPQPGRDKPGAGGPLALDIPALRVQLAGFHILEALRLHRTGYADHMGLTRFRRQFQVLDAPLLKKLMSTSEGIDERKAVEELLETLDLEKKAVAVGHSQVFLKAGVISRLEKQREKLVSQSIVLFQAACKGFLSRQEFKKLKIRRLAAQCIQKNVAVFLAVKDWPWWQLLGSLQPLLSATIGTEQLRAKEEELTTLRRKLEKSEKLRNELRQNTDLLESKIADLTSDLADERFKGDVACQVLESERAERLQAFREVQELKSKHEQVQKKLGDVNKQLEEAQQKIQLNDLERNPTGGADEWQMRFDCAQMENEFLRKRLQQCEERLDSELTARKELEQKLGELQSAYDGAKKMAHQLKRKCHHLTCDLEDTCVLLENQQSRNHELEKKQKKFDLQLAQALGESVFEKGLREKVTQENTSVRWELGQLQQQLKQKEQEASQLKQQVEMLQDHKRELLGSPSLGENCVAGLKERLWKLESSALEQQKIQSQQENTIKQLEQLRQRFELEIERMKQMHQKDREDQEEELEDVRQSCQKRLHQLEMQLEQEYEEKQMVLHEKQDLEGLIGTLCDQIGHRDFDVEKRLRRDLRRTHALLSDVQLLLGTMEDGKTSVSKEELEKVHSQLEQSEAKCEEALKTQKVLTADLESMHSELENMTRNKSLVDEQLYRLQFEKADLLKRIDEDQDDLNELMQKHKDLIAQSAADIGQIQELQLQLEEAKKEKHKLQEQLQVAQMRIEYLEQSTVDRAIVSRQEAVICDLENKTEFQKVQIKRFEVLVIRLRDSLIKMGEELSQAATSESQQRESSQYYQRRLEELKADMEELVQREAEASRRCMELEKYVEELAAVRQTLQTDLETSIRRIADLQAALEEVASSDSDTESVQTAVDCGSSGRKEMDNVSILSSQPEGSLQSWLSCTLSLATDTMRTPSRQSATSSRILSPRINEEAGDTERTQSALALSRARSTNVHSKTSGDKPVSPHFVRRQKYCHFGDGEVLAVQRKSTERLEPASSPLASRSTNTSPLSREKLPSPSAALSEFVEGLRRKRAQRGQGSTLGLEDWPTLPIYQTTGASTLRRGRAGSDEGNLSLRVGAKSPLEIEGAAGGLLRSTSLKCISSDGVGGTTLLPEKSKTQFSSCESLLESRPSMGRKLSSPTTPRDMLLSPTLRPRRRCLESSVDDAGCPDLGKEPLVFQNRQFAHLMEEPLGSDPFSWKLPSLDYERKTKVDFDDFLPAIRKPQTPTSLAGSAKGGQDGSQRSSIHFETEEANRSFLSGIKTILKKSPEPKEDPAHLSDSSSSSGSIVSFKSADSIKSRPGIPRLAGDGGERTSPERREPGTGRKDDDVASIMKKYLQK

SEQ ID NO: 54492 - protein, 2568 aa, Homo sapiens
  Payload ID: 10755
  Gene Symbol: MYO18B
  Gene Name: myosin XVIIIB
  ENSP ID: ENSP00000386096
MAISSRLALWEQKIREEDKSPPPSSPPPLFSVIPGGFIKQLVRGTEKEAKEARQRKQLAVASPEREIPEISISQPNSKSSSGTRSGSQQISQDDQSSSPGSSDILGKESEGSRSPDPEQMTSINGEKAQELGSSATPTKKTVPFKRGVRRGDVLLMVAKLDPDSAKPEKTHPHDAPPCKTSPPATDTGKEKKGETSRTPCGSQASTEILAPKAEKTRTGGLGDPGQGTVALKKGEEGQSIVGKGLGTPKTTELKEAEPQGKDRQGTRPQAQGPGEGVRPGKAEKEGAEPTNTVEKGNVSKDVGSEGKHVRPQIPGRKWGGFLGRRSKWDGPQNKKDKEGVLLSKAEKTGEPQTQMEKTSQVQGELGDDLRMGEKAGELRSTTGKAGESWDKKEKMGQPQGKSGNAGEARSQTEKGCEAPKEVSTMVESPAAPGKGGWPGSRGQEAEEPCSRAGDGAGALETELEGPSQPALEKDAERPRIRKENQDGPAPQEEGKGGQSRDSDQAPEDRWYEAEKVWLAQKDGFTLATVLKPDEGTADLPAGRVRLWIDADKTITEVDEEHVHRANPPELDQVEDLASLISVNESSVLNTLLQRYKAQLLHTCTGPDLIVLQPRGPSVPSAGKVPKGRRDGLPAHIGSMAQRAYWALLNQRRDQSIVALGWSGAGKTTCCEQVLEHLVGMAGSVDGRVSVEKIRATFTVLRAFGSVSMAHSRSATRFSMVMSLDFNATGRITAAQLQTMLLEKSRVARQPEGESNFLVFSQMLAGLDLDLRTELNLHQMADSSSFGMGVWSKPEDKQKAAAAFAQLQGAMEMLGISESEQRAVWRVLAAIYHLGAAGACKVGRKQFMRFEWANYAAEALGCEYEELNTATFKHHLRQIIQQMTFGPSRWGLEDEETSSGLKMTGVDCVEGMASGLYQELFAAVVSLINRSFSSHHLSMASIMVVDSPGFQNPRHQGKDRAATFEELCHNYAHERLQLLFYQRTFVSTLQRYQEEGVPVQFDLPDPSPGTTVAVVDQNPSQQVRLPAGGGAQDARGLFWVLDEEVHVEGSSDSVVLERLCAAFEKKGAGTEGSSALRTCEQPLQCEIFHQLGWDPVRYDLTGWLHRAKPNLSALDAPQVLHQSKREELRSLFQARAKLPPVCRAVAGLEGTSQQALQRSRMVRRTFASSLAAVRRKAPCSQIKLQMDALTSMIKRSRLHFIHCLVPNPVVESRSGQESPPPPQPGRDKPGAGGPLALDIPALRVQLAGFHILEALRLHRTGYADHMGLTRFRRQFQVLDAPLLKKLMSTSEGIDERKAVEELLETLDLEKKAVAVGHSQVFLKAGVISRLEKQREKLVSQSIVLFQAACKGFLSRQEFKKLKIRRLAAQCIQKNVAVFLAVKDWPWWQLLGSLQPLLSATIGTEQLRAKEEELTTLRRKLEKSEKLRNELRQNTDLLESKIADLTSDLADERFKGDVACQVLESERAERLQAFREVQELKSKHEQVQKKLGDVNKQLEEAQQKIQLNDLERNPTGGADEWQMRFDCAQMENEFLRKRLQQCEERLDSELTARKELEQKLGELQSAYDGAKKMAHQLKRKCHHLTCDLEDTCVLLENQQSRNHELEKKQKKFDLQLAQALGESVFEKGLREKVTQENTSVRWELGQLQQQLKQKEQEASQLKQQVEMLQDHKRELLGSPSLGENCVAGLKERLWKLESSALEQQKIQSQQENTIKQLEQLRQRFELEIERMKQMHQKDREDQEEELEDVRQSCQKRLHQLEMQLEQEYEEKQMVLHEKQDLEGLIGTLCDQIGHRDFDVEKRLRRDLRRTHALLSDVQLLLGTMEDGKTSVSKEELEKVHSQLEQSEAKCEEALKTQKVLTADLESMHSELENMTRNKSLVDEQLYRLQFEKADLLKRIDEDQDDLNELMQKHKDLIAQSAADIGQIQELQLQLEEAKKEKHKLQEQLQVAQMRIEYLEQSTVDRAIVSRQEAVICDLENKTEFQKVQIKRFEVLVIRLRDSLIKMGEELSQAATSESQQRESSQYYQRRLEELKADMEELVQREAEASRRCMELEKYVEELAAVRQTLQTDLETSIRRIADLQAALEEVASSDSDTESVQTAVDCGSSGRKEMDNVSILSSQPEGSLQSWLSCTLSLATDTMRTPSRQSATSSRILSPRINEEAGDTERTQSALALSRARSTNVHSKTSGDKPVSPHFVRRQKYCHFGDGEVLAVQRKSTERLEPASSPLASRSTNTSPLSREKLPSPSAALSEFVEGLRRKRAQRGQGSTLGLEDWPTLPIYQTTGASTLRRGRAGSDEGNLSLRVGAKSPLEIEGAAGGLLRSTSLKCISSDGVGGTTLLPEKSKTQFSSCESLLESRPSMGRKLSSPTTPRDMLLSPTLRPRRRCLESSVDDAGCPDLGKEPLVFQNRQFAHLMEEPLGSDPFSWKLPSLDYERKTKVDFDDFLPAIRKPQTPTSLAGSAKGGQDGSQRSSIHFETEEANRSFLSGIKTILKKSPEPKEDPAHLSDSSSSSGSIVSFKSADSIKSRPGIPRLAGDGGERTSPERREPGTGRKDDDVASIMKKYLQK

SEQ ID NO: 54493 - protein, 798 aa, Homo sapiens
  Payload ID: 10755
  Gene Symbol: MYO18B
  Gene Name: myosin XVIIIB
  ENSP ID: ENSP00000437587
MAISSRLALWEQKIREEDKSPPPSSPPPLFSVIPGGFIKQLVRGTEKEAKEARQRKQLAVASPEREIPEISISQPNSKSSSGTRSGSQQISQDDQSSSPGSSDILGKESEGSRSPDPEQMTSINGEKAQELGSSATPTKKTVPFKRGVRRGDVLLMVAKLDPDSAKPEKTHPHDAPPCKTSPPATDTGKEKKGETSRTPCGSQASTEILAPKAEKTRTGGLGDPGQGTVALKKGEEGQSIVGKGLGTPKTTELKEAEPQGKDRQGTRPQAQGPGEGVRPGKAEKEGAEPTNTVEKGNVSKDVGSEGKHVRPQIPGRKWGGFLGRRSKWDGPQNKKDKEGVLLSKAEKTGEPQTQMEKTSQVQGELGDDLRMGEKAGELRSTTGKAGESWDKKEKMGQPQGKSGNAGEARSQTEKGCEAPKEVSTMVESPAAPGKGGWPGSRGQEAEEPCSRAGDGAGALETELEGPSQPALEKDAERPRIRKENQDGPAPQEEGKGGQSRDSDQAPEDRWYEAEKVWLAQKDGFTLATVLKPDEGTADLPAGRVRLWIDADKTITEVDEEHVHRANPPELDQVEDLASLISVNESSVLNTLLQRYKAQLLHTCTGPDLIVLQPRGPSVPSAGKVPKGRRDGLPAHIGSMAQRAYWALLNQRRDQSIVALGWSGAGKTTCCEQVLEHLVGMAGSVDGRVSVEKIRATFTVLRAFGSVSMAHSRSATRFSMVMSLDFNATGRITAAQLQTMLLEKSRVARQPEGESNFLVFSQMLAGLDLDLRTELNLHQMADSSSFGMGVWSKWVGSSS

SEQ ID NO: 54494 - protein, 2567 aa, Homo sapiens; identical to SEQ ID NO: 54491
  Payload ID: 10755
  Gene Symbol: MYO18B
  Gene Name: myosin XVIIIB
  ENSP ID: ENSP00000441229

SEQ ID NO: 54495 - protein, 209 aa, Homo sapiens
  Payload ID: 10755
  Gene Symbol: MYO18B
  Gene Name: myosin XVIIIB
  Uniprot ID: Q8IUG5
  ENSP ID: ENSP00000441301
PSMGRKLSSPTTPRDMLLSPTLRPRRRCLESSVDDAGCPDLGKEPLVFQNRQFAHLMEEPLGSDPFSWKLPSLDYERKTKVDFDDFLPAIRKPQTPTSLAGSAKGGQDGSQRSSIHFETEEANRSFLSGIKTILKKSPEPKEDPAHLSDSSSSSGSIVSFKSADSIKSRPGIPRLAGDGGERTSPERREPGTGRKDDDVASIMKKYLQK

SEQ ID NO: 54496 - protein, 517 aa, Homo sapiens
  Payload ID: 10755
  Gene Symbol: MYO18B
  Gene Name: myosin XVIIIB
  ENSP ID: ENSP00000444262
  MOD_RES (1)..(1): Any amino acid
XELVQREAEASRRCMELEKYVEELAAVRQTLQTDLETSIRRIADLQAALEEVASSDSDTERDNVSILSSQPEGSLQSWLSCTLSLATDTMRTPSRQSATSSRILSPRINEEAGDTERTQSALALSRARSTNVHSKTSGDKPVSPHFVRRQKYCHFGDGEVLAVQRKSTERLEPASSPLASRSTNTSPLSREKLPSPSAALSEFVEGLRRKRAQRGQGSTLGLEDWPTLPIYQTTGASTLRRGRAGSDEGNLSLRVGAKSPLEIEGAAGGLLRSTSLKCISSDGVGGTTLLPEKSKTQFSSCESLLESRPSMGRKLSSPTTPRDMLLSPTLRPRRRCLESSVDDAGCPDLGKEPLVFQNRQFAHLMEEPLGSDPFSWKLPSLDYERKTKVDFDDFLPAIRKPQTPTSLAGSAKGGQDGSQRSSIHFETEEANRSFLSGIKTILKKSPEPKEDPAHLSDSSSSSGSIVSFKSADSIKSRPGIPRLAGDGGERTSPERREPGTGRKDDDVASIMKKYLQK

SEQ ID NO: 54497 - protein, 1939 aa, Homo sapiens
  Payload ID: 10756
  Gene Symbol: MYH1
  Gene Name: myosin, heavy chain 1, skeletal muscle, adult
  Uniprot ID: P12882
  ENSP ID: ENSP00000226207
MSSDSEMAIFGEAAPFLRKSERERIEAQNKPFDAKTSVFVVDPKESFVKATVQSREGGKVTAKTEAGATVTVKDDQVFPMNPPKYDKIEDMAMMTHLHEPAVLYNLKERYAAWMIYTYSGLFCVTVNPYKWLPVYNAEVVTAYRGKKRQEAPPHIFSISDNAYQFMLTDRENQSILITGESGAGKTVNTKRVIQYFATIAVTGEKKKEEVTSGKMQGTLEDQIISANPLLEAFGNAKTVRNDNSSRFGKFIRIHFGTTGKLASADIETYLLEKSRVTFQLKAERSYHIFYQIMSNKKPDLIEMLLITTNPYDYAFVSQGEITVPSIDDQEELMATDSAIEILGFTSDERVSIYKLTGAVMHYGNMKFKQKQREEQAEPDGTEVADKAAYLQNLNSADLLKALCYPRVKVGNEYVTKGQTVQQVYNAVGALAKAVYDKMFLWMVTRINQQLDTKQPRQYFIGVLDIAGFEIFDFNSLEQLCINFTNEKLQQFFNHHMFVLEQEEYKKEGIEWTFIDFGMDLAACIELIEKPMGIFSILEEECMFPKATDTSFKNKLYEQHLGKSNNFQKPKPAKGKPEAHFSLIHYAGTVDYNIAGWLDKNKDPLNETVVGLYQKSAMKTLALLFVGATGAEAEAGGGKKGGKKKGSSFQTVSALFRENLNKLMTNLRSTHPHFVRCIIPNETKTPGAMEHELVLHQLRCNGVLEGIRICRKGFPSRILYADFKQRYKVLNASAIPEGQFIDSKKASEKLLGSIDIDHTQYKFGHTKVFFKAGLLGLLEEMRDEKLAQLITRTQAMCRGFLARVEYQKMVERRESIFCIQYNVRAFMNVKHWPWMKLYFKIKPLLKSAETEKEMANMKEEFEKTKEELAKTEAKRKELEEKMVTLMQEKNDLQLQVQAEADSLADAEERCDQLIKTKIQLEAKIKEVTERAEDEEEINAELTAKKRKLEDECSELKKDIDDLELTLAKVEKEKHATENKVKNLTEEMAGLDETIAKLTKEKKALQEAHQQTLDDLQAEEDKVNTLTKAKIKLEQQVDDLEGSLEQEKKIRMDLERAKRKLEGDLKLAQESTMDIENDKQQLDEKLKKKEFEMSGLQSKIEDEQALGMQLQKKIKELQARIEELEEEIEAERASRAKAEKQRSDLSRELEEISERLEEAGGATSAQIEMNKKREAEFQKMRRDLEEATLQHEATAATLRKKHADSVAELGEQIDNLQRVKQKLEKEKSEMKMEIDDLASNMETVSKAKGNLEKMCRALEDQLSEIKTKEEEQQRLINDLTAQRARLQTESGEYSRQLDEKDTLVSQLSRGKQAFTQQIEELKRQLEEEIKAKSALAHALQSSRHDCDLLREQYEEEQEAKAELQRAMSKANSEVAQWRTKYETDAIQRTEELEEAKKKLAQRLQDAEEHVEAVNAKCASLEKTKQRLQNEVEDLMIDVERTNAACAALDKKQRNFDKILAEWKQKCEETHAELEASQKESRSLSTELFKIKNAYEESLDQLETLKRENKNLQQEISDLTEQIAEGGKRIHELEKIKKQVEQEKSELQAALEEAEASLEHEEGKILRIQLELNQVKSEVDRKIAEKDEEIDQMKRNHIRIVESMQSTLDAEIRSRNDAIRLKKKMEGDLNEMEIQLNHANRMAAEALRNYRNTQAILKDTQLHLDDALRSQEDLKEQLAMVERRANLLQAEIEELRATLEQTERSRKIAEQELLDASERVQLLHTQNTSLINTKKKLETDISQIQGEMEDIIQEARNAEEKAKKAITDAAMMAEELKKEQDTSAHLERMKKNLEQTVKDLQHRLDEAEQLALKGGKKQIQKLEARVRELEGEVESEQKRNVEAVKGLRKHERKVKELTYQTEEDRKNILRLQDLVDKLQAKVKSYKRQAEEAEEQSNVNLSKFRRIQHELEEAEERADIAESQVNKLRVKSREVHTKIISEE

SEQ ID NO: 54498 - protein, 1976 aa, Homo sapiens
  Payload ID: 10757
  Gene Symbol: MYH10
  Gene Name: myosin, heavy chain 10, non-muscle
  Uniprot ID: P35580
  ENSP ID: ENSP00000269243
MAQRTGLEDPERYLFVDRAVIYNPATQADWTAKKLVWIPSERHGFEAASIKEERGDEVMVELAENGKKAMVNKDDIQKMNPPKFSKVEDMAELTCLNEASVLHNLKDRYYSGLIYTYSGLFCVVINPYKNLPIYSENIIEMYRGKKRHEMPPHIYAISESAYRCMLQDREDQSILCTGESGAGKTENTKKVIQYLAHVASSHKGRKDHNIPGELERQLLQANPILESFGNAKTVKNDNSSRFGKFIRINFDVTGYIVGANIETYLLEKSRAVRQAKDERTFHIFYQLLSGAGEHLKSDLLLEGFNNYRFLSNGYIPIPGQQDKDNFQETMEAMHIMGFSHEEILSMLKVVSSVLQFGNISFKKERNTDQASMPENTVAQKLCHLLGMNVMEFTRAILTPRIKVGRDYVQKAQTKEQADFAVEALAKATYERLFRWLVHRINKALDRTKRQGASFIGILDIAGFEIFELNSFEQLCINYTNEKLQQLFNHTMFILEQEEYQREGIEWNFIDFGLDLQPCIDLIERPANPPGVLALLDEECWFPKATDKTFVEKLVQEQGSHSKFQKPRQLKDKADFCIIHYAGKVDYKADEWLMKNMDPLNDNVATLLHQSSDRFVAELWKDVDRIVGLDQVTGMTETAFGSAYKTKKGMFRTVGQLYKESLTKLMATLRNTNPNFVRCIIPNHEKRAGKLDPHLVLDQLRCNGVLEGIRICRQGFPNRIVFQEFRQRYEILTPNAIPKGFMDGKQACERMIRALELDPNLYRIGQSKIFFRAGVLAHLEEERDLKITDIIIFFQAVCRGYLARKAFAKKQQQLSALKVLQRNCAAYLKLRHWQWWRVFTKVKPLLQVTRQEEELQAKDEELLKVKEKQTKVEGELEEMERKHQQLLEEKNILAEQLQAETELFAEAEEMRARLAAKKQELEEILHDLESRVEEEEERNQILQNEKKKMQAHIQDLEEQLDEEEGARQKLQLEKVTAEAKIKKMEEEILLLEDQNSKFIKEKKLMEDRIAECSSQLAEEEEKAKNLAKIRNKQEVMISDLEERLKKEEKTRQELEKAKRKLDGETTDLQDQIAELQAQIDELKLQLAKKEEELQGALARGDDETLHKNNALKVVRELQAQIAELQEDFESEKASRNKAEKQKRDLSEELEALKTELEDTLDTTAAQQELRTKREQEVAELKKALEEETKNHEAQIQDMRQRHATALEELSEQLEQAKRFKANLEKNKQGLETDNKELACEVKVLQQVKAESEHKRKKLDAQVQELHAKVSEGDRLRVELAEKASKLQNELDNVSTLLEEAEKKGIKFAKDAASLESQLQDTQELLQEETRQKLNLSSRIRQLEEEKNSLQEQQEEEEEARKNLEKQVLALQSQLADTKKKVDDDLGTIESLEEAKKKLLKDAEALSQRLEEKALAYDKLEKTKNRLQQELDDLTVDLDHQRQVASNLEKKQKKFDQLLAEEKSISARYAEERDRAEAEAREKETKALSLARALEEALEAKEEFERQNKQLRADMEDLMSSKDDVGKNVHELEKSKRALEQQVEEMRTQLEELEDELQATEDAKLRLEVNMQAMKAQFERDLQTRDEQNEEKKRLLIKQVRELEAELEDERKQRALAVASKKKMEIDLKDLEAQIEAANKARDEVIKQLRKLQAQMKDYQRELEEARASRDEIFAQSKESEKKLKSLEAEILQLQEELASSERARRHAEQERDELADEITNSASGKSALLDEKRRLEARIAQLEEELEEEQSNMELLNDRFRKTTLQVDTLNAELAAERSAAQKSDNARQQLERQNKELKAKLQELEGAVKSKFKATISALEAKIGQLEEQLEQEAKERAAANKLVRRTEKKLKEIFMQVEDERRHADQYKEQMEKANARMKQLKRQLEEAEEEATRANASRRKLQRELDDATEANEGLSREVSTLKNRLRRGGPISFSSSRSGRRQLHLEGASLELSDDDTESKTSDVNETQPPQSE

SEQ ID NO: 54499 - protein, 2007 aa, Homo sapiens
  Payload ID: 10757
  Gene Symbol: MYH10
  Gene Name: myosin, heavy chain 10, non-muscle
  Uniprot ID: P35580
  ENSP ID: ENSP00000353590
MAQRTGLEDPERYLFVDRAVIYNPATQADWTAKKLVWIPSERHGFEAASIKEERGDEVMVELAENGKKAMVNKDDIQKMNPPKFSKVEDMAELTCLNEASVLHNLKDRYYSGLIYTYSGLFCVVINPYKNLPIYSENIIEMYRGKKRHEMPPHIYAISESAYRCMLQDREDQSILCTGESGAGKTENTKKVIQYLAHVASSHKGRKDHNIPQESPKPVKHQGELERQLLQANPILESFGNAKTVKNDNSSRFGKFIRINFDVTGYIVGANIETYLLEKSRAVRQAKDERTFHIFYQLLSGAGEHLKSDLLLEGFNNYRFLSNGYIPIPGQQDKDNFQETMEAMHIMGFSHEEILSMLKVVSSVLQFGNISFKKERNTDQASMPENTVAQKLCHLLGMNVMEFTRAILTPRIKVGRDYVQKAQTKEQADFAVEALAKATYERLFRWLVHRINKALDRTKRQGASFIGILDIAGFEIFELNSFEQLCINYTNEKLQQLFNHTMFILEQEEYQREGIEWNFIDFGLDLQPCIDLIERPANPPGVLALLDEECWFPKATDKTFVEKLVQEQGSHSKFQKPRQLKDKADFCIIHYAGKVDYKADEWLMKNMDPLNDNVATLLHQSSDRFVAELWKDEIQNIQRASFYDSVSGLHEPPVDRIVGLDQVTGMTETAFGSAYKTKKGMFRTVGQLYKESLTKLMATLRNTNPNFVRCIIPNHEKRAGKLDPHLVLDQLRCNGVLEGIRICRQGFPNRIVFQEFRQRYEILTPNAIPKGFMDGKQACERMIRALELDPNLYRIGQSKIFFRAGVLAHLEEERDLKITDIIIFFQAVCRGYLARKAFAKKQQQLSALKVLQRNCAAYLKLRHWQWWRVFTKVKPLLQVTRQEEELQAKDEELLKVKEKQTKVEGELEEMERKHQQLLEEKNILAEQLQAETELFAEAEEMRARLAAKKQELEEILHDLESRVEEEEERNQILQNEKKKMQAHIQDLEEQLDEEEGARQKLQLEKVTAEAKIKKMEEEILLLEDQNSKFIKEKKLMEDRIAECSSQLAEEEEKAKNLAKIRNKQEVMISDLEERLKKEEKTRQELEKAKRKLDGETTDLQDQIAELQAQIDELKLQLAKKEEELQGALARGDDETLHKNNALKVVRELQAQIAELQEDFESEKASRNKAEKQKRDLSEELEALKTELEDTLDTTAAQQELRTKREQEVAELKKALEEETKNHEAQIQDMRQRHATALEELSEQLEQAKRFKANLEKNKQGLETDNKELACEVKVLQQVKAESEHKRKKLDAQVQELHAKVSEGDRLRVELAEKASKLQNELDNVSTLLEEAEKKGIKFAKDAASLESQLQDTQELLQEETRQKLNLSSRIRQLEEEKNSLQEQQEEEEEARKNLEKQVLALQSQLADTKKKVDDDLGTIESLEEAKKKLLKDAEALSQRLEEKALAYDKLEKTKNRLQQELDDLTVDLDHQRQVASNLEKKQKKFDQLLAEEKSISARYAEERDRAEAEAREKETKALSLARALEEALEAKEEFERQNKQLRADMEDLMSSKDDVGKNVHELEKSKRALEQQVEEMRTQLEELEDELQATEDAKLRLEVNMQAMKAQFERDLQTRDEQNEEKKRLLIKQVRELEAELEDERKQRALAVASKKKMEIDLKDLEAQIEAANKARDEVIKQLRKLQAQMKDYQRELEEARASRDEIFAQSKESEKKLKSLEAEILQLQEELASSERARRHAEQERDELADEITNSASGKSALLDEKRRLEARIAQLEEELEEEQSNMELLNDRFRKTTLQVDTLNAELAAERSAAQKSDNARQQLERQNKELKAKLQELEGAVKSKFKATISALEAKIGQLEEQLEQEAKERAAANKLVRRTEKKLKEIFMQVEDERRHADQYKEQMEKANARMKQLKRQLEEAEEEATRANASRRKLQRELDDATEANEGLSREVSTLKNRLRRGGPISFSSSRSGRRQLHLEGASLELSDDDTESKTSDVNETQPPQSE

SEQ ID NO: 54500 - protein, 1985 aa, Homo sapiens
  Payload ID: 10757
  Gene Symbol: MYH10
  Gene Name: myosin, heavy chain 10, non-muscle
  Uniprot ID: P35580
  ENSP ID: ENSP00000369315
MAQRTGLEDPERYLFVDRAVIYNPATQADWTAKKLVWIPSERHGFEAASIKEERGDEVMVELAENGKKAMVNKDDIQKMNPPKFSKVEDMAELTCLNEASVLHNLKDRYYSGLIYTYSGLFCVVINPYKNLPIYSENIIEMYRGKKRHEMPPHIYAISESAYRCMLQDREDQSILCTGESGAGKTENTKKVIQYLAHVASSHKGRKDHNIPESPKPVKHQGELERQLLQANPILESFGNAKTVKNDNSSRFGKFIRINFDVTGYIVGANIETYLLEKSRAVRQAKDERTFHIFYQLLSGAGEHLKSDLLLEGFNNYRFLSNGYIPIPGQQDKDNFQETMEAMHIMGFSHEEILSMLKVVSSVLQFGNISFKKERNTDQASMPENTVAQKLCHLLGMNVMEFTRAILTPRIKVGRDYVQKAQTKEQADFAVEALAKATYERLFRWLVHRINKALDRTKRQGASFIGILDIAGFEIFELNSFEQLCINYTNEKLQQLFNHTMFILEQEEYQREGIEWNFIDFGLDLQPCIDLIERPANPPGVLALLDEECWFPKATDKTFVEKLVQEQGSHSKFQKPRQLKDKADFCIIHYAGKVDYKADEWLMKNMDPLNDNVATLLHQSSDRFVAELWKDVDRIVGLDQVTGMTETAFGSAYKTKKGMFRTVGQLYKESLTKLMATLRNTNPNFVRCIIPNHEKRAGKLDPHLVLDQLRCNGVLEGIRICRQGFPNRIVFQEFRQRYEILTPNAIPKGFMDGKQACERMIRALELDPNLYRIGQSKIFFRAGVLAHLEEERDLKITDIIIFFQAVCRGYLARKAFAKKQQQLSALKVLQRNCAAYLKLRHWQWWRVFTKVKPLLQVTRQEEELQAKDEELLKVKEKQTKVEGELEEMERKHQQLLEEKNILAEQLQAETELFAEAEEMRARLAAKKQELEEILHDLESRVEEEEERNQILQNEKKKMQAHIQDLEEQLDEEEGARQKLQLEKVTAEAKIKKMEEEILLLEDQNSKFIKEKKLMEDRIAECSSQLAEEEEKAKNLAKIRNKQEVMISDLEERLKKEEKTRQELEKAKRKLDGETTDLQDQIAELQAQIDELKLQLAKKEEELQGALARGDDETLHKNNALKVVRELQAQIAELQEDFESEKASRNKAEKQKRDLSEELEALKTELEDTLDTTAAQQELRTKREQEVAELKKALEEETKNHEAQIQDMRQRHATALEELSEQLEQAKRFKANLEKNKQGLETDNKELACEVKVLQQVKAESEHKRKKLDAQVQELHAKVSEGDRLRVELAEKASKLQNELDNVSTLLEEAEKKGIKFAKDAASLESQLQDTQELLQEETRQKLNLSSRIRQLEEEKNSLQEQQEEEEEARKNLEKQVLALQSQLADTKKKVDDDLGTIESLEEAKKKLLKDAEALSQRLEEKALAYDKLEKTKNRLQQELDDLTVDLDHQRQVASNLEKKQKKFDQLLAEEKSISARYAEERDRAEAEAREKETKALSLARALEEALEAKEEFERQNKQLRADMEDLMSSKDDVGKNVHELEKSKRALEQQVEEMRTQLEELEDELQATEDAKLRLEVNMQAMKAQFERDLQTRDEQNEEKKRLLIKQVRELEAELEDERKQRALAVASKKKMEIDLKDLEAQIEAANKARDEVIKQLRKLQAQMKDYQRELEEARASRDEIFAQSKESEKKLKSLEAEILQLQEELASSERARRHAEQERDELADEITNSASGKSALLDEKRRLEARIAQLEEELEEEQSNMELLNDRFRKTTLQVDTLNAELAAERSAAQKSDNARQQLERQNKELKAKLQELEGAVKSKFKATISALEAKIGQLEEQLEQEAKERAAANKLVRRTEKKLKEIFMQVEDERRHADQYKEQMEKANARMKQLKRQLEEAEEEATRANASRRKLQRELDDATEANEGLSREVSTLKNRLRRGGPISFSSSRSGRRQLHLEGASLELSDDDTESKTSDVNETQPPQSE

SEQ ID NO: 54501 - protein, 187 aa, Homo sapiens
  Payload ID: 10757
  Gene Symbol: MYH10
  Gene Name: myosin, heavy chain 10, non-muscle
  ENSP ID: ENSP00000408220
MAQRTGLEDPERYLFVDRAVIYNPATQADWTAKKLVWIPSERHGFEAASIKEERGDEVMVELAENGKKAMVNKDDIQKMNPPKFSKVEDMAELTCLNEASVLHNLKDRYYSGLIYTYSGLFCVVINPYKNLPIYSENIIEMYRGKKRHEMPPHIYAISESAYRCMLQDREDQSILCTGESGAGKTEN

SEQ ID NO: 54502 - protein, 1972 aa, Homo sapiens
  Payload ID: 10758
  Gene Symbol: MYH11
  Gene Name: myosin, heavy chain 11, smooth muscle
  Uniprot ID: P35749
  ENSP ID: ENSP00000300036
MAQKGQLSDDEKFLFVDKNFINSPVAQADWAAKRLVWVPSEKQGFEAASIKEEKGDEVVVELVENGKKVTVGKDDIQKMNPPKFSKVEDMAELTCLNEASVLHNLRERYFSGLIYTYSGLFCVVVNPYKHLPIYSEKIVDMYKGKKRHEMPPHIYAIADTAYRSMLQDREDQSILCTGESGAGKTENTKKVIQYLAVVASSHKGKKDTSITGELEKQLLQANPILEAFGNAKTVKNDNSSRFGKFIRINFDVTGYIVGANIETYLLEKSRAIRQARDERTFHIFYYMIAGAKEKMRSDLLLEGFNNYTFLSNGFVPIPAAQDDEMFQETVEAMAIMGFSEEEQLSILKVVSSVLQLGNIVFKKERNTDQASMPDNTAAQKVCHLMGINVTDFTRSILTPRIKVGRDVVQKAQTKEQADFAVEALAKATYERLFRWILTRVNKALDKTHRQGASFLGILDIAGFEIFEVNSFEQLCINYTNEKLQQLFNHTMFILEQEEYQREGIEWNFIDFGLDLQPCIELIERPNNPPGVLALLDEECWFPKATDKSFVEKLCTEQGSHPKFQKPKQLKDKTEFSIIHYAGKVDYNASAWLTKNMDPLNDNVTSLLNASSDKFVADLWKDVDRIVGLDQMAKMTESSLPSASKTKKGMFRTVGQLYKEQLGKLMTTLRNTTPNFVRCIIPNHEKRSGKLDAFLVLEQLRCNGVLEGIRICRQGFPNRIVFQEFRQRYEILAANAIPKGFMDGKQACILMIKALELDPNLYRIGQSKIFFRTGVLAHLEEERDLKITDVIMAFQAMCRGYLARKAFAKRQQQLTAMKVIQRNCAAYLKLRNWQWWRLFTKVKPLLQVTRQEEEMQAKEDELQKTKERQQKAENELKELEQKHSQLTEEKNLLQEQLQAETELYAEAEEMRVRLAAKKQELEEILHEMEARLEEEEDRGQQLQAERKKMAQQMLDLEEQLEEEEAARQKLQLEKVTAEAKIKKLEDEILVMDDQNNKLSKERKLLEERISDLTTNLAEEEEKAKNLTKLKNKHESMISELEVRLKKEEKSRQELEKLKRKLEGDASDFHEQIADLQAQIAELKMQLAKKEEELQAALARLDDEIAQKNNALKKIRELEGHISDLQEDLDSERAARNKAEKQKRDLGEELEALKTELEDTLDSTATQQELRAKREQEVTVLKKALDEETRSHEAQVQEMRQKHAQAVEELTEQLEQFKRAKANLDKNKQTLEKENADLAGELRVLGQAKQEVEHKKKKLEAQVQELQSKCSDGERARAELNDKVHKLQNEVESVTGMLNEAEGKAIKLAKDVASLSSQLQDTQELLQEETRQKLNVSTKLRQLEEERNSLQDQLDEEMEAKQNLERHISTLNIQLSDSKKKLQDFASTVEALEEGKKRFQKEIENLTQQYEEKAAAYDKLEKTKNRLQQELDDLVVDLDNQRQLVSNLEKKQRKFDQLLAEEKNISSKYADERDRAEAEAREKETKALSLARALEEALEAKEELERTNKMLKAEMEDLVSSKDDVGKNVHELEKSKRALETQMEEMKTQLEELEDELQATEDAKLRLEVNMQALKGQFERDLQARDEQNEEKRRQLQRQLHEYETELEDERKQRALAAAAKKKLEGDLKDLELQADSAIKGREEAIKQLRKLQAQMKDFQRELEDARASRDEIFATAKENEKKAKSLEADLMQLQEDLAAAERARKQADLEKEELAEELASSLSGRNALQDEKRRLEARIAQLEEELEEEQGNMEAMSDRVRKATQQAEQLSNELATERSTAQKNESARQQLERQNKELRSKLHEMEGAVKSKFKSTIAALEAKIAQLEEQVEQEAREKQAATKSLKQKDKKLKEILLQVEDERKMAEQYKEQAEKGNARVKQLKRQLEEAEEESQRINANRRKLQRELDEATESNEAMGREVNALKSKLRRGNETSFVPSRRSGGRRVIENADGSEEETDTRDADFNGTKASE

SEQ ID NO: 54503 - protein, 1979 aa, Homo sapiens
  Payload ID: 10758
  Gene Symbol: MYH11
  Gene Name: myosin, heavy chain 11, smooth muscle
  Uniprot ID: P35749
  ENSP ID: ENSP00000379616
MAQKGQLSDDEKFLFVDKNFINSPVAQADWAAKRLVWVPSEKQGFEAASIKEEKGDEVVVELVENGKKVTVGKDDIQKMNPPKFSKVEDMAELTCLNEASVLHNLRERYFSGLIYTYSGLFCVVVNPYKHLPIYSEKIVDMYKGKKRHEMPPHIYAIADTAYRSMLQDREDQSILCTGESGAGKTENTKKVIQYLAVVASSHKGKKDTSITQGPSFAYGELEKQLLQANPILEAFGNAKTVKNDNSSRFGKFIRINFDVTGYIVGANIETYLLEKSRAIRQARDERTFHIFYYMIAGAKEKMRSDLLLEGFNNYTFLSNGFVPIPAAQDDEMFQETVEAMAIMGFSEEEQLSILKVVSSVLQLGNIVFKKERNTDQASMPDNTAAQKVCHLMGINVTDFTRSILTPRIKVGRDVVQKAQTKEQADFAVEALAKATYERLFRWILTRVNKALDKTHRQGASFLGILDIAGFEIFEVNSFEQLCINYTNEKLQQLFNHTMFILEQEEYQREGIEWNFIDFGLDLQPCIELIERPNNPPGVLALLDEECWFPKATDKSFVEKLCTEQGSHPKFQKPKQLKDKTEFSIIHYAGKVDYNASAWLTKNMDPLNDNVTSLLNASSDKFVADLWKDVDRIVGLDQMAKMTESSLPSASKTKKGMFRTVGQLYKEQLGKLMTTLRNTTPNFVRCIIPNHEKRSGKLDAFLVLEQLRCNGVLEGIRICRQGFPNRIVFQEFRQRYEILAANAIPKGFMDGKQACILMIKALELDPNLYRIGQSKIFFRTGVLAHLEEERDLKITDVIMAFQAMCRGYLARKAFAKRQQQLTAMKVIQRNCAAYLKLRNWQWWRLFTKVKPLLQVTRQEEEMQAKEDELQKTKERQQKAENELKELEQKHSQLTEEKNLLQEQLQAETELYAEAEEMRVRLAAKKQELEEILHEMEARLEEEEDRGQQLQAERKKMAQQMLDLEEQLEEEEAARQKLQLEKVTAEAKIKKLEDEILVMDDQNNKLSKERKLLEERISDLTTNLAEEEEKAKNLTKLKNKHESMISELEVRLKKEEKSRQELEKLKRKLEGDASDFHEQIADLQAQIAELKMQLAKKEEELQAALARLDDEIAQKNNALKKIRELEGHISDLQEDLDSERAARNKAEKQKRDLGEELEALKTELEDTLDSTATQQELRAKREQEVTVLKKALDEETRSHEAQVQEMRQKHAQAVEELTEQLEQFKRAKANLDKNKQTLEKENADLAGELRVLGQAKQEVEHKKKKLEAQVQELQSKCSDGERARAELNDKVHKLQNEVESVTGMLNEAEGKAIKLAKDVASLSSQLQDTQELLQEETRQKLNVSTKLRQLEEERNSLQDQLDEEMEAKQNLERHISTLNIQLSDSKKKLQDFASTVEALEEGKKRFQKEIENLTQQYEEKAAAYDKLEKTKNRLQQELDDLVVDLDNQRQLVSNLEKKQRKFDQLLAEEKNISSKYADERDRAEAEAREKETKALSLARALEEALEAKEELERTNKMLKAEMEDLVSSKDDVGKNVHELEKSKRALETQMEEMKTQLEELEDELQATEDAKLRLEVNMQALKGQFERDLQARDEQNEEKRRQLQRQLHEYETELEDERKQRALAAAAKKKLEGDLKDLELQADSAIKGREEAIKQLRKLQAQMKDFQRELEDARASRDEIFATAKENEKKAKSLEADLMQLQEDLAAAERARKQADLEKEELAEELASSLSGRNALQDEKRRLEARIAQLEEELEEEQGNMEAMSDRVRKATQQAEQLSNELATERSTAQKNESARQQLERQNKELRSKLHEMEGAVKSKFKSTIAALEAKIAQLEEQVEQEAREKQAATKSLKQKDKKLKEILLQVEDERKMAEQYKEQAEKGNARVKQLKRQLEEAEEESQRINANRRKLQRELDEATESNEAMGREVNALKSKLRRGNETSFVPSRRSGGRRVIENADGSEEETDTRDADFNGTKASE

SEQ ID NO: 54504 - protein, 1945 aa, Homo sapiens
  Payload ID: 10758
  Gene Symbol: MYH11
  Gene Name: myosin, heavy chain 11, smooth muscle
  Uniprot ID: P35749
  ENSP ID: ENSP00000407821
MAQKGQLSDDEKFLFVDKNFINSPVAQADWAAKRLVWVPSEKQGFEAASIKEEKGDEVVVELVENGKKVTVGKDDIQKMNPPKFSKVEDMAELTCLNEASVLHNLRERYFSGLIYTYSGLFCVVVNPYKHLPIYSEKIVDMYKGKKRHEMPPHIYAIADTAYRSMLQDREDQSILCTGESGAGKTENTKKVIQYLAVVASSHKGKKDTSITQGPSFAYGELEKQLLQANPILEAFGNAKTVKNDNSSRFGKFIRINFDVTGYIVGANIETYLLEKSRAIRQARDERTFHIFYYMIAGAKEKMRSDLLLEGFNNYTFLSNGFVPIPAAQDDEMFQETVEAMAIMGFSEEEQLSILKVVSSVLQLGNIVFKKERNTDQASMPDNTAAQKVCHLMGINVTDFTRSILTPRIKVGRDVVQKAQTKEQADFAVEALAKATYERLFRWILTRVNKALDKTHRQGASFLGILDIAGFEIFEVNSFEQLCINYTNEKLQQLFNHTMFILEQEEYQREGIEWNFIDFGLDLQPCIELIERPNNPPGVLALLDEECWFPKATDKSFVEKLCTEQGSHPKFQKPKQLKDKTEFSIIHYAGKVDYNASAWLTKNMDPLNDNVTSLLNASSDKFVADLWKDVDRIVGLDQMAKMTESSLPSASKTKKGMFRTVGQLYKEQLGKLMTTLRNTTPNFVRCIIPNHEKRSGKLDAFLVLEQLRCNGVLEGIRICRQGFPNRIVFQEFRQRYEILAANAIPKGFMDGKQACILMIKALELDPNLYRIGQSKIFFRTGVLAHLEEERDLKITDVIMAFQAMCRGYLARKAFAKRQQQLTAMKVIQRNCAAYLKLRNWQWWRLFTKVKPLLQVTRQEEEMQAKEDELQKTKERQQKAENELKELEQKHSQLTEEKNLLQEQLQAETELYAEAEEMRVRLAAKKQELEEILHEMEARLEEEEDRGQQLQAERKKMAQQMLDLEEQLEEEEAARQKLQLEKVTAEAKIKKLEDEILVMDDQNNKLSKERKLLEERISDLTTNLAEEEEKAKNLTKLKNKHESMISELEVRLKKEEKSRQELEKLKRKLEGDASDFHEQIADLQAQIAELKMQLAKKEEELQAALARLDDEIAQKNNALKKIRELEGHISDLQEDLDSERAARNKAEKQKRDLGEELEALKTELEDTLDSTATQQELRAKREQEVTVLKKALDEETRSHEAQVQEMRQKHAQAVEELTEQLEQFKRAKANLDKNKQTLEKENADLAGELRVLGQAKQEVEHKKKKLEAQVQELQSKCSDGERARAELNDKVHKLQNEVESVTGMLNEAEGKAIKLAKDVASLSSQLQDTQELLQEETRQKLNVSTKLRQLEEERNSLQDQLDEEMEAKQNLERHISTLNIQLSDSKKKLQDFASTVEALEEGKKRFQKEIENLTQQYEEKAAAYDKLEKTKNRLQQELDDLVVDLDNQRQLVSNLEKKQRKFDQLLAEEKNISSKYADERDRAEAEAREKETKALSLARALEEALEAKEELERTNKMLKAEMEDLVSSKDDVGKNVHELEKSKRALETQMEEMKTQLEELEDELQATEDAKLRLEVNMQALKGQFERDLQARDEQNEEKRRQLQRQLHEYETELEDERKQRALAAAAKKKLEGDLKDLELQADSAIKGREEAIKQLRKLQAQMKDFQRELEDARASRDEIFATAKENEKKAKSLEADLMQLQEDLAAAERARKQADLEKEELAEELASSLSGRNALQDEKRRLEARIAQLEEELEEEQGNMEAMSDRVRKATQQAEQLSNELATERSTAQKNESARQQLERQNKELRSKLHEMEGAVKSKFKSTIAALEAKIAQLEEQVEQEAREKQAATKSLKQKDKKLKEILLQVEDERKMAEQYKEQAEKGNARVKQLKRQLEEAEEESQRINANRRKLQRELDEATESNEAMGREVNALKSKLRGPPPQETSQ

SEQ ID NO: 54505 - protein, 1938 aa, Homo sapiens
  Payload ID: 10758
  Gene Symbol: MYH11
  Gene Name: myosin, heavy chain 11, smooth muscle
  Uniprot ID: P35749
  ENSP ID: ENSP00000458731
MAQKGQLSDDEKFLFVDKNFINSPVAQADWAAKRLVWVPSEKQGFEAASIKEEKGDEVVVELVENGKKVTVGKDDIQKMNPPKFSKVEDMAELTCLNEASVLHNLRERYFSGLIYTYSGLFCVVVNPYKHLPIYSEKIVDMYKGKKRHEMPPHIYAIADTAYRSMLQDREDQSILCTGESGAGKTENTKKVIQYLAVVASSHKGKKDTSITGELEKQLLQANPILEAFGNAKTVKNDNSSRFGKFIRINFDVTGYIVGANIETYLLEKSRAIRQARDERTFHIFYYMIAGAKEKMRSDLLLEGFNNYTFLSNGFVPIPAAQDDEMFQETVEAMAIMGFSEEEQLSILKVVSSVLQLGNIVFKKERNTDQASMPDNTAAQKVCHLMGINVTDFTRSILTPRIKVGRDVVQKAQTKEQADFAVEALAKATYERLFRWILTRVNKALDKTHRQGASFLGILDIAGFEIFEVNSFEQLCINYTNEKLQQLFNHTMFILEQEEYQREGIEWNFIDFGLDLQPCIELIERPNNPPGVLALLDEECWFPKATDKSFVEKLCTEQGSHPKFQKPKQLKDKTEFSIIHYAGKVDYNASAWLTKNMDPLNDNVTSLLNASSDKFVADLWKDVDRIVGLDQMAKMTESSLPSASKTKKGMFRTVGQLYKEQLGKLMTTLRNTTPNFVRCIIPNHEKRSGKLDAFLVLEQLRCNGVLEGIRICRQGFPNRIVFQEFRQRYEILAANAIPKGFMDGKQACILMIKALELDPNLYRIGQSKIFFRTGVLAHLEEERDLKITDVIMAFQAMCRGYLARKAFAKRQQQLTAMKVIQRNCAAYLKLRNWQWWRLFTKVKPLLQVTRQEEEMQAKEDELQKTKERQQKAENELKELEQKHSQLTEEKNLLQEQLQAETELYAEAEEMRVRLAAKKQELEEILHEMEARLEEEEDRGQQLQAERKKMAQQMLDLEEQLEEEEAARQKLQLEKVTAEAKIKKLEDEILVMDDQNNKLSKERKLLEERISDLTTNLAEEEEKAKNLTKLKNKHESMISELEVRLKKEEKSRQELEKLKRKLEGDASDFHEQIADLQAQIAELKMQLAKKEEELQAALARLDDEIAQKNNALKKIRELEGHISDLQEDLDSERAARNKAEKQKRDLGEELEALKTELEDTLDSTATQQELRAKREQEVTVLKKALDEETRSHEAQVQEMRQKHAQAVEELTEQLEQFKRAKANLDKNKQTLEKENADLAGELRVLGQAKQEVEHKKKKLEAQVQELQSKCSDGERARAELNDKVHKLQNEVESVTGMLNEAEGKAIKLAKDVASLSSQLQDTQELLQEETRQKLNVSTKLRQLEEERNSLQDQLDEEMEAKQNLERHISTLNIQLSDSKKKLQDFASTVEALEEGKKRFQKEIENLTQQYEEKAAAYDKLEKTKNRLQQELDDLVVDLDNQRQLVSNLEKKQRKFDQLLAEEKNISSKYADERDRAEAEAREKETKALSLARALEEALEAKEELERTNKMLKAEMEDLVSSKDDVGKNVHELEKSKRALETQMEEMKTQLEELEDELQATEDAKLRLEVNMQALKGQFERDLQARDEQNEEKRRQLQRQLHEYETELEDERKQRALAAAAKKKLEGDLKDLELQADSAIKGREEAIKQLRKLQAQMKDFQRELEDARASRDEIFATAKENEKKAKSLEADLMQLQEDLAAAERARKQADLEKEELAEELASSLSGRNALQDEKRRLEARIAQLEEELEEEQGNMEAMSDRVRKATQQAEQLSNELATERSTAQKNESARQQLERQNKELRSKLHEMEGAVKSKFKSTIAALEAKIAQLEEQVEQEAREKQAATKSLKQKDKKLKEILLQVEDERKMAEQYKEQAEKGNARVKQLKRQLEEAEEESQRINANRRKLQRELDEATESNEAMGREVNALKSKLRGPPPQETSQ

SEQ ID NO: 54506 - protein, 1945 aa, Homo sapiens; identical to SEQ ID NO: 54504
  Payload ID: 10758
  Gene Symbol: MYH11
  Gene Name: myosin, heavy chain 11, smooth muscle
  Uniprot ID: P35749
  ENSP ID: ENSP00000478092

SEQ ID NO: 54507 - protein, 1979 aa, Homo sapiens; identical to SEQ ID NO: 54503
  Payload ID: 10758
  Gene Symbol: MYH11
  Gene Name: myosin, heavy chain 11, smooth muscle
  Uniprot ID: P35749
  ENSP ID: ENSP00000478109

SEQ ID NO: 54508 - protein, 1938 aa, Homo sapiens; identical to SEQ ID NO: 54505
  Payload ID: 10758
  Gene Symbol: MYH11
  Gene Name: myosin, heavy chain 11, smooth muscle
  Uniprot ID: P35749
  ENSP ID: ENSP00000478816

SEQ ID NO: 54509 - protein, 2029 aa, Homo sapiens
  Payload ID: 10758
  Gene Symbol: MYH11
  Gene Name: myosin, heavy chain 11, smooth muscle
  ENSP ID: ENSP00000479371
MAQKGQLSDDEKFLFVDKNFINSPVAQADWAAKRLVWVPSEKQGFEAASIKEEKGDEVVVELVENGKKVTVGKDDIQKMNPPKFSKVEDMAELTCLNEASVLHNLRERYFSGLIYTYSGLFCVVVNPYKHLPIYSEKIVDMYKGKKRHEMPPHIYAIADTAYRSMLQDREDQSILCTGESGAGKTENTKKVIQYLAVVASSHKGKKDTSITEGPSFWRGELEKQLLQANPILEAFGNAKTVKNDNSSRFGKFIRINFDVTGYIVGANIETYLLEKSRAIRQARDERTFHIFYYMIAGAKEKMRSDLLLEGFNNYTFLSNGFVPIPAAQDDEMFQETVEAMAIMGFSEEEQLSILKVVSSVLQLGNIVFKKERNTDQASMPDNTAAQKVCHLMGINVTDFTRSILTPRIKVGRDVVQKAQTKEQADFAVEALAKATYERLFRWILTRVNKALDKTHRQGASFLGILDIAGFEIFEVNSFEQLCINYTNEKLQQLFNHTMFILEQEEYQREGIEWNFIDFGLDLQPCIELIERPNNPPGVLALLDEECWFPKATDKSFVEKLCTEQGSHPKFQKPKQLKDKTEFSIIHYAGKVDYNASAWLTKNMDPLNDNVTSLLNASSDKFVADLWKDVDRIVGLDQMAKMTESSLPSASKTKKGMFRTVGQLYKEQLGKLMTTLRNTTPNFVRCIIPNHEKRSGKLDAFLVLEQLRCNGVLEGIRICRQGFPNRIVFQEFRQRYEILAANAIPKGFMDGKQACILMIKALELDPNLYRIGQSKIFFRTGVLAHLEEERDLKITDVIMAFQAMCRGYLARKAFAKRQQQLTAMKVIQRNCAAYLKLRNWQWWRLFTKVKPLLQVTRQEEEMQAKEDELQKTKERQQKAENELKELEQKHSQLTEEKNLLQEQLQAETELYAEAEEMRVRLAAKKQELEEILHEMEARLEEEEDRGQQLQAERKKMAQQMLDLEEQLEEEEAARQKLQLEKVTAEAKIKKLEDEILVMDDQNNKLSKERKLLEERISDLTTNLAEEEEKAKNLTKLKNKHESMISELEVRLKKEEKSRQELEKLKRKLEGDASDFHEQIADLQAQIAELKMQLAKKEEELQAALARLDDEIAQKNNALKKIRELEGHISDLQEDLDSERAARNKAEKQKRDLGEELEALKTELEDTLDSTATQQELRAKREQEVTVLKKALDEETRSHEAQVQEMRQKHAQAVEELTEQLEQFKRAKANLDKNKQTLEKENADLAGELRVLGQAKQEVEHKKKKLEAQVQELQSKCSDGERARAELNDKVHKLQNEVESVTGMLNEAEGKAIKLAKDVASLSSQLQDTQELLQEETRQKLNVSTKLRQLEEERNSLQDQLDEEMEAKQNLERHISTLNIQLSDSKKKLQDFASTVEALEEGKKRFQKEIENLTQQYEEKAAAYDKLEKTKNRLQQELDDLVVDLDNQRQLVSNLEKKQRKFDQLLAEEKNISSKYADERDRAEAEAREKETKALSLARALEEALEAKEELERTNKMLKAEMEDLVSSKDDVGKNVHELEKSKRALETQMEEMKTQLEELEDELQATEDAKLRLEVNMQALKGQFERDLQARDEQNEEKRRQLQRQLHEYETELEDERKQRALAAAAKKKLEGDLKDLELQADSAIKGREEAIKQLRKLQAQMKDFQRELEDARASRDEIFATAKENEKKAKSLEADLMQLQEDLAAAERARKQADLEKEELAEELASSLSGRNALQDEKRRLEARIAQLEEELEEEQGNMEAMSDRVRKATQQAEQLSNELATERSTAQKNESARQQLERQNKELRSKLHEMEGAVKSKFKSTIAALEAKIAQLEEQVEQEAREKQAATKSLKQKDKKLKEILLQVEDERKMAEQYKEQAEKGNARVKQLKRQLEEAEEESQRINANRRKLQRELDEATESNEAMGREVNALKSKLRGPPHRKLRSDAPGEETRPLSFLLEGLEDVELLKMQMVLRRKRTLETQTSMEPRPVNKQLSTVLHHGKKTKNQNKQTKKTQQQPRTKQNPADCT

SEQ ID NO: 54510 - protein, 2029 aa, Homo sapiens; identical to SEQ ID NO: 54509
  Payload ID: 10758
  Gene Symbol: MYH11
  Gene Name: myosin, heavy chain 11, smooth muscle
  ENSP ID: ENSP00000484924

SEQ ID NO: 54511 - protein, 1972 aa, Homo sapiens; identical to SEQ ID NO: 54502
  Payload ID: 10758
  Gene Symbol: MYH11
  Gene Name: myosin, heavy chain 11, smooth muscle
  Uniprot ID: P35749
  ENSP ID: ENSP00000488461

SEQ ID NO: 54512 - protein, 1938 aa, Homo sapiens
  Payload ID: 10759
  Gene Symbol: MYH13
  Gene Name: myosin, heavy chain 13, skeletal muscle
  Uniprot ID: Q9UKX3
  ENSP ID: ENSP00000252172
MSSDAEMAIFGEAAPYLRKPEKERIEAQNRPFDSKKACFVADNKEMYVKGMIQTRENDKVIVKTLDDRMLTLNNDQVFPMNPPKFDKIEDMAMMTHLHEPAVLYNLKERYAAWMIYTYSGLFCVTVNPYKWLPVYKPEVVAAYRGKKRQEAPPHIFSISDNAYQFMLTDRDNQSILITGESGAGKTVNTKRVIQYFATIAVTGDKKKETQPGKMQGTLEDQIIQANPLLEAFGNAKTVRNDNSSRFGKFIRIHFGATGKLASADIETYLLEKSRVTFQLSSERSYHIFYQIMSNKKPELIDLLLISTNPFDFPFVSQGEVTVASIDDSEELLATDNAIDILGFSSEEKVGIYKLTGAVMHYGNMKFKQKQREEQAEPDGTEVADKAGYLMGLNSAEMLKGLCCPRVKVGNEYVTKGQNVQQVTNSVGALAKAVYEKMFLWMVTRINQQLDTKQPRQYFIGVLDIAGFEIFDFNSLEQLCINFTNEKLQQFFNHHMFVLEQEEYKKEGIEWEFIDFGMDLAACIELIEKPMGIFSILEEECMFPKATDTSFKNKLYDQHLGKSNNFQKPKPAKGKAEAHFSLVHYAGTVDYNIAGWLDKNKDPLNETVVGLYQKSSLKLLSFLFSNYAGAETGDSGGSKKGGKKKGSSFQTVSAVFRENLNKLMTNLRSTHPHFVRCLIPNETKTPGVMDHYLVMHQLRCNGVLEGIRICRKGFPSRILYADFKQRYRILNASAIPEGQFIDSKNASEKLLNSIDVDREQFRFGNTKVFFKAGLLGLLEEMRDEKLVTLMTSTQAVCRGYLMRVEFKKMMERRDSIFCIQYNIRSFMNVKHWPWMNLFFKIKPLLKSAEAEKEMATMKEDFERTKEELARSEARRKELEEKMVSLLQEKNDLQLQVQSETENLMDAEERCEGLIKSKILLEAKVKELTERLEEEEEMNSELVAKKRNLEDKCSSLKRDIDDLELTLTKVEKEKHATENKVKNLSEEMTALEENISKLTKEKKSLQEAHQQTLDDLQVEEDKVNGLIKINAKLEQQTDDLEGSLEQEKKLRADLERAKRKLEGDLKMSQESIMDLENDKQQIEEKLKKKEFELSQLQAKIDDEQVHSLQFQKKIKELQARIEELEEEIEAEHTLRAKIEKQRSDLARELEEISERLEEASGATSAQIEMNKKREAEFQKMRRDLEEATLQHEATAATLRKKQADSVAELGEQIDNLQRVKQKLEKEKSELKMEIDDMASNIEALSKSKSNIERTCRTVEDQFSEIKAKDEQQTQLIHDLNMQKARLQTQNGELSHRVEEKESLISQLTKSKQALTQQLEELKRQMEEETKAKNAMAHALQSSRHDCDLLREQYEEEQEAKAELQRALSKANSEVAQWRTKYETDAIQRTEELEEAKKKLAQRLQEAEENTETANSKCASLEKTKQRLQGEVEDLMRDLERSHTACATLDKKQRNFDKVLAEWKQKLDESQAELEAAQKESRSLSTELFKMRNAYEEVVDQLETLRRENKNLQEEISDLTEQIAETGKNLQEAEKTKKLVEQEKSDLQVALEEVEGSLEHEESKILRVQLELSQVKSELDRKVIEKDEEIEQLKRNSQRAAEALQSVLDAEIRSRNDALRLKKKMEGDLNEMEIQLGHSNRQMAETQKHLRTVQGQLKDSQLHLDDALRSNEDLKEQLAIVERRNGLLLEELEEMKVALEQTERTRRLSEQELLDASDRVQLLHSQNTSLINTKKKLEADIAQCQAEVENSIQESRNAEEKAKKAITDAAMMAEELKKEQDTSAHLERMKKNLEQTVKDLQHRLDEAEQLALKGGKKQIQKLENRVRELENELDVEQKRGAEALKGAHKYERKVKEMTYQAEEDHKNILRLQDLVDKLQAKVKSYKRQAEEAEEQANTQLSRCRRVQHELEEAAERADIAESQVNKLRAKSRDVGSQKMEE

SEQ ID NO: 54513 - protein, 1938 aa, Homo sapiens; identical to SEQ ID NO: 54512
  Payload ID: 10759
  Gene Symbol: MYH13
  Gene Name: myosin, heavy chain 13, skeletal muscle
  Uniprot ID: Q9UKX3
  ENSP ID: ENSP00000404570

SEQ ID NO: 54514 - protein, 1938 aa, Homo sapiens; identical to SEQ ID NO: 54512
  Payload ID: 10759
  Gene Symbol: MYH13
  Gene Name: myosin, heavy chain 13, skeletal muscle
  Uniprot ID: Q9UKX3
  ENSP ID: ENSP00000480864

SEQ ID NO: 54515 - protein, 508 aa, Homo sapiens
  Payload ID: 10760
  Gene Symbol: MYH14
  Gene Name: myosin, heavy chain 14, non-muscle
  ENSP ID: ENSP00000262269
MKKFEEDLLLLEDQNSKLSKERKLLEDRLAEFSSQAAEEEEKVKSLNKLRLKYEATIADMEDRLRKEEKGRQELEKLKRRLDGESSELQEQMVEQQQRAEELRAQLGRKEEELQAALARAEDEGGARAQLLKSLREAQAALAEAQEDLESERVARTKAEKQRRDLGEELEALRGELEDTLDSTNAQQELRSKREQEVTELKKTLEEETRIHEAAVQELRQRHGQALGELAEQLEQARRGKGAWEKTRLALEAEVSELRAELSSLQTARQEGEQRRRRLELQLQEVQGRAGDGERARAEAAEKLQRAQAELENVSGALNEAESKTIRLSKELSSTEAQLHDAQELLQEETRAKLALGSRVRAMEAEAAGLREQLEEEAAARERAGRELQTAQAQLSEWRRRQEEEAGALEAGEEARRRAAREAEALTQRLAEKTETVDRLERGRRRLQQELDDATMDLEQQRQLVSTLEKKQRKFDQLLAEEKAAVLRAVEERERPRQRAGSVRLGPCH

SEQ ID NO: 54516 - protein, 1995 aa, Homo sapiens
  Payload ID: 10760
  Gene Symbol: MYH14
  Gene Name: myosin, heavy chain 14, non-muscle
  Uniprot ID: Q7Z406
  ENSP ID: ENSP00000366169
MAAVTMSVPGRKAPPRPGPVPEAAQPFLFTPRGPSAGGGPGSGTSPQVEWTARRLVWVPSELHGFEAAALRDEGEEEAEVELAESGRRLRLPRDQIQRMNPPKFSKAEDMAELTCLNEASVLHNLRERYYSGLIYTYSGLFCVVINPYKQLPIYTEAIVEMYRGKKRHEVPPHVYAVTEGAYRSMLQDREDQSILCTGESGAGKTENTKKVIQYLAHVASSPKGRKEPGVPGELERQLLQANPILEAFGNAKTVKNDNSSRFGKFIRINFDVAGYIVGANIETYLLEKSRAIRQAKDECSFHIFYQLLGGAGEQLKADLLLEPCSHYRFLTNGPSSSPGQERELFQETLESLRVLGFSHEEIISMLRMVSAVLQFGNIALKRERNTDQATMPDNTAAQKLCRLLGLGVTDFSRALLTPRIKVGRDYVQKAQTKEQADFALEALAKATYERLFRWLVLRLNRALDRSPRQGASFLGILDIAGFEIFQLNSFEQLCINYTNEKLQQLFNHTMFVLEQEEYQREGIPWTFLDFGLDLQPCIDLIERPANPPGLLALLDEECWFPKATDKSFVEKVAQEQGGHPKFQRPRHLRDQADFSVLHYAGKVDYKANEWLMKNMDPLNDNVAALLHQSTDRLTAEIWKDVEGIVGLEQVSSLGDGPPGGRPRRGMFRTVGQLYKESLSRLMATLSNTNPSFVRCIVPNHEKRAGKLEPRLVLDQLRCNGVLEGIRICRQGFPNRILFQEFRQRYEILTPNAIPKGFMDGKQACEKMIQALELDPNLYRVGQSKIFFRAGVLAQLEEERDLKVTDIIVSFQAAARGYLARRAFQKRQQQQSALRVMQRNCAAYLKLRHWQWWRLFTKVKPLLQVTRQDEVLQARAQELQKVQELQQQSAREVGELQGRVAQLEEERARLAEQLRAEAELCAEAEETRGRLAARKQELELVVSELEARVGEEEECSRQMQTEKKRLQQHIQELEAHLEAEEGARQKLQLEKVTTEAKMKKFEEDLLLLEDQNSKLSKERKLLEDRLAEFSSQAAEEEEKVKSLNKLRLKYEATIADMEDRLRKEEKGRQELEKLKRRLDGESSELQEQMVEQQQRAEELRAQLGRKEEELQAALARAEDEGGARAQLLKSLREAQAALAEAQEDLESERVARTKAEKQRRDLGEELEALRGELEDTLDSTNAQQELRSKREQEVTELKKTLEEETRIHEAAVQELRQRHGQALGELAEQLEQARRGKGAWEKTRLALEAEVSELRAELSSLQTARQEGEQRRRRLELQLQEVQGRAGDGERARAEAAEKLQRAQAELENVSGALNEAESKTIRLSKELSSTEAQLHDAQELLQEETRAKLALGSRVRAMEAEAAGLREQLEEEAAARERAGRELQTAQAQLSEWRRRQEEEAGALEAGEEARRRAAREAEALTQRLAEKTETVDRLERGRRRLQQELDDATMDLEQQRQLVSTLEKKQRKFDQLLAEEKAAVLRAVEERERAEAEGREREARALSLTRALEEEQEAREELERQNRALRAELEALLSSKDDVGKSVHELERACRVAEQAANDLRAQVTELEDELTAAEDAKLRLEVTVQALKTQHERDLQGRDEAGEERRRQLAKQLRDAEVERDEERKQRTLAVAARKKLEGELEELKAQMASAGQGKEEAVKQLRKMQAQMKELWREVEETRTSREEIFSQNRESEKRLKGLEAEVLRLQEELAASDRARRQAQQDRDEMADEVANGNLSKAAILEEKRQLEGRLGQLEEELEEEQSNSELLNDRYRKLLLQVESLTTELSAERSFSAKAESGRQQLERQIQELRGRLGEEDAGARARHKMTIAALESKLAQAEEQLEQETRERILSGKLVRRAEKRLKEVVLQVEEERRVADQLRDQLEKGNLRVKQLKRQLEEAEEEASRAQAGRRRLQRELEDVTESAESMNREVTTLRNRLRRGPLTFTTRTVRQVFRLEEGVASDEEAEEAQPGSGPSPEPEGSPPAHPQ

SEQ ID NO: 54517 - protein, 638 aa, Homo sapiens
  Payload ID: 10760
  Gene Symbol: MYH14
  Gene Name: myosin, heavy chain 14, non-muscle
  ENSP ID: ENSP00000406273
MEAEAAGLREQLEEEAAARERAGRELQTAQAQLSEWRRRQEEEAGALEAGEEARRRAAREAEALTQRLAEKTETVDRLERGRRRLQQELDDATMDLEQQRQLVSTLEKKQRKFDQLLAEEKAAVLRAVEERERAEAEGREREARALSLTRALEEEQEAREELERQNRALRAELEALLSSKDDVGKSVHELERACRVAEQAANDLRAQVTELEDELTAAEDAKLRLEVTVQALKTQHERDLQGRDEAGEERRRQLAKQLRDAEVERDEERKQRTLAVAARKKLEGELEELKAQMASAGQGKEEAVKQLRKMQAQMKELWREVEETRTSREEIFSQNRESEKRLKGLEAEVLRLQEELAASDRARRQAQQDRDEMADEVANGNLSKAAILEEKRQLEGRLGQLEEELEEEQSNSELLNDRYRKLLLQVESLTTELSAERSFSAKAESGRQQLERQIQELRGRLGEEDAGARARHKMTIAALESKLAQAEEQLEQETRERILSGKLVRRAEKRLKEVVLQVEEERRVADQLRDQLEKGNLRVKQLKRQLEEAEEEASRAQAGRRRLQRELEDVTESAESMNREVTTLRNRLRRGPLTFTTRTVRQVFRLEEGVASDEEAEEAQPGSGPSPEPEGSPPAHPQ

SEQ ID NO: 54518 - protein, 2003 aa, Homo sapiens
  Payload ID: 10760
  Gene Symbol: MYH14
  Gene Name: myosin, heavy chain 14, non-muscle
  Uniprot ID: Q7Z406
  ENSP ID: ENSP00000407879
MAAVTMSVPGRKAPPRPGPVPEAAQPFLFTPRGPSAGGGPGSGTSPQVEWTARRLVWVPSELHGFEAAALRDEGEEEAEVELAESGRRLRLPRDQIQRMNPPKFSKAEDMAELTCLNEASVLHNLRERYYSGLIYTYSGLFCVVINPYKQLPIYTEAIVEMYRGKKRHEVPPHVYAVTEGAYRSMLQDREDQSILCTGESGAGKTENTKKVIQYLAHVASSPKGRKEPGVPASVSTVSYGELERQLLQANPILEAFGNAKTVKNDNSSRFGKFIRINFDVAGYIVGANIETYLLEKSRAIRQAKDECSFHIFYQLLGGAGEQLKADLLLEPCSHYRFLTNGPSSSPGQERELFQETLESLRVLGFSHEEIISMLRMVSAVLQFGNIALKRERNTDQATMPDNTAAQKLCRLLGLGVTDFSRALLTPRIKVGRDYVQKAQTKEQADFALEALAKATYERLFRWLVLRLNRALDRSPRQGASFLGILDIAGFEIFQLNSFEQLCINYTNEKLQQLFNHTMFVLEQEEYQREGIPWTFLDFGLDLQPCIDLIERPANPPGLLALLDEECWFPKATDKSFVEKVAQEQGGHPKFQRPRHLRDQADFSVLHYAGKVDYKANEWLMKNMDPLNDNVAALLHQSTDRLTAEIWKDVEGIVGLEQVSSLGDGPPGGRPRRGMFRTVGQLYKESLSRLMATLSNTNPSFVRCIVPNHEKRAGKLEPRLVLDQLRCNGVLEGIRICRQGFPNRILFQEFRQRYEILTPNAIPKGFMDGKQACEKMIQALELDPNLYRVGQSKIFFRAGVLAQLEEERDLKVTDIIVSFQAAARGYLARRAFQKRQQQQSALRVMQRNCAAYLKLRHWQWWRLFTKVKPLLQVTRQDEVLQARAQELQKVQELQQQSAREVGELQGRVAQLEEERARLAEQLRAEAELCAEAEETRGRLAARKQELELVVSELEARVGEEEECSRQMQTEKKRLQQHIQELEAHLEAEEGARQKLQLEKVTTEAKMKKFEEDLLLLEDQNSKLSKERKLLEDRLAEFSSQAAEEEEKVKSLNKLRLKYEATIADMEDRLRKEEKGRQELEKLKRRLDGESSELQEQMVEQQQRAEELRAQLGRKEEELQAALARAEDEGGARAQLLKSLREAQAALAEAQEDLESERVARTKAEKQRRDLGEELEALRGELEDTLDSTNAQQELRSKREQEVTELKKTLEEETRIHEAAVQELRQRHGQALGELAEQLEQARRGKGAWEKTRLALEAEVSELRAELSSLQTARQEGEQRRRRLELQLQEVQGRAGDGERARAEAAEKLQRAQAELENVSGALNEAESKTIRLSKELSSTEAQLHDAQELLQEETRAKLALGSRVRAMEAEAAGLREQLEEEAAARERAGRELQTAQAQLSEWRRRQEEEAGALEAGEEARRRAAREAEALTQRLAEKTETVDRLERGRRRLQQELDDATMDLEQQRQLVSTLEKKQRKFDQLLAEEKAAVLRAVEERERAEAEGREREARALSLTRALEEEQEAREELERQNRALRAELEALLSSKDDVGKSVHELERACRVAEQAANDLRAQVTELEDELTAAEDAKLRLEVTVQALKTQHERDLQGRDEAGEERRRQLAKQLRDAEVERDEERKQRTLAVAARKKLEGELEELKAQMASAGQGKEEAVKQLRKMQAQMKELWREVEETRTSREEIFSQNRESEKRLKGLEAEVLRLQEELAASDRARRQAQQDRDEMADEVANGNLSKAAILEEKRQLEGRLGQLEEELEEEQSNSELLNDRYRKLLLQVESLTTELSAERSFSAKAESGRQQLERQIQELRGRLGEEDAGARARHKMTIAALESKLAQAEEQLEQETRERILSGKLVRRAEKRLKEVVLQVEEERRVADQLRDQLEKGNLRVKQLKRQLEEAEEEASRAQAGRRRLQRELEDVTESAESMNREVTTLRNRLRRGPLTFTTRTVRQVFRLEEGVASDEEAEEAQPGSGPSPEPEGSPPAHPQ

SEQ ID NO: 54519 - protein, 1002 aa, Homo sapiens
  Payload ID: 10760
  Gene Symbol: MYH14
  Gene Name: myosin, heavy chain 14, non-muscle
  ENSP ID: ENSP00000469573
MAAVTMSVPGRKAPPRPGPVPEAAQPFLFTPRGPSAGGGPGSGTSPQVEWTARRLVWVPSELHGFEAAALRDEGEEEAEVELAESGRRLRLPRDQIQRMNPPKFSKAEDMAELTCLNEASVLHNLRERYYSGLIYTYSGLFCVVINPYKQLPIYTEAIVEMYRGKKRHEVPPHVYAVTEGAYRSMLQDREDQSILCTGESGAGKTENTKKVIQYLAHVASSPKGRKEPGVPASVSTVSYGELERQLLQANPILEAFGNAKTVKNDNSSRFGKFIRINFDVAGYIVGANIETYLLEKSRAIRQAKDECSFHIFYQLLGGAGEQLKADLLLEPCSHYRFLTNGPSSSPGQERELFQETLESLRVLGFSHEEIISMLRMVSAVLQFGNIALKRERNTDQATMPDNTAAQKLCRLLGLGVTDFSRALLTPRIKVGRDYVQKAQTKEQADFALEALAKATYERLFRWLVLRLNRALDRSPRQGASFLGILDIAGFEIFQLNSFEQLCINYTNEKLQQLFNHTMFVLEQEEYQREGIPWTFLDFGLDLQPCIDLIERPANPPGLLALLDEECWFPKATDKSFVEKVAQEQGGHPKFQRPRHLRDQADFSVLHYAGKVDYKANEWLMKNMDPLNDNVAALLHQSTDRLTAEIWKDVEGIVGLEQVSSLGDGPPGGRPRRGMFRTVGQLYKESLSRLMATLSNTNPSFVRCIVPNHEKRAGKLEPRLVLDQLRCNGVLEGIRICRQGFPNRILFQEFRQRYEILTPNAIPKGFMDGKQACEKMIQALELDPNLYRVGQSKIFFRAGVLAQLEEERDLKVTDIIVSFQAAARGYLARRAFQKRQQQQSALRVMQRNCAAYLKLRHWQWWRLFTKVKPLLQVTRQDEVLQARAQELQKVQELQQQSAREVGELQGRVAQLEEERARLAEQLRAEAELCAEAEETRGRLAARKQELELVVSELEARVGEEEECSRQMQTEKKRLQQHIQELEAHLEAEEGARQKLQLEKVTTE

SEQ ID NO: 54520 - protein, 2036 aa, Homo sapiens
  Payload ID: 10760
  Gene Symbol: MYH14
  Gene Name: myosin, heavy chain 14, non-muscle
  Uniprot ID: Q7Z406
  ENSP ID: ENSP00000470298
MAAVTMSVPGRKAPPRPGPVPEAAQPFLFTPRGPSAGGGPGSGTSPQVEWTARRLVWVPSELHGFEAAALRDEGEEEAEVELAESGRRLRLPRDQIQRMNPPKFSKAEDMAELTCLNEASVLHNLRERYYSGLIYTYSGLFCVVINPYKQLPIYTEAIVEMYRGKKRHEVPPHVYAVTEGAYRSMLQDREDQSILCTGESGAGKTENTKKVIQYLAHVASSPKGRKEPGVPASVSTVSYGELERQLLQANPILEAFGNAKTVKNDNSSRFGKFIRINFDVAGYIVGANIETYLLEKSRAIRQAKDECSFHIFYQLLGGAGEQLKADLLLEPCSHYRFLTNGPSSSPGQERELFQETLESLRVLGFSHEEIISMLRMVSAVLQFGNIALKRERNTDQATMPDNTAAQKLCRLLGLGVTDFSRALLTPRIKVGRDYVQKAQTKEQADFALEALAKATYERLFRWLVLRLNRALDRSPRQGASFLGILDIAGFEIFQLNSFEQLCINYTNEKLQQLFNHTMFVLEQEEYQREGIPWTFLDFGLDLQPCIDLIERPANPPGLLALLDEECWFPKATDKSFVEKVAQEQGGHPKFQRPRHLRDQADFSVLHYAGKVDYKANEWLMKNMDPLNDNVAALLHQSTDRLTAEIWKDEHGGFQQFSFLGSFPPSPPGSAERCSSAISPPGVEGIVGLEQVSSLGDGPPGGRPRRGMFRTVGQLYKESLSRLMATLSNTNPSFVRCIVPNHEKRAGKLEPRLVLDQLRCNGVLEGIRICRQGFPNRILFQEFRQRYEILTPNAIPKGFMDGKQACEKMIQALELDPNLYRVGQSKIFFRAGVLAQLEEERDLKVTDIIVSFQAAARGYLARRAFQKRQQQQSALRVMQRNCAAYLKLRHWQWWRLFTKVKPLLQVTRQDEVLQARAQELQKVQELQQQSAREVGELQGRVAQLEEERARLAEQLRAEAELCAEAEETRGRLAARKQELELVVSELEARVGEEEECSRQMQTEKKRLQQHIQELEAHLEAEEGARQKLQLEKVTTEAKMKKFEEDLLLLEDQNSKLSKERKLLEDRLAEFSSQAAEEEEKVKSLNKLRLKYEATIADMEDRLRKEEKGRQELEKLKRRLDGESSELQEQMVEQQQRAEELRAQLGRKEEELQAALARAEDEGGARAQLLKSLREAQAALAEAQEDLESERVARTKAEKQRRDLGEELEALRGELEDTLDSTNAQQELRSKREQEVTELKKTLEEETRIHEAAVQELRQRHGQALGELAEQLEQARRGKGAWEKTRLALEAEVSELRAELSSLQTARQEGEQRRRRLELQLQEVQGRAGDGERARAEAAEKLQRAQAELENVSGALNEAESKTIRLSKELSSTEAQLHDAQELLQEETRAKLALGSRVRAMEAEAAGLREQLEEEAAARERAGRELQTAQAQLSEWRRRQEEEAGALEAGEEARRRAAREAEALTQRLAEKTETVDRLERGRRRLQQELDDATMDLEQQRQLVSTLEKKQRKFDQLLAEEKAAVLRAVEERERAEAEGREREARALSLTRALEEEQEAREELERQNRALRAELEALLSSKDDVGKSVHELERACRVAEQAANDLRAQVTELEDELTAAEDAKLRLEVTVQALKTQHERDLQGRDEAGEERRRQLAKQLRDAEVERDEERKQRTLAVAARKKLEGELEELKAQMASAGQGKEEAVKQLRKMQAQMKELWREVEETRTSREEIFSQNRESEKRLKGLEAEVLRLQEELAASDRARRQAQQDRDEMADEVANGNLSKAAILEEKRQLEGRLGQLEEELEEEQSNSELLNDRYRKLLLQVESLTTELSAERSFSAKAESGRQQLERQIQELRGRLGEEDAGARARHKMTIAALESKLAQAEEQLEQETRERILSGKLVRRAEKRLKEVVLQVEEERRVADQLRDQLEKGNLRVKQLKRQLEEAEEEASRAQAGRRRLQRELEDVTESAESMNREVTTLRNRLRRGPLTFTTRTVRQVFRLEEGVASDEEAEEAQPGSGPSPEPEGSPPAHPQ

SEQ ID NO: 54521 - protein, 2003 aa, Homo sapiens; identical to SEQ ID NO: 54518
  Payload ID: 10760
  Gene Symbol: MYH14
  Gene Name: myosin, heavy chain 14, non-muscle
  Uniprot ID: Q7Z406
  ENSP ID: ENSP00000472543

SEQ ID NO: 54522 - protein, 1995 aa, Homo sapiens; identical to SEQ ID NO: 54516
  Payload ID: 10760
  Gene Symbol: MYH14
  Gene Name: myosin, heavy chain 14, non-muscle
  Uniprot ID: Q7Z406
  ENSP ID: ENSP00000472819

SEQ ID NO: 54523 - protein, 1946 aa, Homo sapiens
  Payload ID: 10761
  Gene Symbol: MYH15
  Gene Name: myosin, heavy chain 15
  Uniprot ID: Q9Y2K3
  ENSP ID: ENSP00000273353
MVESCLLTFRAFFWWIALIKMDLSDLGEAAAFLRRSEAELLLLQATALDGKKKCWIPDGENAYIEAEVKGSEDDGTVIVETADGESLSIKEDKIQQMNPPEFEMIEDMAMLTHLNEASVLHTLKRRYGQWMIYTYSGLFCVTINPYKWLPVYQKEVMAAYKGKRRSEAPPHIFAVANNAFQDMLHNRENQSILFTGESGAGKTVNSKHIIQYFATIAAMIESRKKQGALEDQIMQANTILEAFGNAKTLRNDNSSRFGKFIRMHFGARGMLSSVDIDIYLLEKSRVIFQQAGERNYHIFYQILSGQKELHDLLLVSANPSDFHFCSCGAVTVESLDDAEELLATEQAMDILGFLPDEKYGCYKLTGAIMHFGNMKFKQKPREEQLEADGTENADKAAFLMGINSSELVKCLIHPRIKVGNEYVTRGQTIEQVTCAVGALSKSMYERMFKWLVARINRALDAKLSRQFFIGILDITGFEILEYNSLEQLCINFTNEKLQQFFNWHMFVLEQEEYKKESIEWVSIGFGLDLQACIDLIEKPMGILSILEEECMFPKATDLTFKTKLFDNHFGKSVHLQKPKPDKKKFEAHFELVHYAGVVPYNISGWLEKNKDLLNETVVAVFQKSSNRLLASLFENYMSTDSAIPFGEKKRKKGASFQTVASLHKENLNKLMTNLKSTAPHFVRCINPNVNKIPGILDPYLVLQQLRCNGVLEGTRICREGFPNRLQYADFKQRYCILNPRTFPKSKFVSSRKAAEELLGSLEIDHTQYRFGITKVFFKAGFLGQLEAIRDERLSKVFTLFQARAQGKLMRIKFQKILEERDALILIQWNIRAFMAVKNWPWMRLFFKIKPLVKSSEVGEEVAGLKEECAQLQKALEKSEFQREELKAKQVSLTQEKNDLILQLQAEQETLANVEEQCEWLIKSKIQLEARVKELSERVEEEEEINSELTARGRKLEDECFELKKEIDDLETMLVKSEKEKRTTEHKVKNLTEEVEFLNEDISKLNRAAKVVQEAHQQTLDDLHMEEEKLSSLSKANLKLEQQVDELEGALEQERKARMNCERELHKLEGNLKLNRESMENLESSQRHLAEELRKKELELSQMNSKVENEKGLVAQLQKTVKELQTQIKDLKEKLEAERTTRAKMERERADLTQDLADLNERLEEVGGSSLAQLEITKKQETKFQKLHRDMEEATLHFETTSASLKKRHADSLAELEGQVENLQQVKQKLEKDKSDLQLEVDDLLTRVEQMTRAKANAEKLCTLYEERLHEATAKLDKVTQLANDLAAQKTKLWSESGEFLRRLEEKEALINQLSREKSNFTRQIEDLRGQLEKETKSQSALAHALQKAQRDCDLLREQYEEEQEVKAELHRTLSKVNAEMVQWRMKYENNVIQRTEDLEDAKKELAIRLQEAAEAMGVANARNASLERARHQLQLELGDALSDLGKVRSAAARLDQKQLQSGKALADWKQKHEESQALLDASQKEVQALSTELLKLKNTYEESIVGQETLRRENKNLQEEISNLTNQVREGTKNLTEMEKVKKLIEEEKTEVQVTLEETEGALERNESKILHFQLELLEAKAELERKLSEKDEEIENFRRKQQCTIDSLQSSLDSEAKSRIEVTRLKKKMEEDLNEMELQLSCANRQVSEATKSLGQLQIQIKDLQMQLDDSTQLNSDLKEQVAVAERRNSLLQSELEDLRSLQEQTERGRRLSEEELLEATERINLFYTQNTSLLSQKKKLEADVARMQKEAEEVVQECQNAEEKAKKAAIEAANLSEELKKKQDTIAHLERTRENMEQTITDLQKRLAEAEQMALMGSRKQIQKLESRVRELEGELEGEIRRSAEAQRGARRLERCIKELTYQAEEDKKNLSRMQTQMDKLQLKVQNYKQQVEVAETQANQYLSKYKKQQHELNEVKERAEVAESQVNKLKIKAREFGKKVQEE

SEQ ID NO: 54524 - protein, 1941 aa, Homo sapiens
  Payload ID: 10762
  Gene Symbol: MYH2
  Gene Name: myosin, heavy chain 2, skeletal muscle, adult
  Uniprot ID: Q9UKX2
  ENSP ID: ENSP00000245503
MSSDSELAVFGEAAPFLRKSERERIEAQNRPFDAKTSVFVAEPKESFVKGTIQSREGGKVTVKTEGGATLTVKDDQVFPMNPPKYDKIEDMAMMTHLHEPAVLYNLKERYAAWMIYTYSGLFCVTVNPYKWLPVYKPEVVTAYRGKKRQEAPPHIFSISDNAYQFMLTDRENQSILITGESGAGKTVNTKRVIQYFATIAVTGEKKKEEITSGKIQGTLEDQIISANPLLEAFGNAKTVRNDNSSRFGKFIRIHFGTTGKLASADIETYLLEKSRVVFQLKAERSYHIFYQITSNKKPELIEMLLITTNPYDYPFVSQGEISVASIDDQEELMATDSAIDILGFTNEEKVSIYKLTGAVMHYGNLKFKQKQREEQAEPDGTEVADKAAYLQSLNSADLLKALCYPRVKVGNEYVTKGQTVEQVSNAVGALAKAVYEKMFLWMVARINQQLDTKQPRQYFIGVLDIAGFEIFDFNSLEQLCINFTNEKLQQFFNHHMFVLEQEEYKKEGIEWTFIDFGMDLAACIELIEKPMGIFSILEEECMFPKATDTSFKNKLYDQHLGKSANFQKPKVVKGKAEAHFALIHYAGVVDYNITGWLEKNKDPLNETVVGLYQKSAMKTLAQLFSGAQTAEGEGAGGGAKKGGKKKGSSFQTVSALFRENLNKLMTNLRSTHPHFVRCIIPNETKTPGAMEHELVLHQLRCNGVLEGIRICRKGFPSRILYADFKQRYKVLNASAIPEGQFIDSKKASEKLLASIDIDHTQYKFGHTKVFFKAGLLGLLEEMRDDKLAQLITRTQARCRGFLARVEYQRMVERREAIFCIQYNIRSFMNVKHWPWMKLFFKIKPLLKSAETEKEMATMKEEFQKIKDELAKSEAKRKELEEKMVTLLKEKNDLQLQVQAEAEGLADAEERCDQLIKTKIQLEAKIKEVTERAEDEEEINAELTAKKRKLEDECSELKKDIDDLELTLAKVEKEKHATENKVKNLTEEMAGLDETIAKLTKEKKALQEAHQQTLDDLQAEEDKVNTLTKAKIKLEQQVDDLEGSLEQEKKLRMDLERAKRKLEGDLKLAQESIMDIENEKQQLDEKLKKKEFEISNLQSKIEDEQALGIQLQKKIKELQARIEELEEEIEAERASRAKAEKQRSDLSRELEEISERLEEAGGATSAQIEMNKKREAEFQKMRRDLEEATLQHEATAATLRKKHADSVAELGEQIDNLQRVKQKLEKEKSEMKMEIDDLASNVETVSKAKGNLEKMCRTLEDQLSELKSKEEEQQRLINDLTAQRGRLQTESGEFSRQLDEKEALVSQLSRGKQAFTQQIEELKRQLEEEIKAKNALAHALQSSRHDCDLLREQYEEEQESKAELQRALSKANTEVAQWRTKYETDAIQRTEELEEAKKKLAQRLQAAEEHVEAVNAKCASLEKTKQRLQNEVEDLMLDVERTNAACAALDKKQRNFDKILAEWKQKCEETHAELEASQKEARSLGTELFKIKNAYEESLDQLETLKRENKNLQQEISDLTEQIAEGGKRIHELEKIKKQVEQEKCELQAALEEAEASLEHEEGKILRIQLELNQVKSEVDRKIAEKDEEIDQLKRNHIRIVESMQSTLDAEIRSRNDAIRLKKKMEGDLNEMEIQLNHANRMAAEALRNYRNTQGILKDTQIHLDDALRSQEDLKEQLAMVERRANLLQAEIEELRATLEQTERSRKIAEQELLDASERVQLLHTQNTSLINTKKKLETDISQMQGEMEDILQEARNAEEKAKKAITDAAMMAEELKKEQDTSAHLERMKKNMEQTVKDLQLRLDEAEQLALKGGKKQIQKLEARVRELEGEVESEQKRNAEAVKGLRKHERRVKELTYQTEEDRKNILRLQDLVDKLQAKVKSYKRQAEEAEEQSNTNLAKFRKLQHELEEAEERADIAESQVNKLRVKSREVHTKVISEE

SEQ ID NO: 54525 - protein, 1941 aa, Homo sapiens; identical to SEQ ID NO: 54524
  Payload ID: 10762
  Gene Symbol: MYH2
  Gene Name: myosin, heavy chain 2, skeletal muscle, adult
  Uniprot ID: Q9UKX2
  ENSP ID: ENSP00000380367

SEQ ID NO: 54526 - protein, 182 aa, Homo sapiens
  Payload ID: 10762
  Gene Symbol: MYH2
  Gene Name: myosin, heavy chain 2, skeletal muscle, adult
  ENSP ID: ENSP00000399348
MSSDSELAVFGEAAPFLRKSERERIEAQNRPFDAKTSVFVAEPKESFVKGTIQSREGGKVTVKTEGGATLTVKDDQVFPMNPPKYDKIEDMAMMTHLHEPAVLYNLKERYAAWMIYTYSGLFCVTVNPYKWLPVYKPEVVTAYRGKKRQEAPPHIFSISDNAYQFMLTDRENQSILITGESG

SEQ ID NO: 54527 - protein, 708 aa, Homo sapiens
  Payload ID: 10762
  Gene Symbol: MYH2
  Gene Name: myosin, heavy chain 2, skeletal muscle, adult
  Uniprot ID: Q9UKX2
  ENSP ID: ENSP00000433944
MSSDSELAVFGEAAPFLRKSERERIEAQNRPFDAKTSVFVAEPKESFVKGTIQSREGGKVTVKTEGGATLTVKDDQVFPMNPPKYDKIEDMAMMTHLHEPAVLYNLKERYAAWMIYTYSGLFCVTVNPYKWLPVYKPEVVTAYRGKKRQEAPPHIFSISDNAYQFMLTDRENQSILITGESGAGKTVNTKRVIQYFATIAVTGEKKKEEITSGKIQGTLEDQIISANPLLEAFGNAKTVRNDNSSRFGKFIRIHFGTTGKLASADIETYLLEKSRVVFQLKAERSYHIFYQITSNKKPELIEMLLITTNPYDYPFVSQGEISVASIDDQEELMATDSAIDILGFTNEEKVSIYKLTGAVMHYGNLKFKQKQREEQAEPDGTEVADKAAYLQSLNSADLLKALCYPRVKVGNEYVTKGQTVEQVSNAVGALAKAVYEKMFLWMVARINQQLDTKQPRQYFIGVLDIAGFEIFDFNSLEQLCINFTNEKLQQFFNHHMFVLEQEEYKKEGIEWTFIDFGMDLAACIELIEKPMGIFSILEEECMFPKATDTSFKNKLYDQHLGKSANFQKPKVVKGKAEAHFALIHYAGVVDYNITGWLEKNKDPLNETVVGLYQKSAMKTLAQLFSGAQTAEGEGAGGGAKKGGKKKGSSFQTVSALFREEQSNTNLAKFRKLQHELEEAEERADIAESQVNKLRVKSREVHTKVISEE

SEQ ID NO: 54528 - protein, 155 aa, Homo sapiens
  Payload ID: 10762
  Gene Symbol: MYH2
  Gene Name: myosin, heavy chain 2, skeletal muscle, adult
  ENSP ID: ENSP00000463668
MNPPKYDKIEDMAMMTHLHEPAVLYNLKERYAAWMIYTYSGLFCVTVNPYKWLPVYKPEVVTAYRGKKRQEAPPHIFSISDNAYQFMLTDRENQSILITGESGAGKTVNTKRVIQYFATIAVTGEKKKEEITSGKIQGTLEDQIISANPLLEAFG

SEQ ID NO: 54529 - protein, 708 aa, Homo sapiens; identical to SEQ ID NO: 54527
  Payload ID: 10762
  Gene Symbol: MYH2
  Gene Name: myosin, heavy chain 2, skeletal muscle, adult
  Uniprot ID: Q9UKX2
  ENSP ID: ENSP00000482463

SEQ ID NO: 54530 - protein, 1940 aa, Homo sapiens
  Payload ID: 10763
  Gene Symbol: MYH3
  Gene Name: myosin, heavy chain 3, skeletal muscle, embryonic
  Uniprot ID: P11055
  ENSP ID: ENSP00000464317
MSSDTEMEVFGIAAPFLRKSEKERIEAQNQPFDAKTYCFVVDSKEEYAKGKIKSSQDGKVTVETEDNRTLVVKPEDVYAMNPPKFDRIEDMAMLTHLNEPAVLYNLKDRYTSWMIYTYSGLFCVTVNPYKWLPVYNPEVVEGYRGKKRQEAPPHIFSISDNAYQFMLTDRENQSILITGESGAGKTVNTKRVIQYFATIAATGDLAKKKDSKMKGTLEDQIISANPLLEAFGNAKTVRNDNSSRFGKFIRIHFGTTGKLASADIETYLLEKSRVTFQLKAERSYHIFYQILSNKKPELIELLLITTNPYDYPFISQGEILVASIDDAEELLATDSAIDILGFTPEEKSGLYKLTGAVMHYGNMKFKQKQREEQAEPDGTEVADKTAYLMGLNSSDLLKALCFPRVKVGNEYVTKGQTVDQVHHAVNALSKSVYEKLFLWMVTRINQQLDTKLPRQHFIGVLDIAGFEIFEYNSLEQLCINFTNEKLQQFFNHHMFVLEQEEYKKEGIEWTFIDFGMDLAACIELIEKPMGIFSILEEECMFPKATDTSFKNKLYDQHLGKSNNFQKPKVVKGRAEAHFSLIHYAGTVDYSVSGWLEKNKDPLNETVVGLYQKSSNRLLAHLYATFATADADSGKKKVAKKKGSSFQTVSALFRENLNKLMSNLRTTHPHFVRCIIPNETKTPGAMEHSLVLHQLRCNGVLEGIRICRKGFPNRILYGDFKQRYRVLNASAIPEGQFIDSKKACEKLLASIDIDHTQYKFGHTKVFFKAGLLGTLEEMRDDRLAKLITRTQAVCRGFLMRVEFQKMVQRRESIFCIQYNIRSFMNVKHWPWMKLFFKIKPLLKSAETEKEMATMKEEFQKTKDELAKSEAKRKELEEKLVTLVQEKNDLQLQVQAESENLLDAEERCDQLIKAKFQLEAKIKEVTERAEDEEEINAELTAKKRKLEDECSELKKDIDDLELTLAKVEKEKHATENKVKNLTEELSGLDETIAKLTREKKALQEAHQQALDDLQAEEDKVNSLNKTKSKLEQQVEDLESSLEQEKKLRVDLERNKRKLEGDLKLAQESILDLENDKQQLDERLKKKDFEYCQLQSKVEDEQTLGLQFQKKIKELQARIEELEEEIEAERATRAKTEKQRSDYARELEELSERLEEAGGVTSTQIELNKKREAEFLKLRRDLEEATLQHEAMVAALRKKHADSVAELGEQIDNLQRVKQKLEKEKSEFKLEIDDLSSSMESVSKSKANLEKICRTLEDQLSEARGKNEEIQRSLSELTTQKSRLQTEAGELSRQLEEKESIVSQLSRSKQAFTQQTEELKRQLEEENKAKNALAHALQSSRHDCDLLREQYEEEQEGKAELQRALSKANSEVAQWRTKYETDAIQRTEELEEAKKKLAQRLQDSEEQVEAVNAKCASLEKTKQRLQGEVEDLMVDVERANSLAAALDKKQRNFDKVLAEWKTKCEESQAELEASLKESRSLSTELFKLKNAYEEALDQLETVKRENKNLEQEIADLTEQIAENGKTIHELEKSRKQIELEKADIQLALEEAEAALEHEEAKILRIQLELTQVKSEIDRKIAEKDEEIEQLKRNYQRTVETMQSALDAEVRSRNEAIRLKKKMEGDLNEIEIQLSHANRQAAETLKHLRSVQGQLKDTQLHLDDALRGQEDLKEQLAIVERRANLLQAEVEELRATLEQTERARKLAEQELLDSNERVQLLHTQNTSLIHTKKKLETDLMQLQSEVEDASRDARNAEEKAKKAITDAAMMAEELKKEQDTSAHLERMKKNLEQTVKDLQHRLDEAEQLALKGGKKQIQKLETRIRELEFELEGEQKKNTESVKGLRKYERRVKELTYQSEEDRKNVLRLQDLVDKLQVKVKSYKRQAEEADEQANAHLTKFRKAQHELEEAEERADIAESQVNKLRAKTRDFTSSRMVVHESEE

SEQ ID NO: 54531 - protein, 1939 aa, Homo sapiens
  Payload ID: 10764
  Gene Symbol: MYH4
  Gene Name: myosin, heavy chain 4, skeletal muscle
  Uniprot ID: Q9Y623
  ENSP ID: ENSP00000255381
MSSDSEMAIFGEAAPFLRKSEKERIEAQNKPFDAKTSVFVVDPKESYVKAIVQSREGGKVTAKTEAGATVTVKEDQVFSMNPPKYDKIEDMAMMTHLHEPAVLYNLKERYAAWMIYTYSGLFCVTVNPYKWLPVYNPEVVTAYRGKKRQEAPPHIFSISDNAYQFMLTDRENQSILITGESGAGKTVNTKRVIQYFATIAVTGEKKKEEPASGKMQGTLEDQIISANPLLEAFGNAKTVRNDNSSRFGKFIRIHFGATGKLASADIETYLLEKSRVTFQLKAERSYHIFYQILSNKKPELIEMLLITTNPYDFAFVSQGEITVPSIDDQEELMATDSAVDILGFTADEKVAIYKLTGAVMHYGNMKFKQKQREEQAEPDGTEVADKAAYLTSLNSADLLKSLCYPRVKVGNEFVTKGQTVQQVYNAVGALAKAIYEKMFLWMVTRINQQLDTKQPRQYFIGVLDIAGFEIFDFNSLEQLCINFTNEKLQQFFNHHMFVLEQEEYKKEGIEWEFIDFGMDLAACIELIEKPMGIFSILEEECMFPKATDTSFKNKLYEQHLGKSNNFQKPKPAKGKPEAHFSLVHYAGTVDYNIAGWLDKNKDPLNETVVGLYQKSAMKTLAFLFSGAQTAEAEGGGGKKGGKKKGSSFQTVSALFRENLNKLMTNLRSTHPHFVRCIIPNETKTPGAMEHELVLHQLRCNGVLEGIRICRKGFPSRILYADFKQRYKVLNASAIPEGQFIDSKKASEKLLGSIEIDHTQYKFGHTKVFFKAGLLGTLEEMRDEKLAQLITRTQAICRGFLMRVEFRKMMERRESIFCIQYNIRAFMNVKHWPWMKLYFKIKPLLKSAETEKEMANMKEEFEKTKEELAKTEAKRKELEEKMVTLMQEKNDLQLQVQAEADALADAEERCDQLIKTKIQLEAKIKEVTERAEDEEEINAELTAKKRKLEDECSELKKDIDDLELTLAKVEKEKHATENKVKNLTEEMAGLDETIAKLTKEKKALQEAHQQTLDDLQMEEDKVNTLTKAKTKLEQQVDDLEGSLEQEKKLCMDLERAKRKLEGDLKLAQESTMDTENDKQQLNEKLKKKEFEMSNLQGKIEDEQALAIQLQKKIKELQARIEELEEEIEAERASRAKAEKQRSDLSRELEEISERLEEAGGATSAQIEMNKKREAEFQKMRRDLEESTLQHEATAAALRKKHADSVAELGEQIDSLQRVKQKLEKEKSELKMEINDLASNMETVSKAKANFEKMCRTLEDQLSEIKTKEEEQQRLINELSAQKARLHTESGEFSRQLDEKDAMVSQLSRGKQAFTQQIEELKRQLEEETKAKSTLAHALQSARHDCDLLREQYEEEQEAKAELQRGMSKANSEVAQWRTKYETDAIQRTEELEEAKKKLAQRLQDAEEHVEAVNSKCASLEKTKQRLQNEVEDLMIDVERSNAACIALDKKQRNFDKVLAEWKQKYEETQAELEASQKESRSLSTELFKVKNAYEESLDHLETLKRENKNLQQEISDLTEQIAEGGKHIHELEKVKKQLDHEKSELQTSLEEAEASLEHEEGKILRIQLELNQVKSEIDRKIAEKDEELDQLKRNHLRVVESMQSTLDAEIRSRNDALRIKKKMEGDLNEMEIQLNHANRQAAEALRNLRNTQGILKDTQLHLDDAIRGQDDLKEQLAMVERRANLMQAEVEELRASLERTERGRKMAEQELLDASERVQLLHTQNTSLINTKKKLETDISQIQGEMEDIVQEARNAEEKAKKAITDAAMMAEELKKEQDTSAHLERMKKNMEQTVKDLQLRLDEAEQLALKGGKKQIQKLEARVRELESEVESEQKHNVEAVKGLRKHERRVKELTYQTEEDRKNILRLQDLVDKLQTKVKAYKRQAEEAEEQSNVNLAKFRKLQHELEEAKERADIAESQVNKLRVKSREVHTKVISEE

SEQ ID NO: 54532 - protein, 1939 aa, Homo sapiens
  Payload ID: 10765
  Gene Symbol: MYH6
  Gene Name: myosin, heavy chain 6, cardiac muscle, alpha
  Uniprot ID: P13533
  ENSP ID: ENSP00000348634
MTDAQMADFGAAAQYLRKSEKERLEAQTRPFDIRTECFVPDDKEEFVKAKILSREGGKVIAETENGKTVTVKEDQVLQQNPPKFDKIEDMAMLTFLHEPAVLFNLKERYAAWMIYTYSGLFCVTVNPYKWLPVYNAEVVAAYRGKKRSEAPPHIFSISDNAYQYMLTDRENQSILITGESGAGKTVNTKRVIQYFASIAAIGDRGKKDNANANKGTLEDQIIQANPALEAFGNAKTVRNDNSSRFGKFIRIHFGATGKLASADIETYLLEKSRVIFQLKAERNYHIFYQILSNKKPELLDMLLVTNNPYDYAFVSQGEVSVASIDDSEELMATDSAFDVLGFTSEEKAGVYKLTGAIMHYGNMKFKQKQREEQAEPDGTEDADKSAYLMGLNSADLLKGLCHPRVKVGNEYVTKGQSVQQVYYSIGALAKAVYEKMFNWMVTRINATLETKQPRQYFIGVLDIAGFEIFDFNSFEQLCINFTNEKLQQFFNHHMFVLEQEEYKKEGIEWTFIDFGMDLQACIDLIEKPMGIMSILEEECMFPKATDMTFKAKLYDNHLGKSNNFQKPRNIKGKQEAHFSLIHYAGTVDYNILGWLEKNKDPLNETVVALYQKSSLKLMATLFSSYATADTGDSGKSKGGKKKGSSFQTVSALHRENLNKLMTNLRTTHPHFVRCIIPNERKAPGVMDNPLVMHQLRCNGVLEGIRICRKGFPNRILYGDFRQRYRILNPVAIPEGQFIDSRKGTEKLLSSLDIDHNQYKFGHTKVFFKAGLLGLLEEMRDERLSRIITRMQAQARGQLMRIEFKKIVERRDALLVIQWNIRAFMGVKNWPWMKLYFKIKPLLKSAETEKEMATMKEEFGRIKETLEKSEARRKELEEKMVSLLQEKNDLQLQVQAEQDNLNDAEERCDQLIKNKIQLEAKVKEMNERLEDEEEMNAELTAKKRKLEDECSELKKDIDDLELTLAKVEKEKHATENKVKNLTEEMAGLDEIIAKLTKEKKALQEAHQQALDDLQVEEDKVNSLSKSKVKLEQQVDDLEGSLEQEKKVRMDLERAKRKLEGDLKLTQESIMDLENDKLQLEEKLKKKEFDINQQNSKIEDEQVLALQLQKKLKENQARIEELEEELEAERTARAKVEKLRSDLSRELEEISERLEEAGGATSVQIEMNKKREAEFQKMRRDLEEATLQHEATAAALRKKHADSVAELGEQIDNLQRVKQKLEKEKSEFKLELDDVTSNMEQIIKAKANLEKVSRTLEDQANEYRVKLEEAQRSLNDFTTQRAKLQTENGELARQLEEKEALISQLTRGKLSYTQQMEDLKRQLEEEGKAKNALAHALQSARHDCDLLREQYEEETEAKAELQRVLSKANSEVAQWRTKYETDAIQRTEELEEAKKKLAQRLQDAEEAVEAVNAKCSSLEKTKHRLQNEIEDLMVDVERSNAAAAALDKKQRNFDKILAEWKQKYEESQSELESSQKEARSLSTELFKLKNAYEESLEHLETFKRENKNLQEEISDLTEQLGEGGKNVHELEKVRKQLEVEKLELQSALEEAEASLEHEEGKILRAQLEFNQIKAEIERKLAEKDEEMEQAKRNHQRVVDSLQTSLDAETRSRNEVLRVKKKMEGDLNEMEIQLSHANRMAAEAQKQVKSLQSLLKDTQIQLDDAVRANDDLKENIAIVERRNNLLQAELEELRAVVEQTERSRKLAEQELIETSERVQLLHSQNTSLINQKKKMESDLTQLQSEVEEAVQECRNAEEKAKKAITDAAMMAEELKKEQDTSAHLERMKKNMEQTIKDLQHRLDEAEQIALKGGKKQLQKLEARVRELEGELEAEQKRNAESVKGMRKSERRIKELTYQTEEDKKNLLRLQDLVDKLQLKVKAYKRQAEEAEEQANTNLSKFRKVQHELDEAEERADIAESQVNKLRAKSRDIGAKQKMHDEE

SEQ ID NO: 54533 - protein, 1939 aa, Homo sapiens; identical to SEQ ID NO: 54532
  Payload ID: 10765
  Gene Symbol: MYH6
  Gene Name: myosin, heavy chain 6, cardiac muscle, alpha
  Uniprot ID: P13533
  ENSP ID: ENSP00000386041

SEQ ID NO: 54534 - protein, 1935 aa, Homo sapiens
  Payload ID: 10766
  Gene Symbol: MYH7
  Gene Name: myosin, heavy chain 7, cardiac muscle, beta
  Uniprot ID: P12883
  ENSP ID: ENSP00000347507
MGDSEMAVFGAAAPYLRKSEKERLEAQTRPFDLKKDVFVPDDKQEFVKAKIVSREGGKVTAETEYGKTVTVKEDQVMQQNPPKFDKIEDMAMLTFLHEPAVLYNLKDRYGSWMIYTYSGLFCVTVNPYKWLPVYTPEVVAAYRGKKRSEAPPHIFSISDNAYQYMLTDRENQSILITGESGAGKTVNTKRVIQYFAVIAAIGDRSKKDQSPGKGTLEDQIIQANPALEAFGNAKTVRNDNSSRFGKFIRIHFGATGKLASADIETYLLEKSRVIFQLKAERDYHIFYQILSNKKPELLDMLLITNNPYDYAFISQGETTVASIDDAEELMATDNAFDVLGFTSEEKNSMYKLTGAIMHFGNMKFKLKQREEQAEPDGTEEADKSAYLMGLNSADLLKGLCHPRVKVGNEYVTKGQNVQQVIYATGALAKAVYERMFNWMVTRINATLETKQPRQYFIGVLDIAGFEIFDFNSFEQLCINFTNEKLQQFFNHHMFVLEQEEYKKEGIEWTFIDFGMDLQACIDLIEKPMGIMSILEEECMFPKATDMTFKAKLFDNHLGKSANFQKPRNIKGKPEAHFSLIHYAGIVDYNIIGWLQKNKDPLNETVVGLYQKSSLKLLSTLFANYAGADAPIEKGKGKAKKGSSFQTVSALHRENLNKLMTNLRSTHPHFVRCIIPNETKSPGVMDNPLVMHQLRCNGVLEGIRICRKGFPNRILYGDFRQRYRILNPAAIPEGQFIDSRKGAEKLLSSLDIDHNQYKFGHTKVFFKAGLLGLLEEMRDERLSRIITRIQAQSRGVLARMEYKKLLERRDSLLVIQWNIRAFMGVKNWPWMKLYFKIKPLLKSAEREKEMASMKEEFTRLKEALEKSEARRKELEEKMVSLLQEKNDLQLQVQAEQDNLADAEERCDQLIKNKIQLEAKVKEMNERLEDEEEMNAELTAKKRKLEDECSELKRDIDDLELTLAKVEKEKHATENKVKNLTEEMAGLDEIIAKLTKEKKALQEAHQQALDDLQAEEDKVNTLTKAKVKLEQQVDDLEGSLEQEKKVRMDLERAKRKLEGDLKLTQESIMDLENDKQQLDERLKKKDFELNALNARIEDEQALGSQLQKKLKELQARIEELEEELEAERTARAKVEKLRSDLSRELEEISERLEEAGGATSVQIEMNKKREAEFQKMRRDLEEATLQHEATAAALRKKHADSVAELGEQIDNLQRVKQKLEKEKSEFKLELDDVTSNMEQIIKAKANLEKMCRTLEDQMNEHRSKAEETQRSVNDLTSQRAKLQTENGELSRQLDEKEALISQLTRGKLTYTQQLEDLKRQLEEEVKAKNALAHALQSARHDCDLLREQYEEETEAKAELQRVLSKANSEVAQWRTKYETDAIQRTEELEEAKKKLAQRLQEAEEAVEAVNAKCSSLEKTKHRLQNEIEDLMVDVERSNAAAAALDKKQRNFDKILAEWKQKYEESQSELESSQKEARSLSTELFKLKNAYEESLEHLETFKRENKNLQEEISDLTEQLGSSGKTIHELEKVRKQLEAEKMELQSALEEAEASLEHEEGKILRAQLEFNQIKAEIERKLAEKDEEMEQAKRNHLRVVDSLQTSLDAETRSRNEALRVKKKMEGDLNEMEIQLSHANRMAAEAQKQVKSLQSLLKDTQIQLDDAVRANDDLKENIAIVERRNNLLQAELEELRAVVEQTERSRKLAEQELIETSERVQLLHSQNTSLINQKKKMDADLSQLQTEVEEAVQECRNAEEKAKKAITDAAMMAEELKKEQDTSAHLERMKKNMEQTIKDLQHRLDEAEQIALKGGKKQLQKLEARVRELENELEAEQKRNAESVKGMRKSERRIKELTYQTEEDRKNLLRLQDLVDKLQLKVKAYKRQAEEAEEQANTNLSKFRKVQHELDEAEERADIAESQVNKLRAKSRDIGTKGLNEE

SEQ ID NO: 54535 - protein, 1983 aa, Homo sapiens
  Payload ID: 10767
  Gene Symbol: MYH7B
  Gene Name: myosin, heavy chain 7B, cardiac muscle, beta
  Uniprot ID: A7E2Y1
  ENSP ID: ENSP00000262873
MSGNKRGSRASCPHRGAECLLPWAALNLQGFQLLLLHPSATAMMDVSELGESARYLRQGYQEMTKVHTIPWDGKKRVWVPDEQDAYVEAEVKSEATGGRVTVETKDQKVLMVREAELQPMNPPRFDLLEDMAMMTHLNEASVLHNLRQRYARWMIYTYSGLFCVTINPYKWLPVYTASVVAAYKGKRRSDSPPHIYAVADNAYNDMLRNRDNQSMLITGESGAGKTVNTKRVIQYFAIVAALGDGPGKKAQFLATKTGGTLEDQIIEANPAMEAFGNAKTLRNDNSSRFGKFIRIHFGPSGKLASADIDSYLLEKSRVIFQLPGERSYHVYYQILSGRKPELQDMLLLSMNPYDYHFCSQGVITVDNMNDGEELIATDHAMDILGFSVDEKCACYKIVGALLHFGNMKFKQKQREEQAEADGTESADKAAYLMGVSSGDLLKGLLHPRVRVGNEYVTKGQSVEQVVFAVGALAKATYDRLFRWLVSRINQTLDTKLPRQFFIGVLDIAGFEIFEFNSFEQLCINFTNEKLQQFFNQHMFVLEQEEYKREGIDWVFIDFGLDLQPCIDLIEKPLGILSILEEECMFPKASDASFRAKLYDNHAGKSPNFQQPRPDKKRKYQAHFEVVHYAGVVPYSIVGWLEKNKDPLNETVVPIFQKSQNRLLATLYENYAGSCSTEPPKSGVKEKRKKAASFQTVSQLHKENLNKLMTNLRATQPHFVRCIVPNENKTPGVMDAFLVLHQLRCNGVLEGIRICRQGFPNRLLYTDFRQRYRILNPSAIPDDTFMDSRKATEKLLGSLDLDHTQYQFGHTKVFFKAGLLGVLEELRDQRLAKVLTLLQARSRGRLMRLEYQRLLGGRDALFTIQWNIRAFNAVKNWSWMKLFFKMKPLLRSAQAEEELAALRAELRGLRGALAAAEAKRQELEETHVSITQEKNDLALQLQAEQDNLADAEERCHLLIKSKVQLEGKVKELSERLEDEEEVNADLAARRRKLEDECTELKKDIDDLELTLAKAEKEKQATENKVKNLTEEMAALDESVARLTKEKKALQEAHQQALGDLQAEEDRVSALTKAKLRLEQQVEDLECSLEQEKKLRMDTERAKRKLEGDLKLTQESVADAAQDKQQLEEKLKKKDSELSQLSLRVEDEQLLGAQMQKKIKELQARAEELEEELEAERAARARVEKQRAEAARELEELSERLEEAGGASAGQREGCRKREAELGRLRRELEEAALRHEATVAALRRKQAEGAAELGEQVDSLQRVRQKLEKEKSELRMEVDDLAANVETLTRAKASAEKLCRTYEDQLSEAKIKVEELQRQLADASTQRGRLQTESGELSRLLEEKECLISQLSRGKALAAQSLEELRRQLEEESKAKSALAHAVQALRHDCDLLREQHEEEAEAQAELQRLLSKANAEVAQWRSKYEADAIQRTEELEEAKKKLALRLQEAEEGVEAANAKCSSLEKAKLRLQTESEDVTLELERATSAAAALDKKQRHLERALEERRRQEEEMQRELEAAQRESRGLGTELFRLRHGHEEALEALETLKRENKNLQEEISDLTDQVSLSGKSIQELEKTKKALEGEKSEIQAALEEAEGALELEETKTLRIQLELSQVKAEVDRKLAEKDEECANLRRNHQRAVESLQASLDAETRARNEALRLKKKMEGDLNDLELQLGHATRQATEAQAATRLMQAQLKEEQAGRDEEQRLAAELHEQAQALERRASLLAAELEELRAALEQGERSRRLAEQELLEATERLNLLHSQNTGLLNQKKKLEADLAQLSGEVEEAAQERREAEEKAKKAITDAAMMAEELKKEQDTSAHLERMKKTLEQTVRELQARLEEAEQAALRGGKKQVQKLEAKVRELEAELDAEQKKHAEALKGVRKHERRVKELAYQAEEDRKNLARMQDLVDKLQSKVKSYKRQFEEAEQQANTNLAKYRKAQHELDDAEERADMAETQANKLRARTRDALGPKHKE

SEQ ID NO: 54536 - protein, 149 aa, Homo sapiens
  Payload ID: 10767
  Gene Symbol: MYH7B
  Gene Name: myosin, heavy chain 7B, cardiac muscle, beta
  ENSP ID: ENSP00000391939
VRELEAELDAEQKKHAEALKGVRKHERRVKELAYQVGDRVSLGSGPGAGPAQASPESPLPAQAEEDRKNLARMQDLVDKLQSKVKSYKRQFEEAEQQANTNLAKYRKAQHELDDAEERADMAETQANKLRARTRDALGPKLSLSPQHKE

SEQ ID NO: 54537 - protein, 144 aa, Homo sapiens
  Payload ID: 10767
  Gene Symbol: MYH7B
  Gene Name: myosin, heavy chain 7B, cardiac muscle, beta
  ENSP ID: ENSP00000395858
VRELEAELDAEQKKHAEALKGVRKHERRVKELAYQAEEDRKNLARMQDLVDKLQSKVKSYKRQFEEAVSALGPGHLDRAPQLCPRVCGQEQQANTNLAKYRKAQHELDDAEERADMAETQANKLRARTRDALGPKLSLSPQHKE

SEQ ID NO: 54538 - protein, 149 aa, Homo sapiens
  Payload ID: 10767
  Gene Symbol: MYH7B
  Gene Name: myosin, heavy chain 7B, cardiac muscle, beta
  ENSP ID: ENSP00000396368
VRELEAELDAEQKKHAEALKGVRKHERRVKELAYQAEEDRKNLARMQDLVDKLQSKVKSYKRQFEEAEQQANTNLAKYRKAQHELDDAEERADMAETQANKLRARTRDALGPKVRSGRGIALCAGGLWGLTGSTAHSAIPFSSAQGVTA

SEQ ID NO: 54539 - protein, 122 aa, Homo sapiens
  Payload ID: 10767
  Gene Symbol: MYH7B
  Gene Name: myosin, heavy chain 7B, cardiac muscle, beta
  ENSP ID: ENSP00000409103
VRELEAELDAEQKKHAEALKGVRKHERRVKELAYQAEEDRKNLARMQDLVDKLQSKVKSYKRQFEEAEQQANTNLAKYRKAQHELDDAEERADMAETQANKLRARTRDALGPKLSLSPQHKE

SEQ ID NO: 54540 - protein, 143 aa, Homo sapiens
  Payload ID: 10767
  Gene Symbol: MYH7B
  Gene Name: myosin, heavy chain 7B, cardiac muscle, beta
  ENSP ID: ENSP00000412594
VRELEAELDAEQKKHAEALKGVRKHERRVKELAYQVGDRVSLGSGPGAGPAQASPESPLPAQAEEDRKNLARMQDLVDKLQSKVKSYKRQFEEAEQQANTNLAKYRKAQHELDDAEERADMAETQANKLRARTRDALGPKHKE

SEQ ID NO: 54541 - protein, 1982 aa, Homo sapiens [sequence omitted]

SEQ ID NO: 54542 - protein, 1937 aa, Homo sapiens
  Payload ID: 10768
  Gene Symbol: MYH8
  Gene Name: myosin, heavy chain 8, skeletal muscle, perinatal
  Uniprot ID: P13535
  ENSP ID: ENSP00000384330
MSASSDAEMAVFGEAAPYLRKSEKERIEAQNKPFDAKTSVFVAEPKESYVKSTIQSKEGGKVTVKTEGGATLTVREDQVFPMNPPKYDKIEDMAMMTHLHEPGVLYNLKERYAAWMIYTYSGLFCVTVNPYKWLPVYKPEVVAAYRGKKRQEAPPHIFSISDNAYQFMLTDRENQSILITGESGAGKTVNTKRVIQYFATIAVTGEKKKDESGKMQGTLEDQIISANPLLEAFGNAKTVRNDNSSRFGKFIRIHFGTTGKLASADIETYLLEKSRVTFQLKAERSYHIFYQITSNKKPDLIEMLLITTNPYDYAFVSQGEITVPSIDDQEELMATDSAIDILGFTPEEKVSIYKLTGAVMHYGNMKFKQKQREEQAEPDGTEVADKAAYLQSLNSADLLKALCYPRVKVGNEYVTKGQTVQQVYNAVGALAKAVYEKMFLWMVTRINQQLDTKQPRQYFIGVLDIAGFEIFDFNSLEQLCINFTNEKLQQFFNHHMFVLEQEEYKKEGIEWTFIDFGMDLAACIELIEKPLGIFSILEEECMFPKATDTSFKNKLYDQHLGKSANFQKPKVVKGKAEAHFSLIHYAGTVDYNITGWLDKNKDPLNDTVVGLYQKSAMKTLASLFSTYASAEADSSAKKGAKKKGSSFQTVSALFRENLNKLMTNLRSTHPHFVRCIIPNETKTPGAMEHELVLHQLRCNGVLEGIRICRKGFPSRILYGDFKQRYKVLNASAIPEGQFIDSKKASEKLLASIDIDHTQYKFGHTKVFFKAGLLGLLEEMRDEKLAQIITRTQAVCRGFLMRVEYQKMLQRREALFCIQYNVRAFMNVKHWPWMKLFFKIKPLLKSAETEKEMATMKEEFQKTKDELAKSEAKRKELEEKMVTLLKEKNDLQLQVQSEADSLADAEERCEQLIKNKIQLEAKIKEVTERAEEEEEINAELTAKKRKLEDECSELKKDIDDLELTLAKVEKEKHATENKVKNLTEEMAGLDETIAKLSKEKKALQETHQQTLDDLQAEEDKVNILTKAKTKLEQQVDDLEGSLEQEKKLRMDLERAKRKLEGDLKLAQESTMDMENDKQQLDEKLEKKEFEISNLISKIEDEQAVEIQLQKKIKELQARIEELGEEIEAERASRAKAEKQRSDLSRELEEISERLEEAGGATSAQVELNKKREAEFQKLRRDLEEATLQHEAMVAALRKKHADSMAELGEQIDNLQRVKQKLEKEKSELKMETDDLSSNAEAISKAKGNLEKMCRSLEDQVSELKTKEEEQQRLINDLTAQRARLQTEAGEYSRQLDEKDALVSQLSRSKQASTQQIEELKHQLEEETKAKNALAHALQSSRHDCDLLREQYEEEQEGKAELQRALSKANSEVAQWRTKYETDAIQRTEELEEAKKKLAQRLQEAEEHVEAVNAKCASLEKTKQRLQNEVEDLMLDVERSNAACAALDKKQRNFDKVLSEWKQKYEETQAELEASQKESRSLSTELFKVKNVYEESLDQLETLRRENKNLQQEISDLTEQIAEGGKQIHELEKIKKQVEQEKCEIQAALEEAEASLEHEEGKILRIQLELNQVKSEVDRKIAEKDEEIDQLKRNHTRVVETMQSTLDAEIRSRNDALRVKKKMEGDLNEMEIQLNHANRLAAESLRNYRNTQGILKETQLHLDDALRGQEDLKEQLAIVERRANLLQAEIEELWATLEQTERSRKIAEQELLDASERVQLLHTQNTSLINTKKKLENDVSQLQSEVEEVIQESRNAEEKAKKAITDAAMMAEELKKEQDTSAHLERMKKNLEQTVKDLQHRLDEAEQLALKGGKKQIQKLEARVRELEGEVENEQKRNAEAVKGLRKHERRVKELTYQTEEDRKNVLRLQDLVDKLQAKVKSYKRQAEEAEEQSNANLSKFRKLQHELEEAEERADIAESQVNKLRVKSREVHTKISAE

SEQ ID NO: 54543 - protein, 1960 aa, Homo sapiens
  Payload ID: 10769
  Gene Symbol: MYH9
  Gene Name: myosin, heavy chain 9, non-muscle
  Uniprot ID: P35579
  ENSP ID: ENSP00000216181
MAQQAADKYLYVDKNFINNPLAQADWAAKKLVWVPSDKSGFEPASLKEEVGEEAIVELVENGKKVKVNKDDIQKMNPPKFSKVEDMAELTCLNEASVLHNLKERYYSGLIYTYSGLFCVVINPYKNLPIYSEEIVEMYKGKKRHEMPPHIYAITDTAYRSMMQDREDQSILCTGESGAGKTENTKKVIQYLAYVASSHKSKKDQGELERQLLQANPILEAFGNAKTVKNDNSSRFGKFIRINFDVNGYIVGANIETYLLEKSRAIRQAKEERTFHIFYYLLSGAGEHLKTDLLLEPYNKYRFLSNGHVTIPGQQDKDMFQETMEAMRIMGIPEEEQMGLLRVISGVLQLGNIVFKKERNTDQASMPDNTAAQKVSHLLGINVTDFTRGILTPRIKVGRDYVQKAQTKEQADFAIEALAKATYERMFRWLVLRINKALDKTKRQGASFIGILDIAGFEIFDLNSFEQLCINYTNEKLQQLFNHTMFILEQEEYQREGIEWNFIDFGLDLQPCIDLIEKPAGPPGILALLDEECWFPKATDKSFVEKVMQEQGTHPKFQKPKQLKDKADFCIIHYAGKVDYKADEWLMKNMDPLNDNIATLLHQSSDKFVSELWKDVDRIIGLDQVAGMSETALPGAFKTRKGMFRTVGQLYKEQLAKLMATLRNTNPNFVRCIIPNHEKKAGKLDPHLVLDQLRCNGVLEGIRICRQGFPNRVVFQEFRQRYEILTPNSIPKGFMDGKQACVLMIKALELDSNLYRIGQSKVFFRAGVLAHLEEERDLKITDVIIGFQACCRGYLARKAFAKRQQQLTAMKVLQRNCAAYLKLRNWQWWRLFTKVKPLLQVSRQEEEMMAKEEELVKVREKQLAAENRLTEMETLQSQLMAEKLQLQEQLQAETELCAEAEELRARLTAKKQELEEICHDLEARVEEEEERCQHLQAEKKKMQQNIQELEEQLEEEESARQKLQLEKVTTEAKLKKLEEEQIILEDQNCKLAKEKKLLEDRIAEFTTNLTEEEEKSKSLAKLKNKHEAMITDLEERLRREEKQRQELEKTRRKLEGDSTDLSDQIAELQAQIAELKMQLAKKEEELQAALARVEEEAAQKNMALKKIRELESQISELQEDLESERASRNKAEKQKRDLGEELEALKTELEDTLDSTAAQQELRSKREQEVNILKKTLEEEAKTHEAQIQEMRQKHSQAVEELAEQLEQTKRVKANLEKAKQTLENERGELANEVKVLLQGKGDSEHKRKKVEAQLQELQVKFNEGERVRTELADKVTKLQVELDNVTGLLSQSDSKSSKLTKDFSALESQLQDTQELLQEENRQKLSLSTKLKQVEDEKNSFREQLEEEEEAKHNLEKQIATLHAQVADMKKKMEDSVGCLETAEEVKRKLQKDLEGLSQRHEEKVAAYDKLEKTKTRLQQELDDLLVDLDHQRQSACNLEKKQKKFDQLLAEEKTISAKYAEERDRAEAEAREKETKALSLARALEEAMEQKAELERLNKQFRTEMEDLMSSKDDVGKSVHELEKSKRALEQQVEEMKTQLEELEDELQATEDAKLRLEVNLQAMKAQFERDLQGRDEQSEEKKKQLVRQVREMEAELEDERKQRSMAVAARKKLEMDLKDLEAHIDSANKNRDEAIKQLRKLQAQMKDCMRELDDTRASREEILAQAKENEKKLKSMEAEMIQLQEELAAAERAKRQAQQERDELADEIANSSGKGALALEEKRRLEARIAQLEEELEEEQGNTELINDRLKKANLQIDQINTDLNLERSHAQKNENARQQLERQNKELKVKLQEMEGTVKSKYKASITALEAKIAQLEEQLDNETKERQAACKQVRRTEKKLKDVLLQVDDERRNAEQYKDQADKASTRLKQLKRQLEEAEEEAQRANASRRKLQRELEDATETADAMNREVSSLKNKLRRGDLPFVVPRRMARKGAGDGSDEEVDGKADGAEAKPAE

SEQ ID NO: 54544 - protein, 218 aa, Homo sapiens
  Payload ID: 10769
  Gene Symbol: MYH9
  Gene Name: myosin, heavy chain 9, non-muscle
  ENSP ID: ENSP00000384631
MAQQAADKYLYVDKNFINNPLAQADWAAKKLVWVPSDKSGFEPASLKEEVGEEAIVELVENGKKVKVNKDDIQKMNPPKFSKVEDMAELTCLNEASVLHNLKERYYSGLIYTYSGLFCVVINPYKNLPIYSEEIVEMYKGKKRHEMPPHIYAITDTAYRSMMQDREDQSILCTGESGAGKTENTKKVIQYLAYVASSHKSKKDQEAYFKNRAVRLGVL

SEQ ID NO: 54545 - protein, 103 aa, Homo sapiens
  Payload ID: 10769
  Gene Symbol: MYH9
  Gene Name: myosin, heavy chain 9, non-muscle
  ENSP ID: ENSP00000414852
MAQQAADKYLYVDKNFINNPLAQADWAAKKLVWVPSDKSGFEPASLKEEVGEEAIVELVENGKKVKVNKDDIQKMNPPKFSKVEDMAELTCLNEASVLHNLKE

SEQ ID NO: 54546 - protein, 194 aa, Homo sapiens
  Payload ID: 10770
  Gene Symbol: MYL1
  Gene Name: myosin, light chain 1, alkali
  skeletal, fast
  Uniprot ID: P05976
  ENSP ID: ENSP00000307280
MAPKKDVKKPVAAAAAAPAPAPAPAPAPAPAKPKEEKIDLSAIKIEFSKEQQDEFKEAFLLFDRTGDSKITLSQVGDVLRALGTNPTNAEVRKVLGNPSNEELNAKKIEFEQFLPMMQAISNNKDQATYEDFVEGLRVFDKEGNGTVMGAELRHVLATLGEKMKEEEVEALMAGQEDSNGCINYEAFVKHIMSI

SEQ ID NO: 54547 - protein, 150 aa, Homo sapiens
  Payload ID: 10770
  Gene Symbol: MYL1
  Gene Name: myosin, light chain 1, alkali
  skeletal, fast
  Uniprot ID: P05976
  ENSP ID: ENSP00000343321
MSFSADQIAEFKEAFLLFDRTGDSKITLSQVGDVLRALGTNPTNAEVRKVLGNPSNEELNAKKIEFEQFLPMMQAISNNKDQATYEDFVEGLRVFDKEGNGTVMGAELRHVLATLGEKMKEEEVEALMAGQEDSNGCINYEAFVKHIMSI

SEQ ID NO: 54548 - protein, 226 aa, Homo sapiens
  Payload ID: 10771
  Gene Symbol: MYL10
  Gene Name: myosin, light chain 10, regulatory
  Uniprot ID: Q9BUA6
  ENSP ID: ENSP00000223167
MLLRLVSNSWPQVILPPRPPKVLGLQAPRRARKRAEGTASSNVFSMFDQSQIQEFKESLALSPRLERNGMISAHCNLCLTGSSNSPASASQAFTIMDQNRDGFIDKEDLRDTFAALGRINVKNEELEAMVKEAPGPINFTVFLTMFGEKLKGTDPEETILHAFKVFDTEGKGFVKADVIKEKLMTQADRFSEEEVKQMFAAFPPDVCGNLDYRNLCYVITHGEEKD

SEQ ID NO: 54549 - protein, 171 aa, Homo sapiens
  Payload ID: 10772
  Gene Symbol: MYL12A
  Gene Name: myosin, light chain 12A, regulatory, non-sarcomeric
  Uniprot ID: P19105
  ENSP ID: ENSP00000217652
MSSKRTKTKTKKRPQRATSNVFAMFDQSQIQEFKEAFNMIDQNRDGFIDKEDLHDMLASLGKNPTDEYLDAMMNEAPGPINFTMFLTMFGEKLNGTDPEDVIRNAFACFDEEATGTIQEDYLRELLTTMGDRFTDEEVDELYREAPIDKKGNFNYIEFTRILKHGAKDKDD

SEQ ID NO: 54550 - protein, 171 aa, Homo sapiens; identical to SEQ ID NO: 54549
  Payload ID: 10772
  Gene Symbol: MYL12A
  Gene Name: myosin, light chain 12A, regulatory, non-sarcomeric
  Uniprot ID: P19105
  ENSP ID: ENSP00000441231

SEQ ID NO: 54551 - protein, 171 aa, Homo sapiens; identical to SEQ ID NO: 54549
  Payload ID: 10772
  Gene Symbol: MYL12A
  Gene Name: myosin, light chain 12A, regulatory, non-sarcomeric
  Uniprot ID: P19105
  ENSP ID: ENSP00000462171

SEQ ID NO: 54552 - protein, 12 aa, Homo sapiens
  Payload ID: 10772
  Gene Symbol: MYL12A
  Gene Name: myosin, light chain 12A, regulatory, non-sarcomeric
  ENSP ID: ENSP00000462865
MSSKRTKTKTKK

SEQ ID NO: 54553 - protein, 114 aa, Homo sapiens
  Payload ID: 10772
  Gene Symbol: MYL12A
  Gene Name: myosin, light chain 12A, regulatory, non-sarcomeric
  ENSP ID: ENSP00000463009
MSSKRTKTKTKKRPQRATSNVFAMFDQSQIQEFKEAFNMIDQNRDGFIDKEDLHDMLASLGKNPTDEYLDAMMNEAPGPINFTMFLTMFGEKLNGTDPEDVIRNAFACFDEEAT

SEQ ID NO: 54554 - protein, 171 aa, Homo sapiens; identical to SEQ ID NO: 54549
  Payload ID: 10772
  Gene Symbol: MYL12A
  Gene Name: myosin, light chain 12A, regulatory, non-sarcomeric
  Uniprot ID: P19105
  ENSP ID: ENSP00000463614

SEQ ID NO: 54555 - protein, 177 aa, Homo sapiens
  Payload ID: 10772
  Gene Symbol: MYL12A
  Gene Name: myosin, light chain 12A, regulatory, non-sarcomeric
  ENSP ID: ENSP00000464359
MDLTTTMSSKRTKTKTKKRPQRATSNVFAMFDQSQIQEFKEAFNMIDQNRDGFIDKEDLHDMLASLGKNPTDEYLDAMMNEAPGPINFTMFLTMFGEKLNGTDPEDVIRNAFACFDEEATGTIQEDYLRELLTTMGDRFTDEEVDELYREAPIDKKGNFNYIEFTRILKHGAKDKDD

SEQ ID NO: 54556 - protein, 172 aa, Homo sapiens
  Payload ID: 10773
  Gene Symbol: MYL12B
  Gene Name: myosin, light chain 12B, regulatory
  Uniprot ID: O14950
  ENSP ID: ENSP00000237500
MSSKKAKTKTTKKRPQRATSNVFAMFDQSQIQEFKEAFNMIDQNRDGFIDKEDLHDMLASLGKNPTDAYLDAMMNEAPGPINFTMFLTMFGEKLNGTDPEDVIRNAFACFDEEATGTIQEDYLRELLTTMGDRFTDEEVDELYREAPIDKKGNFNYIEFTRILKHGAKDKDD

SEQ ID NO: 54557 - protein, 172 aa, Homo sapiens; identical to SEQ ID NO: 54556
  Payload ID: 10773
  Gene Symbol: MYL12B
  Gene Name: myosin, light chain 12B, regulatory
  Uniprot ID: O14950
  ENSP ID: ENSP00000383037

SEQ ID NO: 54558 - protein, 172 aa, Homo sapiens; identical to SEQ ID NO: 54556
  Payload ID: 10773
  Gene Symbol: MYL12B
  Gene Name: myosin, light chain 12B, regulatory
  Uniprot ID: O14950
  ENSP ID: ENSP00000463559

SEQ ID NO: 54559 - protein, 172 aa, Homo sapiens; identical to SEQ ID NO: 54556
  Payload ID: 10773
  Gene Symbol: MYL12B
  Gene Name: myosin, light chain 12B, regulatory
  Uniprot ID: O14950
  ENSP ID: ENSP00000464464

SEQ ID NO: 54560 - protein, 166 aa, Homo sapiens
  Payload ID: 10774
  Gene Symbol: MYL2
  Gene Name: myosin, light chain 2, regulatory, cardiac, slow
  Uniprot ID: P10916
  ENSP ID: ENSP00000228841
MAPKKAKKRAGGANSNVFSMFEQTQIQEFKEAFTIMDQNRDGFIDKNDLRDTFAALGRVNVKNEEIDEMIKEAPGPINFTVFLTMFGEKLKGADPEETILNAFKVFDPEGKGVLKADYVREMLTTQAERFSKEEVDQMFAAFPPDVTGNLDYKNLVHIITHGEEKD

SEQ ID NO: 54561 - protein, 152 aa, Homo sapiens
  Payload ID: 10774
  Gene Symbol: MYL2
  Gene Name: myosin, light chain 2, regulatory, cardiac, slow
  ENSP ID: ENSP00000447154
MAPKKAKKRAGGANSNVFSMFEQTQIQEFKELGVPECVFPTLGRVNVKNEEIDEMIKEAPGPINFTVFLTMFGEKLKGADPEETILNAFKVFDPEGKGVLKADYVREMLTTQAERFSKEEVDQMFAAFPPDVTGNLDYKNLVHIITHGEEKD

SEQ ID NO: 54562 - protein, 195 aa, Homo sapiens
  Payload ID: 10775
  Gene Symbol: MYL3
  Gene Name: myosin, light chain 3, alkali
  ventricular, skeletal, slow
  Uniprot ID: P08590
  ENSP ID: ENSP00000292327
MAPKKPEPKKDDAKAAPKAAPAPAPPPEPERPKEVEFDASKIKIEFTPEQIEEFKEAFMLFDRTPKCEMKITYGQCGDVLRALGQNPTQAEVLRVLGKPRQEELNTKMMDFETFLPMLQHISKNKDTGTYEDFVEGLRVFDKEGNGTVMGAELRHVLATLGERLTEDEVEKLMAGQEDSNGCINYEAFVKHIMSS

SEQ ID NO: 54563 - protein, 195 aa, Homo sapiens; identical to SEQ ID NO: 54562
  Payload ID: 10775
  Gene Symbol: MYL3
  Gene Name: myosin, light chain 3, alkali
  ventricular, skeletal, slow
  Uniprot ID: P08590
  ENSP ID: ENSP00000379210

SEQ ID NO: 54564 - protein, 46 aa, Homo sapiens
  Payload ID: 10775
  Gene Symbol: MYL3
  Gene Name: myosin, light chain 3, alkali
  ventricular, skeletal, slow
  ENSP ID: ENSP00000393455
MAPKKPEPKKDDAKAAPKAAPAPAPPPEPERPKEVEFDASKIKIEF

SEQ ID NO: 54565 - protein, 197 aa, Homo sapiens
  Payload ID: 10776
  Gene Symbol: MYL4
  Gene Name: myosin, light chain 4, alkali
  atrial, embryonic
  Uniprot ID: P12829
  ENSP ID: ENSP00000347055
MAPKKPEPKKEAAKPAPAPAPAPAPAPAPAPEAPKEPAFDPKSVKIDFTADQIEEFKEAFSLFDRTPTGEMKITYGQCGDVLRALGQNPTNAEVLRVLGKPKPEEMNVKMLDFETFLPILQHISRNKEQGTYEDFVEGLRVFDKESNGTVMGAELRHVLATLGEKMTEAEVEQLLAGQEDANGCINYEAFVKHIMSG

SEQ ID NO: 54566 - protein, 197 aa, Homo sapiens; identical to SEQ ID NO: 54565
  Payload ID: 10776
  Gene Symbol: MYL4
  Gene Name: myosin, light chain 4, alkali
  atrial, embryonic
  Uniprot ID: P12829
  ENSP ID: ENSP00000377096

SEQ ID NO: 54567 - protein, 196 aa, Homo sapiens
  Payload ID: 10776
  Gene Symbol: MYL4
  Gene Name: myosin, light chain 4, alkali
  atrial, embryonic
  ENSP ID: ENSP00000442375
MAPKKPEPKKEAAKPAPAPAPAPAPAPAPAPEAPKEPAFDPKSVKIDFTADQIEEFKEAFSLFDRTPTGEMKITYGQCGDVLRALGQNPTNAEVLRVLGKPKPEEMNVKMLDFETFLPILQHISRNKEQGTYEDFVEGLRVFDKESNGTVMGAELRHVLATLGEKMTEAEVEQLLAGQEDANGCINYEAFVKHIMS

SEQ ID NO: 54568 - protein, 61 aa, Homo sapiens
  Payload ID: 10776
  Gene Symbol: MYL4
  Gene Name: myosin, light chain 4, alkali
  atrial, embryonic
  ENSP ID: ENSP00000458194
MAPKKPEPKKEAAKPAPAPAPAPAPAPAPAPEAPKEPAFDPKSVKSSKRPFHCLTGPRLER

SEQ ID NO: 54569 - protein, 172 aa, Homo sapiens
  Payload ID: 10776
  Gene Symbol: MYL4
  Gene Name: myosin, light chain 4, alkali
  atrial, embryonic
  ENSP ID: ENSP00000458907
MAPKKPEPKKEAAKPAPAPAPAPAPAPAPAPEAPKEPAFDPKSVKIDFTADQIEEFKEAFSLFDRTPTGEMKITYGQCGDVLRALGQNPTNAEVLRVLGKPKPEEMNVKMLDFETFLPILQHISRNKEQGTYEDFVEGLRVFDKESNGTVMGAELRHVLATLGEKMTEAEVE

SEQ ID NO: 54570 - protein, 61 aa, Homo sapiens; identical to SEQ ID NO: 54568
  Payload ID: 10776
  Gene Symbol: MYL4
  Gene Name: myosin, light chain 4, alkali
  atrial, embryonic
  ENSP ID: ENSP00000459035

SEQ ID NO: 54571 - protein, 115 aa, Homo sapiens
  Payload ID: 10776
  Gene Symbol: MYL4
  Gene Name: myosin, light chain 4, alkali
  atrial, embryonic
  ENSP ID: ENSP00000460734
MAPKKPEPKKEAAKPAPAPAPAPAPAPAPAPEAPKEPAFDPKSVKIDFTADQIEEFKEAFSLFDRTPTGEMKITYGQCGDVLRALGQNPTNAEVLRVLGKPKPEAHFPQQGAGHL

SEQ ID NO: 54572 - protein, 101 aa, Homo sapiens
  Payload ID: 10776
  Gene Symbol: MYL4
  Gene Name: myosin, light chain 4, alkali
  atrial, embryonic
  ENSP ID: ENSP00000461121
  MOD_RES (1)..(1): Any amino acid
XLGKPKPEEMNVKMLDFETFLPILQHISRNKEQGTYEDFVEGLRVFDKESNGTVMGAELRHVLATLGEKMTEAEVEQLLAGQEDANGCINYEAFVKHIMSG

SEQ ID NO: 54573 - protein, 197 aa, Homo sapiens; identical to SEQ ID NO: 54565
  Payload ID: 10776
  Gene Symbol: MYL4
  Gene Name: myosin, light chain 4, alkali
  atrial, embryonic
  Uniprot ID: P12829
  ENSP ID: ENSP00000461570

SEQ ID NO: 54574 - protein, 173 aa, Homo sapiens
  Payload ID: 10776
  Gene Symbol: MYL4
  Gene Name: myosin, light chain 4, alkali
  atrial, embryonic
  ENSP ID: ENSP00000461747
MAPKKPEPKKEAAKPAPAPAPAPAPAPAPAPEAPKEPAFDPKSVKIDFTADQIEGEYGQPHLSVSIALSWRRRRRRKKRRSSCPHEFKEAFSLFDRTPTGEMKITYGQCGDVLRALGQNPTNAEVLRVLGKPKPEEMNVKMLDFETFLPILQHISRNKEQGTYEDFVEGLRVF

SEQ ID NO: 54575 - protein, 173 aa, Homo sapiens
  Payload ID: 10777
  Gene Symbol: MYL5
  Gene Name: myosin, light chain 5, regulatory
  Uniprot ID: Q02045
  ENSP ID: ENSP00000383023
MASRKTKKKEGGALRAQRASSNVFSNFEQTQIQEFKEAFTLMDQNRDGFIDKEDLKDTYASLGKTNVKDDELDAMLKEASGPINFTMFLNLFGEKLSGTDAEETILNAFKMLDPDGKGKINKEYIKRLLMSQADKMTAEEVDQMFQFASIDVAGNLDYKALSYVITHGEEKEE

SEQ ID NO: 54576 - protein, 105 aa, Homo sapiens
  Payload ID: 10777
  Gene Symbol: MYL5
  Gene Name: myosin, light chain 5, regulatory
  ENSP ID: ENSP00000423053
MASRKTKKKEGGALRAQRASSNVFSNFEQTQIQEFKEAFTLMDQNRDGFIDKEDLKDTYASLGRYPGRTPQSPWRRRTQRSSSSRRRGPSSNGARARASEAHQRP

SEQ ID NO: 54577 - protein, 132 aa, Homo sapiens
  Payload ID: 10777
  Gene Symbol: MYL5
  Gene Name: myosin, light chain 5, regulatory
  Uniprot ID: Q02045
  ENSP ID: ENSP00000423118
MDQNRDGFIDKEDLKDTYASLGKTNVKDDELDAMLKEASGPINFTMFLNLFGEKLSGTDAEETILNAFKMLDPDGKGKINKEYIKRLLMSQADKMTAEEVDQMFQFASIDVAGNLDYKALSYVITHGEEKEE

SEQ ID NO: 54578 - protein, 64 aa, Homo sapiens
  Payload ID: 10777
  Gene Symbol: MYL5
  Gene Name: myosin, light chain 5, regulatory
  ENSP ID: ENSP00000424528
MDQNRDGFIDKEDLKDTYASLGRYPGRTPQSPWRRRTQRSSSSRRRGPSSNGARARASEAHQRP

SEQ ID NO: 54579 - protein, 132 aa, Homo sapiens; identical to SEQ ID NO: 54577
  Payload ID: 10777
  Gene Symbol: MYL5
  Gene Name: myosin, light chain 5, regulatory
  Uniprot ID: Q02045
  ENSP ID: ENSP00000425162

SEQ ID NO: 54580 - protein, 132 aa, Homo sapiens; identical to SEQ ID NO: 54577
  Payload ID: 10777
  Gene Symbol: MYL5
  Gene Name: myosin, light chain 5, regulatory
  Uniprot ID: Q02045
  ENSP ID: ENSP00000427153

SEQ ID NO: 54581 - protein, 126 aa, Homo sapiens
  Payload ID: 10777
  Gene Symbol: MYL5
  Gene Name: myosin, light chain 5, regulatory
  ENSP ID: ENSP00000427317
MVLPPQASRKTKKKEGGALRAQRASSNVFSNFEQTQIQEFKEAFTLMDQNRDGFIDKEDLKDTYASLGKTNVKDDELDAMLKEASGPINFTMFLNLFGEKLSGTDAEETILNAFKMLDPDGKGKIN

SEQ ID NO: 54582 - protein, 152 aa, Homo sapiens
  Payload ID: 10778
  Gene Symbol: MYL6
  Gene Name: myosin, light chain 6, alkali, smooth muscle and non-muscle
  ENSP ID: ENSP00000293422
MQCDFTEDQTAEFKEAFQLFDRTGDGKILYSQCGDVMRALGQNPTNAEVLKVLGNPKSDEMNVKVLDFEHFLPMLQTVAKNKDQGTYEDYVEGLRVFDKEGNGTVMGAEIRHVLVTLGEKMTEEEVEMLVAGHEDSNGCINYEELVRMVLNG

SEQ ID NO: 54583 - protein, 152 aa, Homo sapiens
  Payload ID: 10778
  Gene Symbol: MYL6
  Gene Name: myosin, light chain 6, alkali, smooth muscle and non-muscle
  ENSP ID: ENSP00000301540
MQCDFTEDQTAEFKEAFQLFDRTGDGKILYSQCGDVMRALGQNPTNAEVLKVLGNPKSDEMNVKVLDFEHFLPMLQTVAKNKDQGTYEDYVEGLRVFDKEGNGTVMGAEIRHVLVTLGEKMTEEEVEMLVAGHEDSNGCINYEAFVRHILSG

SEQ ID NO: 54584 - protein, 238 aa, Homo sapiens
  Payload ID: 10778
  Gene Symbol: MYL6
  Gene Name: myosin, light chain 6, alkali, smooth muscle and non-muscle
  ENSP ID: ENSP00000441750
MVGPRSWETGRIGDERQEETGGGRGEGRGRRQRESEDPKGWRWGWKDWGPAGKRVCSLKQEFVGQSLWVRVCGAGIETRGIGVQMLTTSLFSEQCDFTEDQTAEFKEAFQLFDRTGDGKILYSQCGDVMRALGQNPTNAEVLKVLGNPKSDEMNVKVLDFEHFLPMLQTVAKNKDQGTYEDYVEGLRVFDKEGNGTVMGAEIRHVLVTLGEKMTEEEVEMLVAGHEDSNGCINYEGKR

SEQ ID NO: 54585 - protein, 103 aa, Homo sapiens
  Payload ID: 10778
  Gene Symbol: MYL6
  Gene Name: myosin, light chain 6, alkali, smooth muscle and non-muscle
  ENSP ID: ENSP00000446640
MCDFTEDQTAEMNVKVLDFEHFLPMLQTVAKNKDQGTYEDYVEGLRVFDKEGNGTVMGAEIRHVLVTLGEKMTEEEVEMLVAGHEDSNGCINYEELVRMVLNG

SEQ ID NO: 54586 - protein, 145 aa, Homo sapiens
  Payload ID: 10778
  Gene Symbol: MYL6
  Gene Name: myosin, light chain 6, alkali, smooth muscle and non-muscle
  ENSP ID: ENSP00000446687
MCDFTEDQTAEFKEAFQLFDRTGDGKILYSQCGDVMRALGQNPTNAEVLKVLGNPKSDEMNVKVLDFEHFLPMLQTVAKNKDQGTYEDYVEGLRVFDKEGNGTVMGAEIRHVLVTLGEKMTEEEVEMLVAGHEDSNGCINYEGKR

SEQ ID NO: 54587 - protein, 196 aa, Homo sapiens
  Payload ID: 10778
  Gene Symbol: MYL6
  Gene Name: myosin, light chain 6, alkali, smooth muscle and non-muscle
  ENSP ID: ENSP00000446709
MVGPRSWETGRIGDERQEETGGGRGEGRGRRQRESEDPKGWRWGWKDWGPAGKRVCSLKQEFVGQSLWVRVCGAGIETRGIGVQMLTTSLFSEQCDFTEDQTAEMNVKVLDFEHFLPMLQTVAKNKDQGTYEDYVEGLRVFDKEGNGTVMGAEIRHVLVTLGEKMTEEEVEMLVAGHEDSNGCINYEELVRMVLNG

SEQ ID NO: 54588 - protein, 151 aa, Homo sapiens
  Payload ID: 10778
  Gene Symbol: MYL6
  Gene Name: myosin, light chain 6, alkali, smooth muscle and non-muscle
  Uniprot ID: P60660
  ENSP ID: ENSP00000446714
MCDFTEDQTAEFKEAFQLFDRTGDGKILYSQCGDVMRALGQNPTNAEVLKVLGNPKSDEMNVKVLDFEHFLPMLQTVAKNKDQGTYEDYVEGLRVFDKEGNGTVMGAEIRHVLVTLGEKMTEEEVEMLVAGHEDSNGCINYEELVRMVLNG

SEQ ID NO: 54589 - protein, 161 aa, Homo sapiens
  Payload ID: 10778
  Gene Symbol: MYL6
  Gene Name: myosin, light chain 6, alkali, smooth muscle and non-muscle
  ENSP ID: ENSP00000446721
MCDFTEDQTAEFKEAFQLFDRTGDGKILYSQCGDVMRALGQNPTNAEVLKVLGNPKSDEMNVKVLDFEHFLPMLQTVAKNKDQGTYEDYVEGLRVFDKEGNGTVMGAEIRHVLVTLGEKMTEEEVEMLVAGHEDSNGCINYEGKRRCEGLQESCSHHNPPA

SEQ ID NO: 54590 - protein, 151 aa, Homo sapiens
  Payload ID: 10778
  Gene Symbol: MYL6
  Gene Name: myosin, light chain 6, alkali, smooth muscle and non-muscle
  Uniprot ID: P60660
  ENSP ID: ENSP00000446955
MCDFTEDQTAEFKEAFQLFDRTGDGKILYSQCGDVMRALGQNPTNAEVLKVLGNPKSDEMNVKVLDFEHFLPMLQTVAKNKDQGTYEDYVEGLRVFDKEGNGTVMGAEIRHVLVTLGEKMTEEEVEMLVAGHEDSNGCINYEAFVRHILSG

SEQ ID NO: 54591 - protein, 151 aa, Homo sapiens; identical to SEQ ID NO: 54590
  Payload ID: 10778
  Gene Symbol: MYL6
  Gene Name: myosin, light chain 6, alkali, smooth muscle and non-muscle
  Uniprot ID: P60660
  ENSP ID: ENSP00000448101

SEQ ID NO: 54592 - protein, 83 aa, Homo sapiens
  Payload ID: 10778
  Gene Symbol: MYL6
  Gene Name: myosin, light chain 6, alkali, smooth muscle and non-muscle
  ENSP ID: ENSP00000448457
  MOD_RES (1)..(1): Any amino acid
XNKDQGTYEDYVEGLRVFDKEGNGTVMGAEIRHVLVTLGEKMTEEEVEMLVAGHEDSNGCINYEGKRRCEGLQESCSHHNPPA

SEQ ID NO: 54593 - protein, 115 aa, Homo sapiens
  Payload ID: 10778
  Gene Symbol: MYL6
  Gene Name: myosin, light chain 6, alkali, smooth muscle and non-muscle
  ENSP ID: ENSP00000448859
MCDFTEDQTAEFKEAFQLFDRTEMNVKVLDFEHFLPMLQTVAKNKDQGTYEDYVEGLRVFDKEGNGTVMGAEIRHVLVTLGEKMTEEEVEMLVAGHEDSNGCINYEAFVRHILSG

SEQ ID NO: 54594 - protein, 47 aa, Homo sapiens
  Payload ID: 10778
  Gene Symbol: MYL6
  Gene Name: myosin, light chain 6, alkali, smooth muscle and non-muscle
  ENSP ID: ENSP00000449086
MGAEIRHVLVTLGEKMTEEEVEMLVAGHEDSNGCINYEELVRMVLNG

SEQ ID NO: 54595 - protein, 130 aa, Homo sapiens
  Payload ID: 10778
  Gene Symbol: MYL6
  Gene Name: myosin, light chain 6, alkali, smooth muscle and non-muscle
  ENSP ID: ENSP00000450116
MCDFTEDQTAGDGKILYSQCGDVMRALGQNPTNAEVLKVLGNPKSDEMNVKVLDFEHFLPMLQTVAKNKDQGTYEDYVEGLRVFDKEGNGTVMGAEIRHVLVTLGEKMTEEEVEMLVAGHEDSNGCINYE

SEQ ID NO: 54596 - protein, 208 aa, Homo sapiens
  Payload ID: 10779
  Gene Symbol: MYL6B
  Gene Name: myosin, light chain 6B, alkali, smooth muscle and non-muscle
  Uniprot ID: P14649
  ENSP ID: ENSP00000446643
MPPKKDVPVKKPAGPSISKPAAKPAAAGAPPAKTKAEPAVPQAPQKTQEPPVDLSKVVIEFNKDQLEEFKEAFELFDRVGDGKILYSQCGDVMRALGQNPTNAEVLKVLGNPKSDELKSRRVDFETFLPMLQAVAKNRGQGTYEDYLEGFRVFDKEGNGKVMGAELRHVLTTLGEKMTEEEVETVLAGHEDSNGCINYEAFLKHILSV

SEQ ID NO: 54597 - protein, 175 aa, Homo sapiens
  Payload ID: 10779
  Gene Symbol: MYL6B
  Gene Name: myosin, light chain 6B, alkali, smooth muscle and non-muscle
  ENSP ID: ENSP00000446965
MPPKKDVPVKKPAGPSISKPAAKPAAAGAPPAKTKAEPAVPQAPQKTQEPPVDLSKVVIEFNKDQLEEFKEAFELFDRVGDGKILYSQCGDVMRALGQNPTNAEVLKVLGNPKSDELKSRRVDFETFLPMLQAVAKNRGQGEKMTEEEVETVLAGHEDSNGCINYEAFLKHILSV

SEQ ID NO: 54598 - protein, 29 aa, Homo sapiens
  Payload ID: 10779
  Gene Symbol: MYL6B
  Gene Name: myosin, light chain 6B, alkali, smooth muscle and non-muscle
  ENSP ID: ENSP00000448198
MPPKKDVPVKKPAGPSISKPAAKPAAAGA

SEQ ID NO: 54599 - protein, 208 aa, Homo sapiens; identical to SEQ ID NO: 54596
  Payload ID: 10779
  Gene Symbol: MYL6B
  Gene Name: myosin, light chain 6B, alkali, smooth muscle and non-muscle
  Uniprot ID: P14649
  ENSP ID: ENSP00000450385

SEQ ID NO: 54600 - protein, 175 aa, Homo sapiens
  Payload ID: 10780
  Gene Symbol: MYL7
  Gene Name: myosin, light chain 7, regulatory
  Uniprot ID: Q01449
  ENSP ID: ENSP00000223364
MASRKAGTRGKVAATKQAQRGSSNVFSMFEQAQIQEFKEAFSCIDQNRDGIICKADLRETYSQLGKVSVPEEELDAMLQEGKGPINFTVFLTLFGEKLNGTDPEEAILSAFRMFDPSGKGVVNKDEFKQLLLTQADKFSPAEVEQMFALTPMDLAGNIDYKSLCYIITHGDEKEE

SEQ ID NO: 54601 - protein, 197 aa, Homo sapiens
  Payload ID: 10780
  Gene Symbol: MYL7
  Gene Name: myosin, light chain 7, regulatory
  ENSP ID: ENSP00000389202
ASRKAGTRGKVAATKQAQRGSSNVFSMFEQAQIQEFKEVSPPPPTFPRAGGCSHLKAPIPQAFSCIDQNRDGIICKADLRETYSQLGKVSVPEEELDAMLQEGKGPINFTVFLTLFGEKLNGTDPEEAILSAFRMFDPSGKGVVNKDEFKQLLLTQADKFSPAEVEQMFALTPMDLAGNIDYKSLCYIITHGDEKEE

SEQ ID NO: 54602 - protein, 38 aa, Homo sapiens
  Payload ID: 10780
  Gene Symbol: MYL7
  Gene Name: myosin, light chain 7, regulatory
  ENSP ID: ENSP00000399398
  MOD_RES (1)..(1): Any amino acid
XKAGTRGKVAATKQAQRGSSNVFSMFEQAQIQEFKEGR

SEQ ID NO: 54603 - protein, 148 aa, Homo sapiens
  Payload ID: 10780
  Gene Symbol: MYL7
  Gene Name: myosin, light chain 7, regulatory
  ENSP ID: ENSP00000403360
MFEQAQIQEFKEAFSCIDQNRDGIICKADLRETYSQLGKVSVPEEELDAMLQEGKGPINFTVFLTLFGEKLNGTDPEEAILSAFRMFDPSGKGVVNKDEFKQLLLTQADKFSPAEVEQMFALTPMDLAGNIDYKSLCYIITHGDEKEE

SEQ ID NO: 54604 - protein, 172 aa, Homo sapiens
  Payload ID: 10780
  Gene Symbol: MYL7
  Gene Name: myosin, light chain 7, regulatory
  ENSP ID: ENSP00000403988
ASRKAGTRGKVAATKQAQRGSSNVFSMFEQAQIQEFKEAFSCIDQNRDGIICKADLRETYSQLAPVARMEGGRPGPSGGHPGSLCAPHAPPPPGKVSVPEEELDAMLQEGKGPINFTVFLTLFGEKLNGTDPEEAILSAFRMFDPSGKGVVNKDEFKQLLLTQADKFSPAEV

SEQ ID NO: 54605 - protein, 31 aa, Homo sapiens
  Payload ID: 10780
  Gene Symbol: MYL7
  Gene Name: myosin, light chain 7, regulatory
  ENSP ID: ENSP00000404918
MVSACWGRKASGLPGAGLWAGGAEFSVLVLG

SEQ ID NO: 54606 - protein, 107 aa, Homo sapiens
  Payload ID: 10780
  Gene Symbol: MYL7
  Gene Name: myosin, light chain 7, regulatory
  ENSP ID: ENSP00000411340
  MOD_RES (1)..(1): Any amino acid
XPAGRRGPGARWQPPSRPNVVLPTSFPCLNKPRYRSSKKAGGCSHLKAPIPQAFSCIDQNRDGIICKADLRETYSQLGKVSVPEEELDAMLQEGKGPINFTVFLTLF

SEQ ID NO: 54607 - protein, 135 aa, Homo sapiens
  Payload ID: 10780
  Gene Symbol: MYL7
  Gene Name: myosin, light chain 7, regulatory
  ENSP ID: ENSP00000416010
LDAMLQEGKGPINFTVFLTLFGEKLNGTDPEEAILSAFRMFDPSGKGVVNKDEFKQLLLTQADKFSPAEVRLPSPFNTHPQHLLWAFTHDPEPSTSEAVAGRVEQMFALTPMDLAGNIDYKSLCYIITHGDEKEE

SEQ ID NO: 54608 - protein, 118 aa, Homo sapiens
  Payload ID: 10781
  Gene Symbol: MYL9
  Gene Name: myosin, light chain 9, regulatory
  Uniprot ID: P24844
  ENSP ID: ENSP00000217313
MSSKRAKAKTTKKRPQRATSNVFAMFDQSQIQEFKEAFNMIDQNRDGFIDKEDLHDMLASLGFIHEDHLRELLTTMGDRFTDEEVDEMYREAPIDKKGNFNYVEFTRILKHGAKDKDD

SEQ ID NO: 54609 - protein, 172 aa, Homo sapiens
  Payload ID: 10781
  Gene Symbol: MYL9
  Gene Name: myosin, light chain 9, regulatory
  Uniprot ID: P24844
  ENSP ID: ENSP00000279022
MSSKRAKAKTTKKRPQRATSNVFAMFDQSQIQEFKEAFNMIDQNRDGFIDKEDLHDMLASLGKNPTDEYLEGMMSEAPGPINFTMFLTMFGEKLNGTDPEDVIRNAFACFDEEASGFIHEDHLRELLTTMGDRFTDEEVDEMYREAPIDKKGNFNYVEFTRILKHGAKDKDD

SEQ ID NO: 54610 - protein, 375 aa, Homo sapiens
  Payload ID: 10782
  Gene Symbol: MSTN
  Gene Name: myostatin
  Uniprot ID: O14793
  ENSP ID: ENSP00000260950
MQKLQLCVYIYLFMLIVAGPVDLNENSEQKENVEKEGLCNACTWRQNTKSSRIEAIKIQILSKLRLETAPNISKDVIRQLLPKAPPLRELIDQYDVQRDDSSDGSLEDDDYHATTETIITMPTESDFLMQVDGKPKCCFFKFSSKIQYNKVVKAQLWIYLRPVETPTTVFVQILRLIKPMKDGTRYTGIRSLKLDMNPGTGIWQSIDVKTVLQNWLKQPESNLGIEIKALDENGHDLAVTFPGPGEDGLNPFLEVKVTDTPKRSRRDFGLDCDEHSTESRCCRYPLTVDFEAFGWDWIIAPKRYKANYCSGECEFVFLQKYPHTHLVHQANPRGSAGPCCTPTKMSPINMLYFNGKEQIIYGKIPAMVVDRCGCS

SEQ ID NO: 54611 - protein, 498 aa, Homo sapiens
  Payload ID: 10783
  Gene Symbol: MYOT
  Gene Name: myotilin
  ENSP ID: ENSP00000239926
MFNYERPKHFIQSQNPCGSRLQPPGPETSSFSSQTKQSSIIIQPRQCTEQRFSASSTLSSHITMSSSAFPASPQQHAGSNPGQRVTTTYNQSPASFLSSILPSQPDYNSSKIPSAMDSNYQQSSAGQPINAKPSQTANAKPIPRTPDHEIQGSKEALIQDLERKLKCKDTLLHNGNQRLTYEEKMARRLLGPQNAAAVFQAQDDSGAQDSQQHNSEHARLQVPTSQVRSRSTSRGDVNDQDAIQEKFYPPRFIQVPENMSIDEGRFCRMDFKVSGLPAPDVSWYLNGRTVQSDDLHKMIVSEKGLHSLIFEVVRASDAGAYACVAKNRAGEATFTVQLDVLAKEHKRAPMFIYKPQSKKVLEGDSVKLECQISAIPPPKLFWKRNNEMVQFNTDRISLYQDNTGRVTLLIKDVNKKDAGWYTVSAVNEAGVTTCNTRLDVTARPNQTLPAPKQLRVRPTFSKYLALNGKGLNVKQAFNPEGEFQRLAAQSGLYESEEL

SEQ ID NO: 54612 - protein, 314 aa, Homo sapiens
  Payload ID: 10783
  Gene Symbol: MYOT
  Gene Name: myotilin
  Uniprot ID: Q9UBF9
  ENSP ID: ENSP00000391185
MARRLLGPQNAAAVFQAQDDSGAQDSQQHNSEHARLQVPTSQVRSRSTSRGDVNDQDAIQEKFYPPRFIQVPENMSIDEGRFCRMDFKVSGLPAPDVSWYLNGRTVQSDDLHKMIVSEKGLHSLIFEVVRASDAGAYACVAKNRAGEATFTVQLDVLAKEHKRAPMFIYKPQSKKVLEGDSVKLECQISAIPPPKLFWKRNNEMVQFNTDRISLYQDNTGRVTLLIKDVNKKDAGWYTVSAVNEAGVTTCNTRLDVTARPNQTLPAPKQLRVRPTFSKYLALNGKGLNVKQAFNPEGEFQRLAAQSGLYESEEL

SEQ ID NO: 54613 - protein, 383 aa, Homo sapiens
  Payload ID: 10783
  Gene Symbol: MYOT
  Gene Name: myotilin
  ENSP ID: ENSP00000426281
MDSNYQQSSAGQPINAKPSQTANAKPIPRTPDHEIQGSKEALIQDLERKLKCKDTLLHNGNQRLTYEEKMARRLLGPQNAAAVFQAQDDSGAQDSQQHNSEHARLQVPTSQVRSRSTSRGDVNDQDAIQEKFYPPRFIQVPENMSIDEGRFCRMDFKVSGLPAPDVSWYLNGRTVQSDDLHKMIVSEKGLHSLIFEVVRASDAGAYACVAKNRAGEATFTVQLDVLAKEHKRAPMFIYKPQSKKVLEGDSVKLECQISAIPPPKLFWKRNNEMVQFNTDRISLYQDNTGRVTLLIKDVNKKDAGWYTVSAVNEAGVTTCNTRLDVTARPNQTLPAPKQLRVRPTFSKYLALNGKGLNVKQAFNPEGEFQRLAAQSGLYESEEL

SEQ ID NO: 54614 - protein, 118 aa, Homo sapiens
  Payload ID: 10784
  Gene Symbol: MTPN
  Gene Name: myotrophin
  Uniprot ID: P58546
  ENSP ID: ENSP00000376800
MCDKEFMWALKNGDLDEVKDYVAKGEDVNRTLEGGRKPLHYAADCGQLEILEFLLLKGADINAPDKHHITPLLSAVYEGHVSCVKLLLSKGADKTVKGPDGLTAFEATDNQAIKALLQ

SEQ ID NO: 54615 - protein, 52 aa, Homo sapiens
  Payload ID: 10784
  Gene Symbol: MTPN
  Gene Name: myotrophin
  ENSP ID: ENSP00000388321
MCDKEFMWALKNGDLDEVKDYVAKGADKTVKGPDGLTAFEATDNQAIKALLQ

SEQ ID NO: 54616 - protein, 603 aa, Homo sapiens
  Payload ID: 10785
  Gene Symbol: MTM1
  Gene Name: myotubularin 1
  Uniprot ID: Q13496
  ENSP ID: ENSP00000359423
MASASTSKYNSHSLENESIKRTSRDGVNRDLTEAVPRLPGETLITDKEVIYICPFNGPIKGRVYITNYRLYLRSLETDSSLILDVPLGVISRIEKMGGATSRGENSYGLDITCKDMRNLRFALKQEGHSRRDMFEILTRYAFPLAHSLPLFAFLNEEKFNVDGWTVYNPVEEYRRQGLPNHHWRITFINKCYELCDTYPALLVVPYRASDDDLRRVATFRSRNRIPVLSWIHPENKTVIVRCSQPLVGMSGKRNKDDEKYLDVIRETNKQISKLTIYDARPSVNAVANKATGGGYESDDAYHNAELFFLDIHNIHVMRESLKKVKDIVYPNVEESHWLSSLESTHWLEHIKLVLTGAIQVADKVSSGKSSVLVHCSDGWDRTAQLTSLAMLMLDSFYRSIEGFEILVQKEWISFGHKFASRIGHGDKNHTDADRSPIFLQFIDCVWQMSKQFPTAFEFNEQFLIIILDHLYSCRFGTFLFNCESARERQKVTERTVSLWSLINSNKEKFKNPFYTKEINRVLYPVASMRHLELWVNYYIRWNPRIKQQQPNPVEQRYMELLALRDEYIKRLEELQLANSAKLSDPPTSPSSPSQMMPHVQTHF

SEQ ID NO: 54617 - protein, 103 aa, Homo sapiens
  Payload ID: 10785
  Gene Symbol: MTM1
  Gene Name: myotubularin 1
  ENSP ID: ENSP00000400699
MASASTSKYNSHSLENESIKRTSRDGVNRDLTEAVPRLPGETLITDKEVIYICPFNGPIKGRVYITNYRLYLRSLETPLFAFLNEEKFNVDGWTVYNPVEEYR

SEQ ID NO: 54618 - protein, 665 aa, Homo sapiens
  Payload ID: 10786
  Gene Symbol: MTMR1
  Gene Name: myotubularin related protein 1
  Uniprot ID: Q13613
  ENSP ID: ENSP00000359417
MDRPAAAAAAGCEGGGGPNPGPAGGRRPPRAAGGATAGSRQPSVETLDSPTGSHVEWCKQLIAATISSQISGSVTSENVSRDYKALRDGNKLAQMEEAPLFPGESIKAIVKDVMYICPFMGAVSGTLTVTDFKLYFKNVERDPHFILDVPLGVISRVEKIGAQSHGDNSCGIEIVCKDMRNLRLAYKQEEQSKLGIFENLNKHAFPLSNGQALFAFSYKEKFPINGWKVYDPVSEYKRQGLPNESWKISKINSNYEFCDTYPAIIVVPTSVKDDDLSKVAAFRAKGRVPVLSWIHPESQATITRCSQPLVGPNDKRCKEDEKYLQTIMDANAQSHKLIIFDARQNSVADTNKTKGGGYESESAYPNAELVFLEIHNIHVMRESLRKLKEIVYPSIDEARWLSNVDGTHWLEYIRMLLAGAVRIADKIESGKTSVVVHCSDGWDRTAQLTSLAMLMLDSYYRTIKGFETLVEKEWISFGHRFALRVGHGNDNHADADRSPIFLQFVDCVWQMTRQFPSAFEFNELFLITILDHLYSCLFGTFLCNCEQQRFKEDVYTKTISLWSYINSQLDEFSNPFFVNYENHVLYPVASLSHLELWVNYYVRWNPRMRPQMPIHQNLKELLAVRAELQKRVEGLQREVATRAVSSSSERGSSPSHSATSVHTSV

SEQ ID NO: 54619 - protein, 132 aa, Homo sapiens
  Payload ID: 10786
  Gene Symbol: MTMR1
  Gene Name: myotubularin related protein 1
  ENSP ID: ENSP00000389884
HVEWCKQLIAATISSQISGSVTSENVSRDYKVFRRPDLRNIHKARQRLALRDGNKLAQMEEAPLFPGESIKAIVKDVMYICPFMGAVSGTLTVTDFKLYFKNVERDPHFILDVPLGVISRVEKIGAQSHGDN

SEQ ID NO: 54620 - protein, 87 aa, Homo sapiens
  Payload ID: 10786
  Gene Symbol: MTMR1
  Gene Name: myotubularin related protein 1
  ENSP ID: ENSP00000390736
MEEAPLFPGESIKAIVKDVMYICPFMGAVSGTLTVTDFKLYFKNVERDPHFILDVPLGVISRVEKIGAQSHGDNSCGIEIVCKDMRN

SEQ ID NO: 54621 - protein, 90 aa, Homo sapiens
  Payload ID: 10786
  Gene Symbol: MTMR1
  Gene Name: myotubularin related protein 1
  ENSP ID: ENSP00000404599
MEEAPLFPGESIKAIVKDVMYICPFMGAVSGTLTVTDFKLYFKNVERDPHFILDVPLGVISRVEKIGAQSHGDNSCGIEIVCKDMRNLRL

SEQ ID NO: 54622 - protein, 87 aa, Homo sapiens; identical to SEQ ID NO: 54620
  Payload ID: 10786
  Gene Symbol: MTMR1
  Gene Name: myotubularin related protein 1
  ENSP ID: ENSP00000405946

SEQ ID NO: 54623 - protein, 673 aa, Homo sapiens
  Payload ID: 10786
  Gene Symbol: MTMR1
  Gene Name: myotubularin related protein 1
  ENSP ID: ENSP00000414178
MDRPAAAAAAGCEGGGGPNPGPAGGRRPPRAAGGATAGSRQPSVETLDSPTGSHVEWCKQLIAATISSQISGSVTSENVSRDYKVFRRPDLRALRDGNKLAQMEEAPLFPGESIKAIVKDVMYICPFMGAVSGTLTVTDFKLYFKNVERDPHFILDVPLGVISRVEKIGAQSHGDNSCGIEIVCKDMRNLRLAYKQEEQSKLGIFENLNKHAFPLSNGQALFAFSYKEKFPINGWKVYDPVSEYKRQGLPNESWKISKINSNYEFCDTYPAIIVVPTSVKDDDLSKVAAFRAKGRVPVLSWIHPESQATITRCSQPLVGPNDKRCKEDEKYLQTIMDANAQSHKLIIFDARQNSVADTNKTKGGGYESESAYPNAELVFLEIHNIHVMRESLRKLKEIVYPSIDEARWLSNVDGTHWLEYIRMLLAGAVRIADKIESGKTSVVVHCSDGWDRTAQLTSLAMLMLDSYYRTIKGFETLVEKEWISFGHRFALRVGHGNDNHADADRSPIFLQFVDCVWQMTRQFPSAFEFNELFLITILDHLYSCLFGTFLCNCEQQRFKEDVYTKTISLWSYINSQLDEFSNPFFVNYENHVLYPVASLSHLELWVNYYVRWNPRMRPQMPIHQNLKELLAVRAELQKRVEGLQREVATRAVSSSSERGSSPSHSATSVHTSV

SEQ ID NO: 54624 - protein, 149 aa, Homo sapiens
  Payload ID: 10786
  Gene Symbol: MTMR1
  Gene Name: myotubularin related protein 1
  ENSP ID: ENSP00000414925
HVEWCKQLIAATISSQISGSVTSENVSRDYKVFRRPDLRNIHKARQRLEIQEEHNGYPSEAEADQALRDGNKLAQMEEAPLFPGESIKAIVKDVMYICPFMGAVSGTLTVTDFKLYFKNVERDPHFILDVPLGVISRVEKIGAQSHGDN

SEQ ID NO: 54625 - protein, 147 aa, Homo sapiens
  Payload ID: 10786
  Gene Symbol: MTMR1
  Gene Name: myotubularin related protein 1
  ENSP ID: ENSP00000431992
MEEAPLFPGESIKAIVKDVMYICPFMGAVSGTLTVTDFKLYFKNVERDPHFILDVPLGVISRVEKIGAQSHGDNSCGIEIVCKDMRNLRLAYKQEEQSKLGIFENLNKHAFPLSNGQALFAFSYKEKFPINGWKVYDPVSEYKRQGL

SEQ ID NO: 54626 - protein, 568 aa, Homo sapiens
  Payload ID: 10786
  Gene Symbol: MTMR1
  Gene Name: myotubularin related protein 1
  Uniprot ID: Q13613
  ENSP ID: ENSP00000434105
MDRPAAAAAAGCEGGGGPNPGPAGGRRPPRAAGGATAGSRQPSVETLDSPTGSHVEWCKQLIAATISSQISGSVTSENVSRDYKALRDGNKLAQMEEAPLFPGESIKAIVKDVMYICPFMGAVSGTLTVTDFKLYFKNVERDPHFILDVPLGVISRVEKIGAQSHGDNSCGIEIVCKDMRNLRLAYKQEEQSKLGIFENLNKHAFPLSNGQALFAFSYKEKFPINGWKVYDPVSEYKRQGLPNESWKISKINSNYEFCDTYPAIIVVPTSVKDDDLSKVAAFRAKGRVPVLSWIHPESQATITRCSQPLVGPNDKRCKEDEKYLQTIMDANAQSHKLIIFDARQNSVADTNKTKGGGYESESAYPNAELVFLEIHNIHVMRESLRKLKEIVYPSIDEARWLSNVDGTHWLEYIRMLLAGAVRIADKIESGKTSVVVHCSDGWDRTAQLTSLAMLMLDSYYRTIKGFETLVEKEWISFGHRFALRVGHGNDNHADADRSPIFLQFVDCVWQMTRQFPSAFEFNELFLITILDHLYSCLFGTFLCNCEQQRFKEAWGAGTQRARGSLRSR

SEQ ID NO: 54627 - protein, 405 aa, Homo sapiens
  Payload ID: 10786
  Gene Symbol: MTMR1
  Gene Name: myotubularin related protein 1
  ENSP ID: ENSP00000434514
  MOD_RES (1)..(1): Any amino acid
XGESIKAIVKDVMYICPFMGAVSGTLTVTDFKLYFKNVERDPHFILDVPLGVISRVEKIGAQSHGDNSCGIEIVCKDMRNLRLAYKQEEQSKLGIFENLNKHAFPLSNGQALFAFSYKEKFPINGWKVYDPVSEYKRQGLPNESWKISKINSNYEFCDTYPAIIVVPTSVKDDDLSKVAAFRAKGRVPVLSWIHPESQATITRCSQPLVGPNDKRCKEDEKYLQTIMDANAQSHKLIIFDARQNSVADTNKMLLAGAVRIADKIESGKTSVVVHCSDGWDRTAQLTSLAMLMLDSYYRTIKGFETLVEKEWISFGHRFALRVGHGNDNHADADRSPIFLQFVDCVWQMTRQFPSAFEFNELFLITILDHLYSCLFGTFLCNCEQQRFKEAWGAGTQRARGSLRSR

SEQ ID NO: 54628 - protein, 185 aa, Homo sapiens
  Payload ID: 10786
  Gene Symbol: MTMR1
  Gene Name: myotubularin related protein 1
  ENSP ID: ENSP00000436957
MDRPAAAAAAGCEGGGGPNPGPAGGRRPPRAAGGATAGSRQPSVETLDSPTGSHVEWCKQLIAATISSQISGSVTSENVSRDYKEIQEEHNGYPSEAEADQALRDGNKLAQMEEAPLFPGESIKAIVKDVMYICPFMGAVSGTLTVTDFKLYFKNVERDPHFILDVPLGVISRVEKIGAQSHGDN

SEQ ID NO: 54629 - protein, 363 aa, Homo sapiens
  Payload ID: 10786
  Gene Symbol: MTMR1
  Gene Name: myotubularin related protein 1
  ENSP ID: ENSP00000445281
MDRPAAAAAAGCEGGGGPNPGPAGGRRPPRAAGGATAGSRQPSVETLDSPTGSHVEWCKQLIAATISSQISGSVTSENVSRDYKALRDGNKLAQMEEAPLFPGESIKAIVKDVMYICPFMGAVSGTLTVTDFKLYFKNVERDPHFILDVPLGVISRVEKIGAQSHGDNSCGIEIVCKDMRNLRLAYKQEEQSKLGIFENLNKHAFPLSNGQALFAFSYKEKFPINGWKVYDPVSEYKRQGLPNESWKISKINSNYEFCDTYPAIIVVPTSVKDDDLSKVAAFRAKGRVPVLSWIHPESQATITRCSQPLVGPNDKRCKEDEKYLQTIMDANAQSHKLIIFDARQNSVADTNKLWYQDTASLME

SEQ ID NO: 54630 - protein, 777 aa, Homo sapiens
  Payload ID: 10787
  Gene Symbol: MTMR10
  Gene Name: myotubularin related protein 10
  Uniprot ID: Q9NXD2
  ENSP ID: ENSP00000402537
MFSLKPPKPTFRSYLLPPPQTDDKINSEPKIKKLEPVLLPGEIVVNEVNFVRKCIATDTSQYDLWGKLICSNFKISFITDDPMPLQKFHYRNLLLGEHDVPLTCIEQIVTVNDHKRKQKVLGPNQKLKFNPTELIIYCKDFRIVRFRFDESGPESAKKVCLAIAHYSQPTDLQLLFAFEYVGKKYHNSANKINGIPSGDGGGGGGGGNGAGGGSSQKTPLFETYSDWDREIKRTGASGWRVCSINEGYMISTCLPEYIVVPSSLADQDLKIFSHSFVGRRMPLWCWSHSNGSALVRMALIKDVLQQRKIDQRICNAITKSHPQRSDVYKSDLDKTLPNIQEVQAAFVKLKQLCVNEPFEETEEKWLSSLENTRWLEYVRAFLKHSAELVYMLESKHLSVVLQEEEGRDLSCCVASLVQVMLDPYFRTITGFQSLIQKEWVMAGYQFLDRCNHLKRSEKESPLFLLFLDATWQLLEQYPAAFEFSETYLAVLYDSTRISLFGTFLFNSPHQRVKQSTEFAISKNIQLGDEKGLKFPSVWDWSLQFTAKDRTLFHNPFYIGKSTPCIQNGSVKSFKRTKKSYSSTLRGMPSALKNGIISDQELLPRRNSLILKPKPDPAQQTDSQNSDTEQYFREWFSKPANLHGVILPRVSGTHIKLWKLCYFRWVPEAQISLGGSITAFHKLSLLADEVDVLSRMLRQQRSGPLEACYGELGQSRMYFNASGPHHTDTSGTPEFLSSSFPFSPVGNLCRRSILGTPLSKFLSGAKIWLSTETLANED

SEQ ID NO: 54631 - protein, 86 aa, Homo sapiens
  Payload ID: 10787
  Gene Symbol: MTMR10
  Gene Name: myotubularin related protein 10
  ENSP ID: ENSP00000455869
  MOD_RES (1)..(1): Any amino acid
XLIIYCKDFRIVRFRFDESGPESAKKQTKLMEFPQEMEEEEEEEVMELVVAAARKLHSLKLTRIGTEKSRGQVLPGGEFVLLTRVT

SEQ ID NO: 54632 - protein, 50 aa, Homo sapiens
  Payload ID: 10787
  Gene Symbol: MTMR10
  Gene Name: myotubularin related protein 10
  ENSP ID: ENSP00000455903
MFSLKPPKPTFRSYLLPPPQTDDKINSEPKIKKLEPVLLPEIPLQKPSSW

SEQ ID NO: 54633 - protein, 451 aa, Homo sapiens
  Payload ID: 10787
  Gene Symbol: MTMR10
  Gene Name: myotubularin related protein 10
  Uniprot ID: Q9NXD2
  ENSP ID: ENSP00000457390
MPLQKFHYRNLLLGEHDVPLTCIEQIVTVNDHKRKQKVLGPNQKLKFNPTELIIYCKDFRIVRFRFDESGPESAKKVCLAIAHYSQPTDLQLLFAFEYVGKKYHNSANKINGIPSGDGGGGGGGGNGAGGGSSQKTPLFETYSDWDREIKRTGASGWRVCSINEGYMISTCLPEYIVVPSSLADQDLKIFSHSFVGRRMPLWCWSHSNGSALVRMALIKDVLQQRKIDQRICNAITKSHPQRSDVYKSDLDKTLPNIQEVQAAFVKLKQLCVNEPFEETEEKWLSSLENTRWLEYVRAFLKHSAELVYMLESKHLSVVLQEEEGRDLSCCVASLVQVMLDPYFRTITGFQSLIQKEWVMAGYQFLDRCNHLKRSEKESPLFLLFLDATWQLLEQYPAAFEFSETYLAVLYDSTRISLFGTFLFNSPHQRVKQSTVSRIKSCTKQDYFPSRV

SEQ ID NO: 54634 - protein, 190 aa, Homo sapiens
  Payload ID: 10787
  Gene Symbol: MTMR10
  Gene Name: myotubularin related protein 10
  ENSP ID: ENSP00000457781
MFSLKPPKPTFRSYLLPPPQTDDKINSEPKIKKLEPVLLPGEIVVNEVNFVRKCIATDTSQYDLWGKLICSNFKISFITDDPMPLQKFHYRNLLLGEHDVPLTCIEQIVTVNDHKRKQKVLGPNQKLKFNPTELIIYCKDFRIVRFRFDESGPESAKKVCLAIAHYSQPTDLQLLFAFEYVGKKYHNSEA

SEQ ID NO: 54635 - protein, 303 aa, Homo sapiens
  Payload ID: 10787
  Gene Symbol: MTMR10
  Gene Name: myotubularin related protein 10
  ENSP ID: ENSP00000457873
ASGWRVCSINEGYMISTCLPEYIVVPSSLADQDLKIFSHSFVGRRMPLWCWSHSNGSALVRMALIKDVLQQRKIDQRICNAITKSHPQRSDVYKSDLDKTLPNIQEVQAAFVKLKQLCVNEPFEETEEKWLSSLENTRWLEYVRAFLKHSAELVYMLESKHLSVVLQEEEGRDLSCCVASLVQVMLDPYFRTITGFQSLIQKEWVMAGYQFLDRCNHLKRSEKESPLFLLFLDATWQLLEQYPAAFEFSETYLAVLYDSTRISLFGTFLFNSPHQRVKQSTDKKLYKTRLFSFTSLKFLVTIH

SEQ ID NO: 54636 - protein, 218 aa, Homo sapiens
  Payload ID: 10787
  Gene Symbol: MTMR10
  Gene Name: myotubularin related protein 10
  Uniprot ID: Q9NXD2
  ENSP ID: ENSP00000457903
MFSLKPPKPTFRSYLLPPPQTDDKINSEPKIKKLEPVLLPGEIVVNEVNFVRKCIATDTSQYDLWGKLICSNFKISFITDDPMPLQKFHYRNLLLGEHDVPLTCIEQIVTVNDHKRKQKVLGPNQKLKFNPTELIIYCKDFRIVRFRFDESGPESAKKQTKLMEFPQEMEEEEEEEVMELVVAAARKLHSLKLTRIGTEKSRGQVLPGGEFVLLTRVT

SEQ ID NO: 54637 - protein, 777 aa, Homo sapiens; identical to SEQ ID NO: 54630
  Payload ID: 10787
  Gene Symbol: MTMR10
  Gene Name: myotubularin related protein 10
  Uniprot ID: Q9NXD2
  ENSP ID: ENSP00000484437

SEQ ID NO: 54638 - protein, 50 aa, Homo sapiens; identical to SEQ ID NO: 54632
  Payload ID: 10787
  Gene Symbol: MTMR10
  Gene Name: myotubularin related protein 10
  ENSP ID: ENSP00000486566

SEQ ID NO: 54639 - protein, 640 aa, Homo sapiens
  Payload ID: 10788
  Gene Symbol: MTMR11
  Gene Name: myotubularin related protein 11
  Uniprot ID: A4FU01
  ENSP ID: ENSP00000358136
MPPRVTFQPCGWQWNQDTPLNSEYDFALVNIGRLEAVSGLSRVQLLRPGSLHKFIPEEILIHGRDFRLLRVGFEAGGLEPQAFQVTMAIVQARAQSNQAQQYSGITLSKAGQGSGSRKPPIPLMETAEDWETERKKQAARGWRVSTVNERFDVATSLPRYFWVPNRILDSEVRRAFGHFHQGRGPRLSWHHPGGSDLLRCGGFYTASDPNKEDIRAVELMLQAGHSDVVLVDTMDELPSLADVQLAHLRLRALCLPDSSVAEDKWLSALEGTRWLDYVRACLRKASDISVLVTSRVRSVILQERGDRDLNGLLSSLVQLLSAPEARTLFGFQSLVQREWVAAGHPFLTRLGGTGASEEAPVFLLFLDCVWQLLQQFPADFEFSEFFLLALHDSVRVPDTLTFLRNTPWERGKQSGQLNSYTQVYTPGYSQPPAGNSFNLQLSVWDWDLRYSNAQILQFQNPGYDPEHCPDSWLPRPQPSFMVPGPPSSVWLFSRGALTPLNQLCPWRDSPSLLAVSSRWLPRPAISSESLADQEWGLPSHWGACPLPPGLLLPGYLGPQIRLWRRCYLRGRPEVQMGLSAPTISGLQDELSHLQELLRKWTPRISPEDHSKKRDPHTILNPTEIAGILKGQSHPFWITRC

SEQ ID NO: 54640 - protein, 709 aa, Homo sapiens
  Payload ID: 10788
  Gene Symbol: MTMR11
  Gene Name: myotubularin related protein 11
  Uniprot ID: A4FU01
  ENSP ID: ENSP00000391668
MWWGGRGQSFNIAPQKEEPEMGSVQENRMPEPRSRQPSSCLASRCLPGEQILAWAPGVRKGLEPELSGTLICTNFRVTFQPCGWQWNQDTPLNSEYDFALVNIGRLEAVSGLSRVQLLRPGSLHKFIPEEILIHGRDFRLLRVGFEAGGLEPQAFQVTMAIVQARAQSNQAQQYSGITLSKAGQGSGSRKPPIPLMETAEDWETERKKQAARGWRVSTVNERFDVATSLPRYFWVPNRILDSEVRRAFGHFHQGRGPRLSWHHPGGSDLLRCGGFYTASDPNKEDIRAVELMLQAGHSDVVLVDTMDELPSLADVQLAHLRLRALCLPDSSVAEDKWLSALEGTRWLDYVRACLRKASDISVLVTSRVRSVILQERGDRDLNGLLSSLVQLLSAPEARTLFGFQSLVQREWVAAGHPFLTRLGGTGASEEAPVFLLFLDCVWQLLQQFPADFEFSEFFLLALHDSVRVPDTLTFLRNTPWERGKQSGQLNSYTQVYTPGYSQPPAGNSFNLQLSVWDWDLRYSNAQILQFQNPGYDPEHCPDSWLPRPQPSFMVPGPPSSVWLFSRGALTPLNQLCPWRDSPSLLAVSSRWLPRPAISSESLADQEWGLPSHWGACPLPPGLLLPGYLGPQIRLWRRCYLRGRPEVQMGLSAPTISGLQDELSHLQELLRKWTPRISPEDHSKKRDPHTILNPTEIAGILKGRAEGDLG

SEQ ID NO: 54641 - protein, 637 aa, Homo sapiens
  Payload ID: 10789
  Gene Symbol: MTMR12
  Gene Name: myotubularin related protein 12
  Uniprot ID: Q9C0I1
  ENSP ID: ENSP00000264934
MLGKGVVGGGGGTKAPKPSFVSYVRPEEIHTNEKEVTEKEVTLHLLPGEQLLCEASTVLKYVQEDSCQHGVYGRLVCTDFKIAFLGDDESALDNDETQFKNKVIGENDITLHCVDQIYGVFDEKKKTLFGQLKKYPEKLIIHCKDLRVFQFCLRYTKEEEVKRIVSGIIHHTQAPKLLKRLFLFSYATAAQNNTVTDPKNHTVMFDTLKDWCWELERTKGNMKYKAVSVNEGYKVCERLPAYFVVPTPLPEENVQRFQGHGIPIWCWSCHNGSALLKMSALPKEQDDGILQIQKSFLDGIYKTIHRPPYEIVKTEDLSSNFLSLQEIQTAYSKFKQLFLIDNSTEFWDTDIKWFSLLESSSWLDIIRRCLKKAIEITECMEAQNMNVLLLEENASDLCCLISSLVQLMMDPHCRTRIGFQSLIQKEWVMGGHCFLDRCNHLRQNDKEEHQRQLSLPLTQSKSSPKRGFFREETDHLIKNLLGKRISKLINSSDELQDNFREFYDSWHSKSTDYHGLLLPHIEGPEIKVWAQRYLRWIPEAQILGGGQVATLSKLLEMMEEVQSLQEKIDERHHSQQAPQAEAPCLLRNSARLSSLFPFALLQRHSSKPVLPTSGWKALGDEDDLAKREDEFVDLGDV

SEQ ID NO: 54642 - protein, 693 aa, Homo sapiens
  Payload ID: 10789
  Gene Symbol: MTMR12
  Gene Name: myotubularin related protein 12
  Uniprot ID: Q9C0I1
  ENSP ID: ENSP00000280285
MLGKGVVGGGGGTKAPKPSFVSYVRPEEIHTNEKEVTEKEVTLHLLPGEQLLCEASTVLKYVQEDSCQHGVYGRLVCTDFKIAFLGDDESALDNDETQFKNKVIGENDITLHCVDQIYGVFDEKKKTLFGQLKKYPEKLIIHCKDLRVFQFCLRYTKEEEVKRIVSGIIHHTQAPKLLKRLFLFSYATAAQNNTVTDPKNHTVMFDTLKDWCWELERTKGNMKYKAVSVNEGYKVCERLPAYFVVPTPLPEENVQRFQGHGIPIWCWSCHNGSALLKMSALPKEQDDGILQIQKSFLDGIYKTIHRPPYEIVKTEDLSSNFLSLQEIQTAYSKFKQLFLIDNSTEFWDTDIKWFSLLESSSWLDIIRRCLKKAIEITECMEAQNMNVLLLEENASDLCCLISSLVQLMMDPHCRTRIGFQSLIQKEWVMGGHCFLDRCNHLRQNDKEEVPVFLLFLDCVWQLVHQHPPAFEFTETYLTVLSDSLYIPIFSTFFFNSPHQKDTNMHQRQLSLPLTQSKSSPKRGFFREETDHLIKNLLGKRISKLINSSDELQDNFREFYDSWHSKSTDYHGLLLPHIEGPEIKVWAQRYLRWIPEAQILGGGQVATLSKLLEMMEEVQSLQEKIDERHHSQQAPQAEAPCLLRNSARLSSLFPFALLQRHSSKPVLPTSGWKALGDEDDLAKREDEFVDLGDV

SEQ ID NO: 54643 - protein, 747 aa, Homo sapiens
  Payload ID: 10789
  Gene Symbol: MTMR12
  Gene Name: myotubularin related protein 12
  Uniprot ID: Q9C0I1
  ENSP ID: ENSP00000371577
MLGKGVVGGGGGTKAPKPSFVSYVRPEEIHTNEKEVTEKEVTLHLLPGEQLLCEASTVLKYVQEDSCQHGVYGRLVCTDFKIAFLGDDESALDNDETQFKNKVIGENDITLHCVDQIYGVFDEKKKTLFGQLKKYPEKLIIHCKDLRVFQFCLRYTKEEEVKRIVSGIIHHTQAPKLLKRLFLFSYATAAQNNTVTDPKNHTVMFDTLKDWCWELERTKGNMKYKAVSVNEGYKVCERLPAYFVVPTPLPEENVQRFQGHGIPIWCWSCHNGSALLKMSALPKEQDDGILQIQKSFLDGIYKTIHRPPYEIVKTEDLSSNFLSLQEIQTAYSKFKQLFLIDNSTEFWDTDIKWFSLLESSSWLDIIRRCLKKAIEITECMEAQNMNVLLLEENASDLCCLISSLVQLMMDPHCRTRIGFQSLIQKEWVMGGHCFLDRCNHLRQNDKEEVPVFLLFLDCVWQLVHQHPPAFEFTETYLTVLSDSLYIPIFSTFFFNSPHQKDTNMGREGQDTQSKPLNLLTVWDWSVQFEPKAQTLLKNPLYVEKPKLDKGQRKGMRFKHQRQLSLPLTQSKSSPKRGFFREETDHLIKNLLGKRISKLINSSDELQDNFREFYDSWHSKSTDYHGLLLPHIEGPEIKVWAQRYLRWIPEAQILGGGQVATLSKLLEMMEEVQSLQEKIDERHHSQQAPQAEAPCLLRNSARLSSLFPFALLQRHSSKPVLPTSGWKALGDEDDLAKREDEFVDLGDV

SEQ ID NO: 54644 - protein, 38 aa, Homo sapiens
  Payload ID: 10789
  Gene Symbol: MTMR12
  Gene Name: myotubularin related protein 12
  ENSP ID: ENSP00000426028
MLGKGVVGGGGGTKAPKPSFVSYVRPEVNSCFVKPAQY

SEQ ID NO: 54645 - protein, 39 aa, Homo sapiens
  Payload ID: 10789
  Gene Symbol: MTMR12
  Gene Name: myotubularin related protein 12
  ENSP ID: ENSP00000426912
MLGKGVVGGGGGTKAPKPSFVSYVRPEVLLCCPDWNAVV

SEQ ID NO: 54646 - protein, 650 aa, Homo sapiens
  Payload ID: 10790
  Gene Symbol: MTMR14
  Gene Name: myotubularin related protein 14
  Uniprot ID: Q8NCE2
  ENSP ID: ENSP00000296003
MAGARAAAAAASAGSSASSGNQPPQELGLGELLEEFSRTQYRAKDGSGTGGSKVERIEKRCLELFGRDYCFSVIPNTNGDICGHYPRHIVFLEYESSEKEKDTFESTVQVSKLQDLIHRSKMARCRGRFVCPVILFKGKHICRSATLAGWGELYGRSGYNYFFSGGADDAWADVEDVTEEDCALRSGDTHLFDKVRGYDIKLLRYLSVKYICDLMVENKKVKFGMNVTSSEKVDKAQRYADFTLLSIPYPGCEFFKEYKDRDYMAEGLIFNWKQDYVDAPLSIPDFLTHSLNIDWSQYQCWDLVQQTQNYLKLLLSLVNSDDDSGLLVHCISGWDRTPLFISLLRLSLWADGLIHTSLKPTEILYLTVAYDWFLFGHMLVDRLSKGEEIFFFCFNFLKHITSEEFSALKTQRRKSLPARDGGFTLEDICMLRRKDRGSTTSLGSDFSLVMESSPGATGSFTYEAVELVPAGAPTQAAWRKSHSSSPQSVLWNRPQPSEDRLPSQQGLAEARSSSSSSSNHSDNFFRMGSSPLEVPKPRSVDHPLPGSSLSTDYGSWQMVTGCGSIQERAVLHTDSSLPFSFPDELPNSCLLAALSDRETRLQEVRSAFLAAYSSTVGLRAVAPSPSGAIGGLLEQFARGVGLRSISSNAL

SEQ ID NO: 54647 - protein, 598 aa, Homo sapiens
  Payload ID: 10790
  Gene Symbol: MTMR14
  Gene Name: myotubularin related protein 14
  Uniprot ID: Q8NCE2
  ENSP ID: ENSP00000323462
MAGARAAAAAASAGSSASSGNQPPQELGLGELLEEFSRTQYRAKDGSGTGGSKVERIEKRCLELFGRDYCFSVIPNTNGDICGHYPRHIVFLEYESSEKEKDTFESTVQVSKLQDLIHRSKMARCRGRFVCPVILFKGKHICRSATLAGWGELYGRSGYNYFFSGGADDAWADVEDVTEEDCALRSGDTHLFDKVRGYDIKLLRYLSVKYICDLMVENKKVKFGMNVTSSEKVDKAQRYADFTLLSIPYPGCEFFKEYKDRDYMAEGLIFNWKQDYVDAPLSIPDFLTHSLNIDWSQYQCWDLVQQTQNYLKLLLSLVNSDDDSGLLVHCISGWDRTPLFISLLRLSLWADGLIHTSLKPTEILYLTVAYDWFLFGHMLVDRLSKGEEIFFFCFNFLKHITSEEFSALKTQRRKSLPARDGGFTLEDICMLRRKDRGSTTSLGSDFSLVMESSPGATGSFTYEAVELVPAGAPTQAAWRKSHSSSPQSVLWNRPQPSEDRLPSQQGLAEARSSSSSSSNHSDNFFRMGSSPLEVPKPRLAALSDRETRLQEVRSAFLAAYSSTVGLRAVAPSPSGAIGGLLEQFARGVGLRSISSNAL

SEQ ID NO: 54648 - protein, 538 aa, Homo sapiens
  Payload ID: 10790
  Gene Symbol: MTMR14
  Gene Name: myotubularin related protein 14
  Uniprot ID: Q8NCE2
  ENSP ID: ENSP00000334070
MAGARAAAAAASAGSSASSGNQPPQELGLGELLEEFSRTQYRAKDGSGTGGSKVERIEKRCLELFGRDYCFSVIPNTNGDICGHYPRHIVFLEYESSEKEKDTFESTVQVSKLQDLIHRSKMARCRGRFVCPVILFKGKHICRSATLAGWGELYGRSGYNYFFSGGADDAWADVEDVTEEDCALRSGDTHLFDKVRGYDIKLLRYLSVKYICDLMVENKKVKFGMNVTSSEKVDKAQRYADFTLLSIPYPGCEFFKEYKDRDYMAEGLIFNWKQDYVDAPLSIPDFLTHSLNIDWSQYQCWDLVQQTQNYLKLLLSLVNSDDDSGLLVHCISGWDRTPLFISLLRLSLWADGLIHTSLKPTEILYLTVAYDWFLFGHMLVDRLSKGEEIFFFCFNFLKHITSEEFSALKTQRRKSLPARDGGFTLEDICMLRRKDRGSTTSLGSDFSLVMESSPGATGSFTYEAVELVPAGAPTQAAWLAALSDRETRLQEVRSAFLAAYSSTVGLRAVAPSPSGAIGGLLEQFARGVGLRSISSNAL

SEQ ID NO: 54649 - protein, 154 aa, Homo sapiens
  Payload ID: 10790
  Gene Symbol: MTMR14
  Gene Name: myotubularin related protein 14
  ENSP ID: ENSP00000388746
MALLILLLVPLLLPDSGSEAYSGCEFFKEYKDRDYMAEGLIFNWKQDYVDAPLSIPDFLTHSLNIDWSQYQCWDLVQQTQNYLKLLLSLVNSDDDSGLLVHCISGWDRTPLFISLLRLSLWADGLIHTSLKPTEILYLTVAYDWFLFGHMLVDR

SEQ ID NO: 54650 - protein, 188 aa, Homo sapiens
  Payload ID: 10790
  Gene Symbol: MTMR14
  Gene Name: myotubularin related protein 14
  ENSP ID: ENSP00000392690
MAGARAAAAAASAGSSASSGNQPPQELGLGELLEEFSRTQYRAKDGSGTGGSKVERIEKRCLELFGRDYCFSVIPNTNGDICGHYPRHIVFLEYESSEKEKDTFESTVQVSKLQDLIHRSKMARCRGRFVCPVILFKGKGVQMMPGQMWRTSRRRTVLFEVVTRIFLIRSEAMTSSCFDTCQSNTSVT

SEQ ID NO: 54651 - protein, 60 aa, Homo sapiens
  Payload ID: 10790
  Gene Symbol: MTMR14
  Gene Name: myotubularin related protein 14
  ENSP ID: ENSP00000392935
MDAQATTIFSQGVQMMPGQMWRTSRRRTVLFEVVTRIFLIRSEAMTSSCFDTCQSNTSVT

SEQ ID NO: 54652 - protein, 292 aa, Homo sapiens
  Payload ID: 10790
  Gene Symbol: MTMR14
  Gene Name: myotubularin related protein 14
  ENSP ID: ENSP00000401993
MAGARAAAAAASAGSSASSGNQPPQELGLGELLEEFSRTQYRAKDGSGTGGSKCWDLVQQTQNYLKLLLSLVNSDDDSGLLVHCISGWDRTPLFISLLRLSLWADGLIHTSLKPTEILYLTVAYDWFLFGHMLVDRLSKGEEIFFFCFNFLKHITSEEFSALKTQRRKSLPARDGGFTLEDICMLRRKDRGSTTSLGSDFSLVMESSPGATGSFTYEAVELVPAGAPTQAAWLAALSDRETRLQEVRSAFLAAYSSTVGLRAVAPSPSGAIGGLLEQFARGVGLRSISSNAL

SEQ ID NO: 54653 - protein, 71 aa, Homo sapiens
  Payload ID: 10790
  Gene Symbol: MTMR14
  Gene Name: myotubularin related protein 14
  ENSP ID: ENSP00000408813
MAGARAAAAAASAGSSASSGNQPPQELGLGELLEEFSRTQYRAKDGSGTGGSKSSYRQTWRASCQLRPSPP

SEQ ID NO: 54654 - protein, 187 aa, Homo sapiens
  Payload ID: 10790
  Gene Symbol: MTMR14
  Gene Name: myotubularin related protein 14
  ENSP ID: ENSP00000410761
MAGARAAAAAASAGSSASSGNQPPQELGLGELLEEFSRTQYRAKDGSGTGGSKVERIEKRCLELFGRDYCFSVIPNTNGDICGHYPRHIVFLEYESSEKEKDTSGDTHLFDKVRGYDIKLLRYLSVKYICDLMVENKKVKFGMNVTSSEKVDKAQRYADFTLLSIPYPVLGSGATNTKLPEAAAFLS

SEQ ID NO: 54655 - protein, 36 aa, Homo sapiens
  Payload ID: 10790
  Gene Symbol: MTMR14
  Gene Name: myotubularin related protein 14
  ENSP ID: ENSP00000411417
MSHCAWPETELELDVGEPVKEPLADLTRKGLRVPYR

SEQ ID NO: 54656 - protein, 158 aa, Homo sapiens
  Payload ID: 10790
  Gene Symbol: MTMR14
  Gene Name: myotubularin related protein 14
  ENSP ID: ENSP00000412644
MAGARAAAAAASAGSSASSGNQPPQELGLGELLEEFSRTQYRAKDGSGTGGSKVERIEKRCLELFGRDYCFSVIPNTNGDICGHYPRHIVFLEYESSEKEKDTFESTVQGVQMMPGQMWRTSRRRTVLFEVVTRIFLIRSEAMTSSCFDTCQSNTSVT

SEQ ID NO: 54657 - protein, 520 aa, Homo sapiens
  Payload ID: 10790
  Gene Symbol: MTMR14
  Gene Name: myotubularin related protein 14
  ENSP ID: ENSP00000478236
MAGARAAAAAASAGSSASSGNQPPQELGLGELLEEFSRTQYRAKDGSGTGGSKVERIEKRCLELFGRDYCFSVIPNTNGDICGHYPRHIVFLEYESSEKEKDTFESTVQVSKLQDLIHRSKMARCRGRFVCPVILFKGKHICRSATLAGWGELYGRSGYNYFFSGGADDAWADVEDVTEEDCALRSGDTHLFDKVRGYDIKLLRYLSVKYICDLMVENKKVKFGMNVTSSEKVDKAQRYADFTLLSIPYPGCEFFKEYKDRDYMAEGLIFNWKQDYVDAPLSIPDFLTHSLNIDWSQYQCWDLVQQTQNYLKLLLSLVNSDDDSGLLVHCISGWDRTPLFISLLRLSLWADGLIHTSLKPTEILYLTVAYDWFLFGHMLVDRLSKGEEIFFFCFNFLKHITSEEFSALKTQRRKSLPARDGGFTLEDICMLRRKDRGSTTSLGSDFSLVMESSPGATGSFTYGRGAGPSRSANSGSLEEEPLILSTECPLEPATTLRGPLAFPAGAGGSQVFQLLFLKPF

SEQ ID NO: 54658 - protein, 571 aa, Homo sapiens
  Payload ID: 10791
  Gene Symbol: MTMR2
  Gene Name: myotubularin related protein 2
  Uniprot ID: Q13614
  ENSP ID: ENSP00000343737
MEEPPLLPGENIKDMAKDVTYICPFTGAVRGTLTVTNYRLYFKSMERDPPFVLDASLGVINRVEKIGGASSRGENSYGLETVCKDIRNLRFAHKPEGRTRRSIFENLMKYAFPVSNNLPLFAFEYKEVFPENGWKLYDPLLEYRRQGIPNESWRITKINERYELCDTYPALLVVPANIPDEELKRVASFRSRGRIPVLSWIHPESQATITRCSQPMVGVSGKRSKEDEKYLQAIMDSNAQSHKIFIFDARPSVNAVANKAKGGGYESEDAYQNAELVFLDIHNIHVMRESLRKLKEIVYPNIEETHWLSNLESTHWLEHIKLILAGALRIADKVESGKTSVVVHCSDGWDRTAQLTSLAMLMLDGYYRTIRGFEVLVEKEWLSFGHRFQLRVGHGDKNHADADRSPVFLQFIDCVWQMTRQFPTAFEFNEYFLITILDHLYSCLFGTFLCNSEQQRGKENLPKRTVSLWSYINSQLEDFTNPLYGSYSNHVLYPVASMRHLELWVGYYIRWNPRMKPQEPIHNRYKELLAKRAELQKKVEELQREISNRSTSSSERASSPAQCVTPVQTVV

SEQ ID NO: 54659 - protein, 643 aa, Homo sapiens
  Payload ID: 10791
  Gene Symbol: MTMR2
  Gene Name: myotubularin related protein 2
  Uniprot ID: Q13614
  ENSP ID: ENSP00000345752
MEKSSSCESLGSQPAAARPPSVDSLSSASTSHSENSVHTKSASVVSSDSISTSADNFSPDLRVLRESNKLAEMEEPPLLPGENIKDMAKDVTYICPFTGAVRGTLTVTNYRLYFKSMERDPPFVLDASLGVINRVEKIGGASSRGENSYGLETVCKDIRNLRFAHKPEGRTRRSIFENLMKYAFPVSNNLPLFAFEYKEVFPENGWKLYDPLLEYRRQGIPNESWRITKINERYELCDTYPALLVVPANIPDEELKRVASFRSRGRIPVLSWIHPESQATITRCSQPMVGVSGKRSKEDEKYLQAIMDSNAQSHKIFIFDARPSVNAVANKAKGGGYESEDAYQNAELVFLDIHNIHVMRESLRKLKEIVYPNIEETHWLSNLESTHWLEHIKLILAGALRIADKVESGKTSVVVHCSDGWDRTAQLTSLAMLMLDGYYRTIRGFEVLVEKEWLSFGHRFQLRVGHGDKNHADADRSPVFLQFIDCVWQMTRQFPTAFEFNEYFLITILDHLYSCLFGTFLCNSEQQRGKENLPKRTVSLWSYINSQLEDFTNPLYGSYSNHVLYPVASMRHLELWVGYYIRWNPRMKPQEPIHNRYKELLAKRAELQKKVEELQREISNRSTSSSERASSPAQCVTPVQTVV

SEQ ID NO: 54660 - protein, 571 aa, Homo sapiens; identical to SEQ ID NO: 54658
  Payload ID: 10791
  Gene Symbol: MTMR2
  Gene Name: myotubularin related protein 2
  Uniprot ID: Q13614
  ENSP ID: ENSP00000376915

SEQ ID NO: 54661 - protein, 571 aa, Homo sapiens; identical to SEQ ID NO: 54658
  Payload ID: 10791
  Gene Symbol: MTMR2
  Gene Name: myotubularin related protein 2
  Uniprot ID: Q13614
  ENSP ID: ENSP00000386882

SEQ ID NO: 54662 - protein, 556 aa, Homo sapiens
  Payload ID: 10791
  Gene Symbol: MTMR2
  Gene Name: myotubularin related protein 2
  ENSP ID: ENSP00000396020
MEEPPLLPGENIKDMAKDVTYICPFTGAVRGTLTVTNYRLYFKSMERDPPFVLDASLGVINRVEKIGGASSRGENSYGLETVCKDIRNLRFAHKPEGRTRRSIFENLMKYAFPVSNNLPLFAFEYKEVFPENGWKLYDPLLEYRRQGIPNESWRITKINERYELCDTYPALLVVPANIPDEELKRVASFRSRGRIPVLSWIHPESQATITRCSQPMVGVSGKRSKEDEKYLQAIMDSNAQSHKIFIFDARPSVNAVANKAKGGGYESEDAYQNAELVFLDIHNIHVMRESLRKLKEIVYPNIEETHWLSNLESTHWLEHIKLILAGALRIADKVESGKTSVVVHCSDGWDRTAQLTSLAMLMLDGYYRTIRGFEVLVEKEWLSFGHRFQLRVGHGDKNHADADRSPVFLQFIDCVWQMTRQFPTAFEFNEYFLITILDHLYSCLFGTFLCNSEQQRGKENLPKRTVSLWSYINSQLEDFTNPLYGSYSNHVLYPVASMRHLELWVGYYIRWNPRMKPQEPIHNRYKELLAKRAELQKKVEELQREISNRSTSSSER

SEQ ID NO: 54663 - protein, 1161 aa, Homo sapiens
  Payload ID: 10792
  Gene Symbol: MTMR3
  Gene Name: myotubularin related protein 3
  Uniprot ID: Q13615
  ENSP ID: ENSP00000307271
MDEETRHSLECIQANQIFPRKQLIREDENLQVPFLELHGESTEFVGRAEDAIIALSNYRLHIKFKESLVNVPLQLIESVECRDIFQLHLTCKDCKVIRCQFSTFEQCQEWLKRLNNAIRPPAKIEDLFSFAYHAWCMEVYASEKEQHGDLCRPGEHVTSRFKNEVERMGFDMNNAWRISNINEKYKLCGSYPQELIVPAWITDKELESVSSFRSWKRIPAVIYRHQSNGAVIARCGQPEVSWWGWRNADDEHLVQSVAKACASDSRSSGSKLSTRNTSRDFPNGGDLSDVEFDSSLSNASGAESLAIQPQKLLILDARSYAAAVANRAKGGGCECPEYYPNCEVVFMGMANIHSIRRSFQSLRLLCTQMPDPGNWLSALESTKWLHHLSVLLKSALLVVHAVDQDQRPVLVHCSDGWDRTPQIVALAKLLLDPYYRTIEGFQVLVEMEWLDFGHKFADRCGHGENSDDLNERCPVFLQWLDCVHQLQRQFPCSFEFNEAFLVKLVQHTYSCLFGTFLCNNAKERGEKHTQERTCSVWSLLRAGNKAFKNLLYSSQSEAVLYPVCHVRNLMLWSAVYLPCPSPTTPVDDSCAPYPAPGTSPDDPPLSRLPKTRSYDNLTTACDNTVPLASRRCSDPSLNEKWQEHRRSLELSSLAGPGEDPLSADSLGKPTRVPGGAELSVAAGVAEGQMENILQEATKEESGVEEPAHRAGIEIQEGKEDPLLEKESRRKTPEASAIGLHQDPELGDAALRSHLDMSWPLFSQGISEQQSGLSVLLSSLQVPPRGEDSLEVPVEQFRIEEIAEGREEAVLPIPVDAKVGYGTSQSCSLLPSQVPFETRGPNVDSSTDMLVEDKVKSVSGPQGHHRSCLVNSGKDRLPQTMEPSPSETSLVERPQVGSVVHRTSLGSTLSLTRSPCALPLAECKEGLVCNGAPETENRASEQPPGLSTLQMYPTPNGHCANGEAGRSKDSLSRQLSAMSCSSAHLHSRNLHHKWLHSHSGRPSATSSPDQPSRSHLDDDGMSVYTDTIQQRLRQIESGHQQEVETLKKQVQELKSRLESQYLTSSLHFNGDFGDEVMTRWLPDHLAAHCYACDSAFWLASRKHHCRNCGNVFCSSCCNQKVPVPSQQLFEPSRVCKSCYSSLHPTSSSIDLELDKPIAATSN

SEQ ID NO: 54664 - protein, 1062 aa, Homo sapiens
  Payload ID: 10792
  Gene Symbol: MTMR3
  Gene Name: myotubularin related protein 3
  ENSP ID: ENSP00000318070
MEVYASEKEQHGDLCRPGEHVTSRFKNEVERMGFDMNNAWRISNINEKYKLCGSYPQELIVPAWITDKELESVSSFRSWKRIPAVIYRHQSNGAVIARCGQPEVSWWGWRNADDEHLVQSVAKACASDSRSSGSKLSTRNTSRDFPNGGDLSDVEFDSSLSNASGAESLAIQPQKLLILDARSYAAAVANRAKGGGCECPEYYPNCEVVFMGMANIHSIRRSFQSLRLLCTQMPDPGNWLSALESTKWLHHLSVLLKSALLVVHAVDQDQRPVLVHCSDGWDRTPQIVALAKLLLDPYYRTIEGFQVLVEMEWLDFGHKFADRCGHGENSDDLNERCPVFLQWLDCVHQLQRQFPCSFEFNEAFLVKLVQHTYSCLFGTFLCNNAKERGEKHTQERTCSVWSLLRAGNKAFKNLLYSSQSEAVLYPVCHVRNLMLWSAVYLPCPSPTTPVDDSCAPYPAPGTSPDDPPLSRLPKTRSYDNLTTACDNTVPLASRRCSDPSLNEKWQEHRRSLELSSLAGPGEDPLSADSLGKPTRVPGGAELSVAAGVAEGQMENILQEATKEESGVEEPAHRAGIEIQEGKEDPLLEKESRRKTPEASAIGLHQDPELGDAALRSHLDMSWPLFSQGISEQQSGLSVLLSSLQVPPRGEDSLEVPVEQFRIEEIAEGREEAVLPIPVDAKVGYGTSQSCSLLPSQVPFETRGPNVDSSTDMLVEDKVKSVSGPQGHHRSCLVNSGKDRLPQTMEPSPSETSLVERPQVGSVVHRTSLGSTLSLTRSPCALPLAECKEGLVCNGAPETENRASEQPPGLSTLQMYPTPNGHCANGEAGRSKDSLSRQLSAMSCSSAHLHSRNLHHKWLHSHSGRPSATSSPDQPSRSHLDDDGMSVYTDTIQQRLRQIESGHQQEVETLKKQVQELKSRLESQYLTSSLHFNGDFGDEVTSIPDSESNLDQNCLSRCSTEIFSEASWEQVDKQDTEMTRWLPDHLAAHCYACDSAFWLASRKHHCRNCGNVFCSSCCNQKVPVPSQQLFEPSRVCKSCYSSLHPTSSSIDLELDKPIAATSN

SEQ ID NO: 54665 - protein, 1170 aa, Homo sapiens
  Payload ID: 10792
  Gene Symbol: MTMR3
  Gene Name: myotubularin related protein 3
  Uniprot ID: Q13615
  ENSP ID: ENSP00000331649
MDEETRHSLECIQANQIFPRKQLIREDENLQVPFLELHGESTEFVGRAEDAIIALSNYRLHIKFKESLVNVPLQLIESVECRDIFQLHLTCKDCKVIRCQFSTFEQCQEWLKRLNNAIRPPAKIEDLFSFAYHAWCMEVYASEKEQHGDLCRPGEHVTSRFKNEVERMGFDMNNAWRISNINEKYKLCGSYPQELIVPAWITDKELESVSSFRSWKRIPAVIYRHQSNGAVIARCGQPEVSWWGWRNADDEHLVQSVAKACASDSRSSGSKLSTRNTSRDFPNGGDLSDVEFDSSLSNASGAESLAIQPQKLLILDARSYAAAVANRAKGGGCECPEYYPNCEVVFMGMANIHSIRRSFQSLRLLCTQMPDPGNWLSALESTKWLHHLSVLLKSALLVVHAVDQDQRPVLVHCSDGWDRTPQIVALAKLLLDPYYRTIEGFQVLVEMEWLDFGHKFADRCGHGENSDDLNERCPVFLQWLDCVHQLQRQFPCSFEFNEAFLVKLVQHTYSCLFGTFLCNNAKERGEKHTQERTCSVWSLLRAGNKAFKNLLYSSQSEAVLYPVCHVRNLMLWSAVYLPCPSPTTPVDDSCAPYPAPGTSPDDPPLSRLPKTRSYDNLTTACDNTVPLASRRCSDPSLNEKWQEHRRSLELSSLAGPGEDPLSADSLGKPTRVPGGAELSVAAGVAEGQMENILQEATKEESGVEEPAHRAGIEIQEGKEDPLLEKESRRKTPEASAIGLHQDPELGDAALRSHLDMSWPLFSQGISEQQSGLSVLLSSLQVPPRGEDSLEVPVEQFRIEEIAEGREEAVLPIPVDAKVGYGTSQSCSLLPSQVPFETRGPNVDSSTDMLVEDKVKSVSGPQGHHRSCLVNSGKDRLPQTMEPSPSETSLVERPQVGSVVHRTSLGSTLSLTRSPCALPLAECKEGLVCNGAPETENRASEQPPGLSTLQMYPTPNGHCANGEAGRSKDSLSRQLSAMSCSSAHLHSRNLHHKWLHSHSGRPSATSSPDQPSRSHLDDDGMSVYTDTIQQRLRQIESGHQQEVETLKKQVQELKSRLESQYLTSSLHFNGDFGDEVMTRWLPDHLAAHCYACDSAFWLASRKHHCRDTDRVDQTWNCGNVFCSSCCNQKVPVPSQQLFEPSRVCKSCYSSLHPTSSSIDLELDKPIAATSN

SEQ ID NO: 54666 - protein, 1170 aa, Homo sapiens; identical to SEQ ID NO: 54665
  Payload ID: 10792
  Gene Symbol: MTMR3
  Gene Name: myotubularin related protein 3
  Uniprot ID: Q13615
  ENSP ID: ENSP00000384077

SEQ ID NO: 54667 - protein, 1198 aa, Homo sapiens
  Payload ID: 10792
  Gene Symbol: MTMR3
  Gene Name: myotubularin related protein 3
  Uniprot ID: Q13615
  ENSP ID: ENSP00000384651
MDEETRHSLECIQANQIFPRKQLIREDENLQVPFLELHGESTEFVGRAEDAIIALSNYRLHIKFKESLVNVPLQLIESVECRDIFQLHLTCKDCKVIRCQFSTFEQCQEWLKRLNNAIRPPAKIEDLFSFAYHAWCMEVYASEKEQHGDLCRPGEHVTSRFKNEVERMGFDMNNAWRISNINEKYKLCGSYPQELIVPAWITDKELESVSSFRSWKRIPAVIYRHQSNGAVIARCGQPEVSWWGWRNADDEHLVQSVAKACASDSRSSGSKLSTRNTSRDFPNGGDLSDVEFDSSLSNASGAESLAIQPQKLLILDARSYAAAVANRAKGGGCECPEYYPNCEVVFMGMANIHSIRRSFQSLRLLCTQMPDPGNWLSALESTKWLHHLSVLLKSALLVVHAVDQDQRPVLVHCSDGWDRTPQIVALAKLLLDPYYRTIEGFQVLVEMEWLDFGHKFADRCGHGENSDDLNERCPVFLQWLDCVHQLQRQFPCSFEFNEAFLVKLVQHTYSCLFGTFLCNNAKERGEKHTQERTCSVWSLLRAGNKAFKNLLYSSQSEAVLYPVCHVRNLMLWSAVYLPCPSPTTPVDDSCAPYPAPGTSPDDPPLSRLPKTRSYDNLTTACDNTVPLASRRCSDPSLNEKWQEHRRSLELSSLAGPGEDPLSADSLGKPTRVPGGAELSVAAGVAEGQMENILQEATKEESGVEEPAHRAGIEIQEGKEDPLLEKESRRKTPEASAIGLHQDPELGDAALRSHLDMSWPLFSQGISEQQSGLSVLLSSLQVPPRGEDSLEVPVEQFRIEEIAEGREEAVLPIPVDAKVGYGTSQSCSLLPSQVPFETRGPNVDSSTDMLVEDKVKSVSGPQGHHRSCLVNSGKDRLPQTMEPSPSETSLVERPQVGSVVHRTSLGSTLSLTRSPCALPLAECKEGLVCNGAPETENRASEQPPGLSTLQMYPTPNGHCANGEAGRSKDSLSRQLSAMSCSSAHLHSRNLHHKWLHSHSGRPSATSSPDQPSRSHLDDDGMSVYTDTIQQRLRQIESGHQQEVETLKKQVQELKSRLESQYLTSSLHFNGDFGDEVTSIPDSESNLDQNCLSRCSTEIFSEASWEQVDKQDTEMTRWLPDHLAAHCYACDSAFWLASRKHHCRNCGNVFCSSCCNQKVPVPSQQLFEPSRVCKSCYSSLHPTSSSIDLELDKPIAATSN

SEQ ID NO: 54668 - protein, 139 aa, Homo sapiens
  Payload ID: 10792
  Gene Symbol: MTMR3
  Gene Name: myotubularin related protein 3
  ENSP ID: ENSP00000409063
MDEETRHSLECIQANQIFPRKQLIREDENLQVPFLELHGESTEFVGRAEDAIIALSNYRLHIKFKESLVNVPLQLIESVECRDIFQLHLTCKDCKVIRCQFSTFEQCQEWLKRLNNAIRPPAKIEDLFSFAYHAWCMEV

SEQ ID NO: 54669 - protein, 1195 aa, Homo sapiens
  Payload ID: 10793
  Gene Symbol: MTMR4
  Gene Name: myotubularin related protein 4
  Uniprot ID: Q9NYA4
  ENSP ID: ENSP00000325285
MGEEGPPSLEYIQAKDLFPPKELVKEEENLQVPFTVLQGEGVEFLGRAADALIAISNYRLHIKFKDSVINVPLRMIDSVESRDMFQLHISCKDSKVVRCHFSTFKQCQEWLSRLSRATARPAKPEDLFAFAYHAWCLGLTEEDQHTHLCQPGEHIRCRQEAELARMGFDLQNVWRVSHINSNYKLCPSYPQKLLVPVWITDKELENVASFRSWKRIPVVVYRHLRNGAAIARCSQPEISWWGWRNADDEYLVTSIAKACALDPGTRATGGSLSTGNNDTSEACDADFDSSLTACSGVESTAAPQKLLILDARSYTAAVANRAKGGGCECEEYYPNCEVVFMGMANIHAIRNSFQYLRAVCSQMPDPSNWLSALESTKWLQHLSVMLKAAVLVANTVDREGRPVLVHCSDGWDRTPQIVALAKILLDPYYRTLEGFQVLVESDWLDFGHKFGDRCGHQENVEDQNEQCPVFLQWLDSVHQLLKQFPCLFEFNEAFLVKLVQHTYSCLYGTFLANNPCEREKRNIYKRTCSVWALLRAGNKNFHNFLYTPSSDMVLHPVCHVRALHLWTAVYLPASSPCTLGEENMDLYLSPVAQSQEFSGRSLDRLPKTRSMDDLLSACDTSSPLTRTSSDPNLNNHCQEVRVGLEPWHSNPEGSETSFVDSGVGGPQQTVGEVGLPPPLPSSQKDYLSNKPFKSHKSCSPSYKLLNTAVPREMKSNTSDPEIKVLEETKGPAPDPSAQDELGRTLDGIGEPPEHCPETEAVSALSKVISNKCDGVCNFPESSQNSPTGTPQQAQPDSMLGVPSKCVLDHSLSTVCNPPSAACQTPLDPSTDFLNQDPSGSVASISHQEQLSSVPDLTHGEEDIGKRGNNRNGQLLENPRFGKMPLELVRKPISQSQISEFSFLGSNWDSFQGMVTSFPSGEATPRRLLSYGCCSKRPNSKQMRATGPCFGGQWAQREGVKSPVCSSHSNGHCTGPGGKNQMWLSSHPKQVSSTKPVPLNCPSPVPPLYLDDDGLPFPTDVIQHRLRQIEAGYKQEVEQLRRQVRELQMRLDIRHCCAPPAEPPMDYEDDFTCLKESDGSDTEDFGSDHSEDCLSEASWEPVDKKETEVTRWVPDHMASHCYNCDCEFWLAKRRHHCRNCGNVFCAGCCHLKLPIPDQQLYDPVLVCNSCYEHIQVSRARELMSQQLKKPIATASS

SEQ ID NO: 54670 - protein, 112 aa, Homo sapiens
  Payload ID: 10793
  Gene Symbol: MTMR4
  Gene Name: myotubularin related protein 4
  ENSP ID: ENSP00000462869
MSLTARVSCSMLSCFGEEGPPSLEYIQAKDLFPPKELVKEEENLQVPFTVLQGEGVEFLGRAADALIAISNYRLHIKFKDSVINVPLRMIDSVESRDMFQLHISCKDSKVVR

SEQ ID NO: 54671 - protein, 95 aa, Homo sapiens
  Payload ID: 10793
  Gene Symbol: MTMR4
  Gene Name: myotubularin related protein 4
  ENSP ID: ENSP00000463259
MGRGMGEEGPPSLEYIQAKDLFPPKELVKEEENLQVPFTVLQGEGVEFLGRAADALIAISNYRLHIKFKDSVINVPLRMIDSVESRDMFQLHISC

SEQ ID NO: 54672 - protein, 197 aa, Homo sapiens
  Payload ID: 10793
  Gene Symbol: MTMR4
  Gene Name: myotubularin related protein 4
  ENSP ID: ENSP00000463479
MSLTARVSCSMLSCFGEEGPPSLEYIQAKDLFPPKELVKEEENLQVPFTVLQGEGVEFLGRAADALIAISNYRLHIKFKDSVINVPLRMIDSVESRDMFQLHISCKDSKVVRCHFSTFKQCQEWLSRLSRATARPAKPEDLFAFAYHAWCLGLTEEDQHTHLCQPGEHIRCRQEAELARMGFDLQNVWRVSHINSNY

SEQ ID NO: 54673 - protein, 1138 aa, Homo sapiens
  Payload ID: 10793
  Gene Symbol: MTMR4
  Gene Name: myotubularin related protein 4
  ENSP ID: ENSP00000464067
MGEEGPPSLEYIQAKDLFPPKELVKEEENLQVPFTVLQGEGVEFLGRAADALIAISNYRLHIKFKDSVINVPLRMIDSVESRDMFQLHISCKDSKVVRCHFSTFKQCQEWLSRLSRATARPAKPEDLFAFAYHAWCLGLTEEDQHTHLCQPGEHIRCRQEAELARMGFDLQNVWRVSHINSNYKLCPSYPQKLLVPVWITDKELENVASFRSWKRIPVVVYRHLRNGAAIARCSQPEISWWGWRNADDEYLVTSIAKACALDPGTRATGGSLSTGNNDTSEACDADFDSSLTACSGVESTAAPQKLLILDARSYTAAVANRAKGGGCECEEYYPNCEVVFMGMANIHAIRNSFQYLRAVCSQMPDPSNWLSALESTKWLQHLSVMLKAAVLVANTVDREGRPVLVHCSDGWDRTPQIVALAKILLDPYYRTLEGFQVLVESDWLDFGHKFGDRCGHQENVEDQNEQCPVFLQWLDSVHQLLKQFPCLFEFNEAFLVLHPVCHVRALHLWTAVYLPASSPCTLGEENMDLYLSPVAQSQEFSGRSLDRLPKTRSMDDLLSACDTSSPLTRTSSDPNLNNHCQEVRVGLEPWHSNPEGSETSFVDSGVGGPQQTVGEVGLPPPLPSSQKDYLSNKPFKSHKSCSPSYKLLNTAVPREMKSNTSDPEIKVLEETKGPAPDPSAQDELGRTLDGIGEPPEHCPETEAVSALSKVISNKCDGVCNFPESSQNSPTGTPQQAQPDSMLGVPSKCVLDHSLSTVCNPPSAACQTPLDPSTDFLNQDPSGSVASISHQEQLSSVPDLTHGEEDIGKRGNNRNGQLLENPRFGKMPLELVRKPISQSQISEFSFLGSNWDSFQGMVTSFPSGEATPRRLLSYGCCSKRPNSKQMRATGPCFGGQWAQREGVKSPVCSSHSNGHCTGPGGKNQMWLSSHPKQVSSTKPVPLNCPSPVPPLYLDDDGLPFPTDVIQHRLRQIEAGYKQEVEQLRRQVRELQMRLDIRHCCAPPAEPPMDYEDDFTCLKESDGSDTEDFGSDHSEDCLSEASWEPVDKKETEVTRWVPDHMASHCYNCDCEFWLAKRRHHCRNCGNVFCAGCCHLKLPIPDQQLYDPVLVCNSCYEHIQVSRARELMSQQLKKPIATASS

SEQ ID NO: 54674 - protein, 98 aa, Homo sapiens
  Payload ID: 10793
  Gene Symbol: MTMR4
  Gene Name: myotubularin related protein 4
  ENSP ID: ENSP00000464247
MGEEGPPSLEYIQAKDLFPPKELVKEEENLQVPFTVLQGEGVEFLGRAADALIAISNYRLHIKFKDSVINVPLRMIDSVESRDMFQLHISCKDSKVVR

SEQ ID NO: 54675 - protein, 16 aa, Homo sapiens
  Payload ID: 10793
  Gene Symbol: MTMR4
  Gene Name: myotubularin related protein 4
  ENSP ID: ENSP00000464588
MIDSVESRDMFQLHIS

SEQ ID NO: 54676 - protein, 621 aa, Homo sapiens
  Payload ID: 10794
  Gene Symbol: MTMR6
  Gene Name: myotubularin related protein 6
  Uniprot ID: Q9Y217
  ENSP ID: ENSP00000371221
MEHIRTTKVEQVKLLDRFSTSNKSLTGTLYLTATHLLFIDSHQKETWILHHHIASVEKLALTTSGCPLVIQCKNFRTVHFIVPRERDCHDIYNSLLQLSKQAKYEDLYAFSYNPKQNDSERLQGWQLIDLAEEYKRMGVPNSHWQLSDANRDYKICETYPRELYVPRIASKPIIVGSSKFRSKGRFPVLSYYHQDKEAAICRCSQPLSGFSARCLEDEHLLQAISKANPVNRYMYVMDTRPKLNAMANRAAGKGYENEDNYSNIRFQFVGIENIHVMRSSLQKLLEVNGTKGLSVNDFYSGLESSGWLRHIKAVMDAAIFLAKAITVENASVLVHCSDGWDRTSQVCSLGSLLLDSYYRTIKGFMVLIEKDWISFGHKFSERCGQLDGDPKEVSPVFTQFLECVWHLTEQFPQAFEFSEAFLLQIHEHIHSCQFGNFLGNCQKEREELKLKEKTYSLWPFLLEDQKKYLNPLYSSESHRFTVLEPNTVSFNFKFWRNMYHQFDRTLHPRQSVFNIIMNMNEQNKQLEKDIKDLESKIKQRKNKQTDGILTKELLHSVHPESPNLKTSLCFKEQTLLPVNDALRTIEGSSPADNRYSEYAEEFSKSEPAVVSLEYGVARMTC

SEQ ID NO: 54677 - protein, 660 aa, Homo sapiens
  Payload ID: 10795
  Gene Symbol: MTMR7
  Gene Name: myotubularin related protein 7
  Uniprot ID: Q9Y216
  ENSP ID: ENSP00000180173
MEHIRTPKVENVRLVDRVSPKKAALGTLYLTATHVIFVENSPDPRKETWILHSQISTIEKQATTATGCPLLIRCKNFQIIQLIIPQERDCHDVYISLIRLARPVKYEELYCFSFNPMLDKEEREQGWVLIDLSEEYTRMGLPNHYWQLSDVNRDYRVCDSYPTELYVPKSATAHIIVGSSKFRSRRRFPVLSYYYKDNHASICRSSQPLSGFSARCLEDEQMLQAIRKANPGSDFVYVVDTRPKLNAMANRAAGKGYENEDNYSNIKFQFIGIENIHVMRNSLQKMLEVCELKSPSMSDFLWGLENSGWLRHIKAIMDAGIFIAKAVSEEGASVLVHCSDGWDRTAQVCSVASLLLDPHYRTLKGFMVLIEKDWISFGHKFNHRYGNLDGDPKEISPVIDQFIECVWQLMEQFPCAFEFNERFLIHIQHHIYSCQFGNFLCNSQKERRELKIQERTYSLWAHLWKNRADYLNPLFRADHSQTQGTLHLPTTPCNFMYKFWSGMYNRFEKGMQPRQSVTDYLMAVKEETQQLEEELEALEERLEKIQKVQLNCTKVKSKQSEPSKHSGFSTSDNSIANTPQDYSGNMKSFPSRSPSQGDEDSALILTQDNLKSSDPDLSANSDQESGVEDLSCRSPSGGEHAPSEDSGKDRDSDEAVFLTA

SEQ ID NO: 54678 - protein, 555 aa, Homo sapiens
  Payload ID: 10795
  Gene Symbol: MTMR7
  Gene Name: myotubularin related protein 7
  Uniprot ID: Q9Y216
  ENSP ID: ENSP00000429733
MEHIRTPKVENVRLVDRVSPKKAALGTLYLTATHVIFVENSPDPRKETWILHSQISTIEKQATTATGCPLLIRCKNFQIIQLIIPQERDCHDVYISLIRLARPVKYEELYCFSFNPMLDKEEREQGWVLIDLSEEYTRMGLPNHYWQLSDVNRDYRVCDSYPTELYVPKSATAHIIVGSSKFRSRRRFPVLSYYYKDNHASICRSSQPLSGFSARCLEDEQMLQAIRKANPGSDFVYVVDTRPKLNAMANRAAGKGYENEDNYSNIKFQFIGIENIHVMRNSLQKMLEVCELKSPSMSDFLWGLENSGWLRHIKAIMDAGIFIAKAVSEEGASVLVHCSDGWDRTAQVCSVASLLLDPHYRTLKGFMVLIEKDWISFGHKFNHRYGNLDGDPKEISPVIDQFIECVWQLMEQFPCAFEFNERFLIHIQHHIYSCQFGNFLCNSQKERRELKIQERTYSLWAHLWKNRADYLNPLFRADHSQTQGTLHLPTTPCNFMYKFWSGMYNRFEKGMQPRQSVTDYLMAVKEETQQLEEELEALEEVRHTCFVNLFSVLIS

SEQ ID NO: 54679 - protein, 105 aa, Homo sapiens
  Payload ID: 10795
  Gene Symbol: MTMR7
  Gene Name: myotubularin related protein 7
  ENSP ID: ENSP00000431000
MEHIRTPKVENVRLVDRVSPKKAALGTLYLTATHVIFVENSPDPRKETWILHSQISTIEKQATTATGCPLLIRCKNFQIIQLIIPQERDCHDVYISLIRLARPGL

SEQ ID NO: 54680 - protein, 704 aa, Homo sapiens
  Payload ID: 10796
  Gene Symbol: MTMR8
  Gene Name: myotubularin related protein 8
  Uniprot ID: Q96EF0
  ENSP ID: ENSP00000363985
MDHITVPKVENVKLVDRYVSKKPANGILYLTATHLIYVEASGAARKETWIALHHIATVEKLPITSLGCPLTLRCKNFRVAHFVLDSDLVCHEVYISLLKLSQPALPEDLYAFSYNPKSSKEMRESGWKLIDPISDFGRMGIPNRNWTITDANRNYEICSTYPPEIVVPKSVTLGTVVGSSKFRSKERVPVLSYLYKENNAAICRCSQPLSGFYTRCVDDELLLEAISQTNPGSQFMYVVDTRPKLNAMANRAAGKGYENEDNYANIRFRFMGIENIHVMRSSLQKLLEVCELKTPTMSEFLSGLESSGWLRHIKAIMDAGIFITKAVKVEKASVLVHCSDGWDRTAQVCSVASILLDPFYRTFKGLMILIEKEWISMGHKFSQRCGHLDGDSKEVSPIFTQFLDCIWQLMEQFPCAFEFNENFLLEIHDHVFSCQFGNFLGNCQKDREDLRVYEKTHSVWPFLVQRKPDFRNPLYKGFTMYGVLNPSTVPYNIQFWCGMYNRFDKGLQPKQSMLESLLEIKKQRAMLETDVHELEKKLKVRDEPPEEICTCSQLGNILSQHLGSPLTNPLGFMGINGDLNTLMENGTLSREGGLRAQMDQVKSQGADLHHNCCEIVGSLRAINISGDVGISEAMGISGDMCTFEATGFSKDLGICGAMDISEATGISGNLGISEARGFSGDMGILGDTGISKASTKEADYSKHQ

SEQ ID NO: 54681 - protein, 549 aa, Homo sapiens
  Payload ID: 10797
  Gene Symbol: MTMR9
  Gene Name: myotubularin related protein 9
  Uniprot ID: Q96QG7
  ENSP ID: ENSP00000221086
MEFAELIKTPRVDNVVLHRPFYPAVEGTLCLTGHHLILSSRQDNTEELWLLHSNIDAIDKRFVGSLGTIIIKCKDFRIIQLDIPGMEECLNIASSIEALSTLDSITLMYPFFYRPMFEVIEDGWHSFLPEQEFELYSSATSEWRLSYVNKEFAVCPSYPPIVTVPKSIDDEALRKVATFRHGGRFPVLSYYHKKNGMVIMRSGQPLTGTNGRRCKEDEKLINATLRAGKRGYIIDTRSLNVAQQTRAKGGGFEQEAHYPQWRRIHKSIERYHILQESLIKLVEACNDQTHNMDRWLSKLEASNWLTHIKEILTTACLAAQCIDREGASILIHGTEGTDSTLQVTSLAQIILEPRSRTIRGFEALIEREWLQAGHPFQQRCAQSAYCNTKQKWEAPVFLLFLDCVWQILRQFPCSFEFNENFLIMLFEHAYASQFGTFLGNNESERCKLKLQQKTMSLWSWVNQPSELSKFTNPLFEANNLVIWPSVAPQSLPLWEGIFLRWNRSSKYLDEAYEEMVNIIEYNKELQAKVNILRRQLAELETEDGMQESP

SEQ ID NO: 54682 - protein, 464 aa, Homo sapiens
  Payload ID: 10797
  Gene Symbol: MTMR9
  Gene Name: myotubularin related protein 9
  Uniprot ID: Q96QG7
  ENSP ID: ENSP00000433239
MEECLNIASSIEALSTLDSITLMYPFFYRPMFEVIEDGWHSFLPEQEFELYSSATSEWRLSYVNKEFAVCPSYPPIVTVPKSIDDEALRKVATFRHGGRFPVLSYYHKKNGMVIMRSGQPLTGTNGRRCKEDEKLINATLRAGKRGYIIDTRSLNVAQQTRAKGGGFEQEAHYPQWRRIHKSIERYHILQESLIKLVEACNDQTHNMDRWLSKLEASNWLTHIKEILTTACLAAQCIDREGASILIHGTEGTDSTLQVTSLAQIILEPRSRTIRGFEALIEREWLQAGHPFQQRCAQSAYCNTKQKWEAPVFLLFLDCVWQILRQFPCSFEFNENFLIMLFEHAYASQFGTFLGNNESERCKLKLQQKTMSLWSWVNQPSELSKFTNPLFEANNLVIWPSVAPQSLPLWEGIFLRWNRSSKYLDEAYEEMVNIIEYNKELQAKVNILRRQLAELETEDGMQESP

SEQ ID NO: 54683 - protein, 101 aa, Homo sapiens
  Payload ID: 10797
  Gene Symbol: MTMR9
  Gene Name: myotubularin related protein 9
  ENSP ID: ENSP00000436046
MEFAELIKTPRVDNVVLHRPFYPAVEGTLCLTGHHLILSSRQDNTEELWLLHSNIDAIDKRFVGSLGTIIIKCKDFRIIQLDIPGMEECLNIASSIENPSC

SEQ ID NO: 54684 - protein, 299 aa, Homo sapiens
  Payload ID: 10798
  Gene Symbol: MYOZ1
  Gene Name: myozenin 1
  Uniprot ID: Q9NP98
  ENSP ID: ENSP00000352272
MPLSGTPAPNKKRKSSKLIMELTGGGQESSGLNLGKKISVPRDVMLEELSLLTNRGSKMFKLRQMRVEKFIYENHPDVFSDSSMDHFQKFLPTVGGQLGTAGQGFSYSKSNGRGGSQAGGSGSAGQYGSDQQHHLGSGSGAGGTGGPAGQAGRGGAAGTAGVGETGSGDQAGGEGKHITVFKTYISPWERAMGVDPQQKMELGIDLLAYGAKAELPKYKSFNRTAMPYGGYEKASKRMTFQMPKFDLGPLLSEPLVLYNQNLSNRPSFNRTPIPWLSSGEPVDYNVDIGIPLDGETEEL

SEQ ID NO: 54685 - protein, 264 aa, Homo sapiens
  Payload ID: 10799
  Gene Symbol: MYOZ2
  Gene Name: myozenin 2
  Uniprot ID: Q9NPC6
  ENSP ID: ENSP00000306997
MLSHNTMMKQRKQQATAIMKEVHGNDVDGMDLGKKVSIPRDIMLEELSHLSNRGARLFKMRQRRSDKYTFENFQYQSRAQINHSIAMQNGKVDGSNLEGGSQQAPLTPPNTPDPRSPPNPDNIAPGYSGPLKEIPPEKFNTTAVPKYYQSPWEQAISNDPELLEALYPKLFKPEGKAELPDYRSFNRVATPFGGFEKASRMVKFKVPDFELLLLTDPRFMSFVNPLSGRRSFNRTPKGWISENIPIVITTEPTDDTTVPESEDL

SEQ ID NO: 54686 - protein, 251 aa, Homo sapiens
  Payload ID: 10800
  Gene Symbol: MYOZ3
  Gene Name: myozenin 3
  Uniprot ID: Q8TDC0
  ENSP ID: ENSP00000297130
MIPKEQKGPVMAAMGDLTEPVPTLDLGKKLSVPQDLMMEELSLRNNRGSLLFQKRQRRVQKFTFELAASQRAMLAGSARRKVTGTAESGTVANANGPEGPNYRSELHIFPASPGASLGGPEGAHPAAAPAGCVPSPSALAPGYAEPLKGVPPEKFNHTAISKGYRCPWQEFVSYRDYQSDGRSHTPSPNDYRNFNKTPVPFGGPLVGGTFPRPGTPFIPEPLSGLELLRLRPSFNRVAQGWVRNLPESEEL

SEQ ID NO: 54687 - protein, 251 aa, Homo sapiens; identical to SEQ ID NO: 54686
  Payload ID: 10800
  Gene Symbol: MYOZ3
  Gene Name: myozenin 3
  Uniprot ID: Q8TDC0
  ENSP ID: ENSP00000428815

SEQ ID NO: 54688 - protein, 159 aa, Homo sapiens
  Payload ID: 10800
  Gene Symbol: MYOZ3
  Gene Name: myozenin 3
  ENSP ID: ENSP00000429439
MGRGLLCWSNCGFPFPPSSPLTPIFPPPTASAEWGWGEVGLGAEGGRTEALPSPRAPRLCGAAEGRPAREVQPHRHLQGLPLPLAGVRQLPGLPERWPKSHPQPQRLPKFQQDPGAIWRTPRGGHFSQARHPLHPGAPQWLGTPPSQTQLQQSGPGLGP

SEQ ID NO: 54689 - protein, 104 aa, Homo sapiens
  Payload ID: 10800
  Gene Symbol: MYOZ3
  Gene Name: myozenin 3
  ENSP ID: ENSP00000430913
NANGPEGPNYRSELHIFPASPGASLGGPEGAHPAAAPAGCVPSPSALAPGYAEPLKGVPPEKFNHTAISKGYRCPWQEFVSYRDYQSDGRSHTPSPNDYRNFNK

SEQ ID NO: 54690 - protein, 87 aa, Homo sapiens
  Payload ID: 10800
  Gene Symbol: MYOZ3
  Gene Name: myozenin 3
  Uniprot ID: Q8TDC0
  ENSP ID: ENSP00000478375
MLREVGPGVYGGWGGESPLWPFLAVPTLDLGKKLSVPQDLMMEELSLRNNRGSLLFQKRQRRVQKFTFELAASQRAVSKPPLCSWGK

SEQ ID NO: 54691 - protein, 332 aa, Homo sapiens
  Payload ID: 10801
  Gene Symbol: MARCKS
  Gene Name: myristoylated alanine-rich protein kinase C substrate
  Uniprot ID: P29966
  ENSP ID: ENSP00000478061
MGAQFSKTAAKGEAAAERPGEAAVASSPSKANGQENGHVKVNGDASPAAAESGAKEELQANGSAPAADKEEPAAAGSGAASPSAAEKGEPAAAAAPEAGASPVEKEAPAEGEAAEPGSPTAAEGEAASAASSTSSPKAEDGATPSPSNETPKKKKKRFSFKKSFKLSGFSFKKNKKEAGEGGEAEAPAAEGGKDEAAGGAAAAAAEAGAASGEQAAAPGEEAAAGEEGAAGGDPQEAKPQEAAVAPEKPPASDETKAAEEPSKVEEKKAEEAGASAAACEAPSAAGPGAPPEQEAAPAEEPAAAAASSACAAPSQEAQPECSPEAPPAEAAE

SEQ ID NO: 54692 - protein, 330 aa, Homo sapiens
  Payload ID: 10801
  Gene Symbol: MARCKS
  Gene Name: myristoylated alanine-rich protein kinase C substrate
  ENSP ID: ENSP00000482673
MGAQFSKTAAKGEAAAERPGEAAVASSPSKANGQENGHVKVNGDASPAAAESGAKEELQANGSAPAADKEEPAAAGSGAASPSAAEKGEPAAAAAPEAGASPVEKEAPAEGEAAEPGSPTAAEGEAASAASSTSSPKAEDGATPSPSNETPKKKKKRFSFKKSFKLSGFSFKKNKKEAGEGGEAEAPAAEGGKDEAAGGAAAAAAEAGAASGEQAAAPGEEAAAGEEGAAGGDPQEAKPQEAAVAPEKPPASDETKAAEEPSKVEEKKAEEAGASAAACEAPSAAGPARPRSGGSPRGGARGRRSLVSAAPSQEAQPECSPEAPPAEAAE

SEQ ID NO: 54693 - protein, 191 aa, Homo sapiens
  Payload ID: 10802
  Gene Symbol: MEAF6
  Gene Name: MYST/Esa1-associated factor 6
  Uniprot ID: Q9HAF1
  ENSP ID: ENSP00000296214
MAMHNKAAPPQIPDTRRELAELVKRKQELAETLANLERQIYAFEGSYLEDTQMYGNIIRGWDRYLTNQKNSNSKNDRRNRKFKEAERLFSKSSVTSAAAVSALAGVQDQLIEKREPGSGTESDTSPDFHNQENEPSQEDPEDLDGSVQGVKPQKAASSTSSGSHHSSHKKRKNKNRHRIDLKLNKKPRADY

SEQ ID NO: 54694 - protein, 192 aa, Homo sapiens
  Payload ID: 10802
  Gene Symbol: MEAF6
  Gene Name: MYST/Esa1-associated factor 6
  Uniprot ID: Q9HAF1
  ENSP ID: ENSP00000362164
MAMHNKAAPPQIPDTRRELAELVKRKQELAETLANLERQIYAFEGSYLEDTQMYGNIIRGWDRYLTNQKNSNSKNDRRNRKFKEAERLFSKSSVTSAAAVSALAGVQDQLIEKREPGSGTESDTSPDFHNQENEPSQEDPEDLDGSVQGVKPQKAASSTSSGSHHSSHKKRKNKNRHRMNVSPKTGWHQLHL

SEQ ID NO: 54695 - protein, 169 aa, Homo sapiens
  Payload ID: 10802
  Gene Symbol: MEAF6
  Gene Name: MYST/Esa1-associated factor 6
  ENSP ID: ENSP00000362165
MSLFFISQETLANLERQIYAFEGSYLEDTQMYGNIIRGWDRYLTNQKNSNSKNDRRNRKFKEAERLFSKSSVTSAAAVSALAGVQDQLIEKREPGSGTESDTSPDFHNQENEPSQEDPEDLDGSVQGVKPQKAASSTSSGSHHSSHKKRKNKNRHRIDLKLNKKPRADY

SEQ ID NO: 54696 - protein, 201 aa, Homo sapiens
  Payload ID: 10802
  Gene Symbol: MEAF6
  Gene Name: MYST/Esa1-associated factor 6
  Uniprot ID: Q9HAF1
  ENSP ID: ENSP00000362166
MAMHNKAAPPQIPDTRRELAELVKRKQELAETLANLERQIYAFEGSYLEDTQMYGNIIRGWDRYLTNQKNSNSKNDRRNRKFKEAERLFSKSSVTSAAAVSALAGVQDQLIEKREPGSGTESDTSPDFHNQENEPSQEDPEDLDGSVQGVKPQKAASSTSSGSHHSSHKKRKNKNRHSPSGMFDYDFEIDLKLNKKPRADY

SEQ ID NO: 54697 - protein, 191 aa, Homo sapiens
  Payload ID: 10802
  Gene Symbol: MEAF6
  Gene Name: MYST/Esa1-associated factor 6
  Uniprot ID: Q9HAF1
  ENSP ID: ENSP00000394966
MAMHNKAAPPQIPDTRRELAELVKRKQELAETLANLERQIYAFEGSYLEDTQMYGNIIRGWDRYLTNQKNSNSKNDRRNRKFKEAERLFSKSSVTSAAAVSALAGVQDQLIEKREPGSGTESDTSPDFHNQENEPSQEDPEDLDGSVQGVKPQKAASSTSSGSHHSSHKKRKNKNRHSPSGMFDYDFEYVY

SEQ ID NO: 54698 - protein, 220 aa, Homo sapiens
  Payload ID: 10803
  Gene Symbol: NAA10
  Gene Name: N(alpha)-acetyltransferase 10, NatA catalytic subunit
  Uniprot ID: P41227
  ENSP ID: ENSP00000359026
MNIRNARPEDLMNMQHCNLLCLPENYQMKYYFYHGLSWPQLSYIAEDENGKIVGYVLAKMEEDPDDVPHGHITSLAVKRSHRRLGLAQKLMDQASRAMIENFNAKYVSLHVRKRISEVEPKYYADGEDAYAMKRDLTQMADELRRHLELKEKGRHVVLGAIENKVESKGNSPPSSGEACREEKGLAAEDSGGDSKDLSEVSETTESTDVKDSSEASDSAS

SEQ ID NO: 54699 - protein, 142 aa, Homo sapiens
  Payload ID: 10803
  Gene Symbol: NAA10
  Gene Name: N(alpha)-acetyltransferase 10, NatA catalytic subunit
  ENSP ID: ENSP00000359028
MNIRNARPEDLMNMQHCNLLCLPENYQMKYYFYHGLSWPQLSYIAEDENGKIVGEEDPDDVPHGHITSLAVKRSHRRLGLAQKLMDQASRAMIENFNAKYVSLHVRKRISEVEPKYYADGEDAYAMKRDLTQMADELRRHLE

SEQ ID NO: 54700 - protein, 169 aa, Homo sapiens
  Payload ID: 10803
  Gene Symbol: NAA10
  Gene Name: N(alpha)-acetyltransferase 10, NatA catalytic subunit
  ENSP ID: ENSP00000359032
MNIRNARPEDLMNMQHCNLLCLPENYQMKYYFYHGLSWPQLSYIAEDENGKIVGYVLAKMEEDPDDVPHGHITSLAVKRSHRRLGLAQKLMDQASRAMIENFNAKYVSLHVRKSNRAALHLYSNTLNFQISEVEPKYYADGEDAYAMKRDLTQMADEPATGPGSLCLET

SEQ ID NO: 54701 - protein, 184 aa, Homo sapiens
  Payload ID: 10803
  Gene Symbol: NAA10
  Gene Name: N(alpha)-acetyltransferase 10, NatA catalytic subunit
  ENSP ID: ENSP00000377315
MNIRNARPEDLMNMQHCNLLCLPENYQMKYYFYHGLSWPQLSYIAEDENGKIVGYVLAKMEEDPDDVPHGHITSLAVKRSHRRLGLAQKLMDQASRAMIENFNAKYVSLHVRKSNRAALHLYSNTLNFQISEVEPKYYADGEDAYAMKRDLTQMADERQGQAPFVWKLRPCLFAPASPWVPGGS

SEQ ID NO: 54702 - protein, 145 aa, Homo sapiens
  Payload ID: 10803
  Gene Symbol: NAA10
  Gene Name: N(alpha)-acetyltransferase 10, NatA catalytic subunit
  ENSP ID: ENSP00000413668
MNIRNARPEDLMNMQHCNLLCLPENYQMKYYFYHGLSWPQLSYIAEDENGKIVGEEDPDDVPHGHITSLAVKRSHRRLGLAQKLMDQASRAMIENFNAKYVSLHVRKSNRAALHLYSNTLNFQISEVEPKYYADGEDAYAMKRDL

SEQ ID NO: 54703 - protein, 235 aa, Homo sapiens
  Payload ID: 10803
  Gene Symbol: NAA10
  Gene Name: N(alpha)-acetyltransferase 10, NatA catalytic subunit
  Uniprot ID: P41227
  ENSP ID: ENSP00000417763
MNIRNARPEDLMNMQHCNLLCLPENYQMKYYFYHGLSWPQLSYIAEDENGKIVGYVLAKMEEDPDDVPHGHITSLAVKRSHRRLGLAQKLMDQASRAMIENFNAKYVSLHVRKSNRAALHLYSNTLNFQISEVEPKYYADGEDAYAMKRDLTQMADELRRHLELKEKGRHVVLGAIENKVESKGNSPPSSGEACREEKGLAAEDSGGDSKDLSEVSETTESTDVKDSSEASDSAS

SEQ ID NO: 54704 - protein, 229 aa, Homo sapiens
  Payload ID: 10804
  Gene Symbol: NAA11
  Gene Name: N(alpha)-acetyltransferase 11, NatA catalytic subunit
  Uniprot ID: Q9BSU3
  ENSP ID: ENSP00000286794
MNIRNAQPDDLMNMQHCNLLCLPENYQMKYYLYHGLSWPQLSYIAEDEDGKIVGYVLAKMEEEPDDVPHGHITSLAVKRSHRRLGLAQKLMDQASRAMIENFNAKYVSLHVRKSNRPALHLYSNTLNFQISEVEPKYYADGEDAYAMKRDLSQMADELRRQMDLKKGGYVVLGSRENQETQGSTLSDSEEACQQKNPATEESGSDSKEPKESVESTNVQDSSESSDSTS

SEQ ID NO: 54705 - protein, 111 aa, Homo sapiens
  Payload ID: 10804
  Gene Symbol: NAA11
  Gene Name: N(alpha)-acetyltransferase 11, NatA catalytic subunit
  ENSP ID: ENSP00000422022
LHLYSNTLNFQISEVEPKYYADGEDAYAMKRDLSQMADELRRQMDLKKGGYVVLGSRENQETQGSTLSDSEEACQQKNPATEESGSDSKEPKESVESTNVQDSSESSDSTS

SEQ ID NO: 54706 - protein, 866 aa, Homo sapiens
  Payload ID: 10805
  Gene Symbol: NAA15
  Gene Name: N(alpha)-acetyltransferase 15, NatA auxiliary subunit
  Uniprot ID: Q9BXJ9
  ENSP ID: ENSP00000296543
MPAVSLPPKENALFKRILRCYEHKQYRNGLKFCKQILSNPKFAEHGETLAMKGLTLNCLGKKEEAYELVRRGLRNDLKSHVCWHVYGLLQRSDKKYDEAIKCYRNALKWDKDNLQILRDLSLLQIQMRDLEGYRETRYQLLQLRPAQRASWIGYAIAYHLLEDYEMAAKILEEFRKTQQTSPDKVDYEYSELLLYQNQVLREAGLYREALEHLCTYEKQICDKLAVEETKGELLLQLCRLEDAADVYRGLQERNPENWAYYKGLEKALKPANMLERLKIYEEAWTKYPRGLVPRRLPLNFLSGEKFKECLDKFLRMNFSKGCPPVFNTLRSLYKDKEKVAIIEELVVGYETSLKSCRLFNPNDDGKEEPPTTLLWVQYYLAQHYDKIGQPSIALEYINTAIESTPTLIELFLVKAKIYKHAGNIKEAARWMDEAQALDTADRFINSKCAKYMLKANLIKEAEEMCSKFTREGTSAVENLNEMQCMWFQTECAQAYKAMNKFGEALKKCHEIERHFIEITDDQFDFHTYCMRKITLRSYVDLLKLEDVLRQHPFYFKAARIAIEIYLKLHDNPLTDENKEHEADTANMSDKELKKLRNKQRRAQKKAQIEEEKKNAEKEKQQRNQKKKKDDDDEEIGGPKEELIPEKLAKVETPLEEAIKFLTPLKNLVKNKIETHLFAFEIYFRKEKFLLMLQSVKRAFAIDSSHPWLHECMIRLFNTAVCESKDLSDTVRTVLKQEMNRLFGATNPKNFNETFLKRNSDSLPHRLSAAKMVYYLDPSSQKRAIELATTLDESLTNRNLQTCMEVLEALYDGSLGDCKEAAEIYRANCHKLFPYALAFMPPGYEEDMKITVNGDSSAEAEELANEI

SEQ ID NO: 54707 - protein, 865 aa, Homo sapiens
  Payload ID: 10805
  Gene Symbol: NAA15
  Gene Name: N(alpha)-acetyltransferase 15, NatA auxiliary subunit
  ENSP ID: ENSP00000381920
MPAVSLPPKENALFKRILRCYEHKQYRNGLKFCKQILSNPKFAEHGETLAMKGLTLNCLGKKEEAYELVRRGLRNDLKSHVCWHVYGLLQRSDKKYDEAIKCYRNALKWDKDNLQILRDLSLLQIQMRDLEGYRETRYQLLQLRPAQRASWIGYAIAYHLLEDYEMAAKILEEFRKTQQTSPDKVDYEYSELLLYQNQVLREAGLYREALEHLCTYEKQICDKLAVEETKGELLLQLCRLEDAADVYRGLQERNPENWAYYKGLEKALKPANMLERLKIYEEAWTKYPRGLVPRRLPLNFLSGEKFKECLDKFLRMNFSKGCPPVFNTLRSLYKDKEKVAIIEELVVGYETSLKSCRLFNPNDDGKEEPPTTLLWVQYYLAQHYDKIGQPSIALEYINTAIESTPTLIELFLVKAKIYKHAGNIKEAARWMDEAQALDTADRFINSKCAKYMLKANLIKEAEEMCSKFTREGTSAVENLNEMQCMWFQTECAQAYKAMNKFGEALKKCHEIERHFIEITDDQFDFHTYCMRKITLRSYVDLLKLEDVLRQHPFYFKAARIAIEIYLKLHDNPLTDENKEHEADTANMSDKELKKLRNKQRRAQKKAQIEEEKKNAEKEKQQRNQKKKKDDDDEEIGGPKEELIPEKLAKVETPLEEAIKFLTPLKNLVKNKIETHLFAFEIYFRKEKFLLMLQSVKRAFAIDSSHPWLHECMIRLFNTVCESKDLSDTVRTVLKQEMNRLFGATNPKNFNETFLKRNSDSLPHRLSAAKMVYYLDPSSQKRAIELATTLDESLTNRNLQTCMEVLEALYDGSLGDCKEAAEIYRANCHKLFPYALAFMPPGYEEDMKITVNGDSSAEAEELANEI

SEQ ID NO: 54708 - protein, 98 aa, Homo sapiens
  Payload ID: 10805
  Gene Symbol: NAA15
  Gene Name: N(alpha)-acetyltransferase 15, NatA auxiliary subunit
  ENSP ID: ENSP00000421839
MAVNGCLEGPSSNFLSCLFIVALVGSESTHPLCLEQPATQRCGLAMLPKLIFNSWPQGILPLQPPKALGLQSQQDFQAPGDCLSSGSNTKDLDCKESL

SEQ ID NO: 54709 - protein, 864 aa, Homo sapiens
  Payload ID: 10806
  Gene Symbol: NAA16
  Gene Name: N(alpha)-acetyltransferase 16, NatA auxiliary subunit
  Uniprot ID: Q6N069
  ENSP ID: ENSP00000368716
MPNVLLPPKESNLFKRILKCYEQKQYKNGLKFCKMILSNPKFAEHGETLAMKGLTLNCLGKKEEAYEFVRKGLRNDVKSHVCWHVYGLLQRSDKKYDEAIKCYRNALKLDKDNLQILRDLSLLQIQMRDLEGYRETRYQLLQLRPTQRASWIGYAIAYHLLKDYDMALKLLEEFRQTQQVPPNKIDYEYSELILYQNQVMREADLLQESLEHIEMYEKQICDKLLVEEIKGEILLKLGRLKEASEVFKNLIDRNAENWCYYEGLEKALQISTLEERLQIYEEISKQHPKAITPRRLPLTLVPGERFRELMDKFLRVNFSKGCPPLFTTLKSLYYNTEKVSIIQELVTNYEASLKTCDFFSPYENGEKEPPTTLLWVQYFLAQHFDKLGQYSLALDYINAAIASTPTLIELFYMKAKIYKHIGNLKEAAKWMDEAQSLDTADRFINSKCAKYMLRANMIKEAEEMCSKFTREGTSAMENLNEMQCMWFQTECISAYQRLGRYGDALKKCHEVERHFFEITDDQFDFHTYCMRKMTLRAYVDLLRLEDILRRHAFYFKAARSAIEIYLKLYDNPLTNESKQQEINSENLSAKELKKMLSKQRRAQKKAKLEEERKHAERERQQKNQKKKRDEEEEEASGLKEELIPEKLERVENPLEEAVKFLIPLKNLVADNIDTHLLAFEIYFRKGKFLLMLQSVKRAFAINSNNPWLHECLIRFSKSVSNHSNLPDIVSKVLSQEMQKIFVKKDLESFNEDFLKRNATSLQHLLSGAKMMYFLDKSRQEKAIAIATRLDETIKDKDVKTLIKVSEALLDGSFGNCSSQYEEYRMACHNLLPFTSAFLPAVNEVDNPNVALNHTANYDVLANEI

SEQ ID NO: 54710 - protein, 429 aa, Homo sapiens
  Payload ID: 10806
  Gene Symbol: NAA16
  Gene Name: N(alpha)-acetyltransferase 16, NatA auxiliary subunit
  Uniprot ID: Q6N069
  ENSP ID: ENSP00000386103
MPNVLLPPKESNLFKRILKCYEQKQYKNGLKFCKMILSNPKFAEHGETLAMKGLTLNCLGKKEEAYEFVRKGLRNDVKSHVCWHVYGLLQRSDKKYDEAIKCYRNALKLDKDNLQILRDLSLLQIQMRDLEGYRETRYQLLQLRPTQRASWIGYAIAYHLLKDYDMALKLLEEFRQTQQVPPNKIDYEYSELILYQNQVMREADLLQESLEHIEMYEKQICDKLLVEEIKGEILLKLGRLKEASEVFKNLIDRNAENWCYYEGLEKALQISTLEERLQIYEEISKQHPKAITPRRLPLTLVPGERFRELMDKFLRVNFSKGCPPLFTTLKSLYYNTEKVSIIQELVTNYEASLKTCDFFSPYENGEKEPPTTLLWVQYFLAQHFDKLGQYSLALDYINAAIASTPTLIELFYMKAKIYKVKSESCFLSS

SEQ ID NO: 54711 - protein, 516 aa, Homo sapiens
  Payload ID: 10806
  Gene Symbol: NAA16
  Gene Name: N(alpha)-acetyltransferase 16, NatA auxiliary subunit
  Uniprot ID: Q6N069
  ENSP ID: ENSP00000432364
MPNVLLPPKESNLFKRILKCYEQKQYKNGLKFCKMILSNPKFAEHGETLAMKGLTLNCLGKKEEAYEFVRKGLRNDVKSHVCWHVYGLLQRSDKKYDEAIKCYRNALKLDKDNLQILRDLSLLQIQMRDLEGYRETRYQLLQLRPTQRASWIGYAIAYHLLKDYDMALKLLEEFRQTQQVPPNKIDYEYSELILYQNQVMREADLLQESLEHIEMYEKQICDKLLVEEIKGEILLKLGRLKEASEVFKNLIDRNAENWCYYEGLEKALQISTLEERLQIYEEISKQHPKAITPRRLPLTLVPGERFRELMDKFLRVNFSKGCPPLFTTLKSLYYNTEKVSIIQELVTNYEASLKTCDFFSPYENGEKEPPTTLLWVQYFLAQHFDKLGQYSLALDYINAAIASTPTLIELFYMKAKIYKHIGNLKEAAKWMDEAQSLDTADRFINSKCAKYMLRANMIKEAEEMCSKFTREGTSAMENLNEMQCMWFQTECISAYQRLGRYGDALKKCHEVERVSC

SEQ ID NO: 54712 - protein, 111 aa, Homo sapiens
  Payload ID: 10807
  Gene Symbol: NAA20
  Gene Name: N(alpha)-acetyltransferase 20, NatB catalytic subunit
  Uniprot ID: P61599
  ENSP ID: ENSP00000311027
MTTLRAFTCDDLFRFNNINLDPLTETYGIPFYLQYLAHWPEYFIVAEAPGGELMGYIMGKAEGSVAREEWHGHVTALSVAPEFRRLGLAAKLMELLEEISERYEESTFQGY

SEQ ID NO: 54713 - protein, 178 aa, Homo sapiens
  Payload ID: 10807
  Gene Symbol: NAA20
  Gene Name: N(alpha)-acetyltransferase 20, NatB catalytic subunit
  Uniprot ID: P61599
  ENSP ID: ENSP00000335636
MTTLRAFTCDDLFRFNNINLDPLTETYGIPFYLQYLAHWPEYFIVAEAPGGELMGYIMGKAEGSVAREEWHGHVTALSVAPEFRRLGLAAKLMELLEEISERKGGFFVDLFVRVSNQVAVNMYKQLGYSVYRTVIEYYSASNGEPDEDAYDMRKALSRDTEKKSIIPLPHPVRPEDIE

SEQ ID NO: 54714 - protein, 166 aa, Homo sapiens
  Payload ID: 10807
  Gene Symbol: NAA20
  Gene Name: N(alpha)-acetyltransferase 20, NatB catalytic subunit
  ENSP ID: ENSP00000381603
MLSQSCNLDPLTETYGIPFYLQYLAHWPEYFIVAEAPGGELMGYIMGKAEGSVAREEWHGHVTALSVAPEFRRLGLAAKLMELLEEISERKGGFFVDLFVRVSNQVAVNMYKQLGYSVYRTVIEYYSASNGEPDEDAYDMRKALSRDTEKKSIIPLPHPVRPEDIE

SEQ ID NO: 54715 - protein, 972 aa, Homo sapiens
  Payload ID: 10808
  Gene Symbol: NAA25
  Gene Name: N(alpha)-acetyltransferase 25, NatB auxiliary subunit
  Uniprot ID: Q14CX7
  ENSP ID: ENSP00000261745
MATRGHVQDPNDRRLRPIYDYLDNGNNKMAIQQADKLLKKHKDLHCAKVLKAIGLQRTGKQEEAFTLAQEVAALEPTDDNSLQALTILYREMHRPELVTKLYEAAVKKVPNSEEYHSHLFMAYARVGEYKKMQQAGMALYKIVPKNPYYFWSVMSLIMQSISAQDENLSKTMFLPLAERMVEKMVKEDKIEAEAEVELYYMILERLGKYQEALDVIRGKLGEKLTSEIQSRENKCMAMYKKLSRWPECNALSRRLLLKNSDDWQFYLTYFDSVFRLIEEAWSPPAEGEHSLEGEVHYSAEKAVKFIEDRITEESKSSRHLRGPHLAKLELIRRLRSQGCNDEYKLGDPEELMFQYFKKFGDKPCCFTDLKVFVDLLPATQCTKFINQLLGVVPLSTPTEDKLALPADIRALQQHLCVVQLTRLLGLYHTMDKNQKLSVVRELMLRYQHGLEFGKTCLKTELQFSDYYCLLAVHALIDVWRETGDETTVWQALTLLEEGLTHSPSNAQFKLLLVRIYCMLGAFEPVVDLYSSLDAKHIQHDTIGYLLTRYAESLGQYAAASQSCNFALRFFHSNQKDTSEYIIQAYKYGAFEKIPEFIAFRNRLNNSLHFAQVRTERMLLDLLLEANISTSLAESIKSMNLRPEEDDIPWEDLRDNRDLNVFFSWDPKDRDVSEEHKKLSLEEETLWLRIRSLTLRLISGLPSLNHPVEPKNSEKTAENGVSSRIDILRLLLQQLEATLETGKRFIEKDIQYPFLGPVPTRMGGFFNSGCSQCQISSFYLVNDIYELDTSGLEDTMEIQERIENSFKSLLDQLKDVFSKCKGDLLEVKDGNLKTHPTLLENLVFFVETISVILWVSSYCESVLRPYKLNLQKKKKKKKETSIIMPPVFTSFQDYVTGLQTLISNVVDHIKGLETHLIALKLEELILEDTSLSPEERKFSKTVQGKVQSSYLHSLLEMGELLKKRLETTKKLKI

SEQ ID NO: 54716 - protein, 37 aa, Homo sapiens
  Payload ID: 10808
  Gene Symbol: NAA25
  Gene Name: N(alpha)-acetyltransferase 25, NatB auxiliary subunit
  ENSP ID: ENSP00000446719
MATRGHVQDPNDRRLRPIYVEMGFHRVSQDGLDLLTS

SEQ ID NO: 54717 - protein, 141 aa, Homo sapiens
  Payload ID: 10808
  Gene Symbol: NAA25
  Gene Name: N(alpha)-acetyltransferase 25, NatB auxiliary subunit
  ENSP ID: ENSP00000447676
  MOD_RES (1)..(1): Any amino acid
XTTGASGPFTVLKAIGLQRTGKQEEAFTLAQEVAALEPTDDNSLQALTILYREMHRPELVTKLYEAAVKKVPNSEEYHSHLFMAYARVGEYKKMQQAGMALYKIVPKNPYYFWSVMSLIMQSISAQDENLSKTMFLPLAER

SEQ ID NO: 54718 - protein, 100 aa, Homo sapiens
  Payload ID: 10808
  Gene Symbol: NAA25
  Gene Name: N(alpha)-acetyltransferase 25, NatB auxiliary subunit
  ENSP ID: ENSP00000448200
MATRGHVQDPNDRRLRPIYDYLDNGNNKMAIQQADKLLKKHKDLHCAKVLKAIGLQRTGKQEEAFTLAQEVAALEPTDDNSLQALTILYREMHRRWHGSI

SEQ ID NO: 54719 - protein, 174 aa, Homo sapiens
  Payload ID: 10809
  Gene Symbol: NAA30
  Gene Name: N(alpha)-acetyltransferase 30, NatC catalytic subunit
  ENSP ID: ENSP00000298406
  MOD_RES (1)..(1): Any amino acid
XATPDGGPRATATKGAGVHSGERPPHSLSSNARTAVPSPVEAAAASDPAAARNGLAEGTEQEEEEEDEQAMVGEECVGAIVCKLDMHKKMFRRGYIAMLAVDSKYRRNGIGTNLVKKAIYAMVEGDCDEVVLETEITNKSALKLYENLGFVRDKRLFRYYLNGVDALRLKLWLR

SEQ ID NO: 54720 - protein, 104 aa, Homo sapiens
  Payload ID: 10809
  Gene Symbol: NAA30
  Gene Name: N(alpha)-acetyltransferase 30, NatC catalytic subunit
  ENSP ID: ENSP00000450939
MVGEECVGAIVCKLDMHKKMFRRGYIAMLAVDSKYRRNGIGTNLVKKAIYAMVEGDCDEVVLETEITNKSALKLYENLGFVRDKRLFRYYLNGVDALRLKLWLR

SEQ ID NO: 54721 - protein, 49 aa, Homo sapiens
  Payload ID: 10809
  Gene Symbol: NAA30
  Gene Name: N(alpha)-acetyltransferase 30, NatC catalytic subunit
  ENSP ID: ENSP00000451255
MVGEECVGAIVCKLDMHKKMFRRGYIAMLAVDSKYRRNGIGCFGNRNNK

SEQ ID NO: 54722 - protein, 362 aa, Homo sapiens
  Payload ID: 10809
  Gene Symbol: NAA30
  Gene Name: N(alpha)-acetyltransferase 30, NatC catalytic subunit
  Uniprot ID: Q147X3
  ENSP ID: ENSP00000452521
MAEVPPGPSSLLPPPAPPAPAAVEPRCPFPAGAALACCSEDEEDDEEHEGGGSRSPAGGESATVAAKGHPCLRCPQPPQEQQQLNGLISPELRHLRAAASLKSKVLSVAEVAATTATPDGGPRATATKGAGVHSGERPPHSLSSNARTAVPSPVEAAAASDPAAARNGLAEGTEQEEEEEDEQVRLLSSSLTADCSLRSPSGREVEPGEDRTIRYVRYESELQMPDIMRLITKDLSEPYSIYTYRYFIHNWPQLCFLAMVGEECVGAIVCKLDMHKKMFRRGYIAMLAVDSKYRRNGIGTNLVKKAIYAMVEGDCDEVVLETEITNKSALKLYENLGFVRDKRLFRYYLNGVDALRLKLWLR

SEQ ID NO: 54723 - protein, 725 aa, Homo sapiens
  Payload ID: 10810
  Gene Symbol: NAA35
  Gene Name: N(alpha)-acetyltransferase 35, NatC auxiliary subunit
  Uniprot ID: Q5VZE5
  ENSP ID: ENSP00000354972
MVMKASVDDDDSGWELSMPEKMEKSNTNWVDITQDFEEACRELKLGELLHDKLFGLFEAMSAIEMMDPKMDAGMIGNQVNRKVLNFEQAIKDGTIKIKDLTLPELIGIMDTCFCCLITWLEGHSLAQTVFTCLYIHNPDFIEDPAMKAFALGILKICDIAREKVNKAAVFEEEDFQSMTYGFKMANSVTDLRVTGMLKDVEDDMQRRVKSTRSRQGEERDPEVELEHQQCLAVFSRVKFTRVLLTVLIAFTKKETSAVAEAQKLMVQAADLLSAIHNSLHHGIQAQNDTTKGDHPIMMGFEPLVNQRLLPPTFPRYAKIIKREEMVNYFARLIDRIKTVCEVVNLTNLHCILDFFCEFSEQSPCVLSRSLLQTTFLVDNKKVFGTHLMQDMVKDALRSFVSPPVLSPKCYLYNNHQAKDCIDSFVTHCVRPFCSLIQIHGHNRARQRDKLGHILEEFATLQDEAEKVDAALHTMLLKQEPQRQHLACLGTWVLYHNLRIMIQYLLSGFELELYSMHEYYYIYWYLSEFLYAWLMSTLSRADGSQMAEERIMEEQQKGRSSKKTKKKKKVRPLSREITMSQAYQNMCAGMFKTMVAFDMDGKVRKPKFELDSEQVRYEHRFAPFNSVMTPPPVHYLQFKEMSDLNKYSPPPQSPELYVAASKHFQQAKMILENIPNPDHEVNRILKVAKPNFVVMKLLAGGHKKESKVPPEFDFSAHKYFPVVKLV

SEQ ID NO: 54724 - protein, 294 aa, Homo sapiens
  Payload ID: 10810
  Gene Symbol: NAA35
  Gene Name: N(alpha)-acetyltransferase 35, NatC auxiliary subunit
  Uniprot ID: Q5VZE5
  ENSP ID: ENSP00000365208
MVMKASVDDDDSGWELSMPEKMEKSNTNWVDITQDFEEACRELKLGELLHDKLFGLFEAMSAIEMMDPKMDAGMIGNQVNRKVLNFEQAIKDGTIKIKDLTLPELIGIMDTCFCCLITWLEGHSLAQTVFTCLYIHNPDFIEDPAMKAFALGILKICDIAREKVNKAAVFEEEDFQSMTYGFKMANSVTDLRVTGMLKDVEDDMQRRVKSTRSRQGEERDPEVELEHQQCLAVFSRVKFTRVLLTVLIAFTKKETSAVAEAQKLMVQAADLLSAIHNSLHHGIQAQNDTTKGGL

SEQ ID NO: 54725 - protein, 173 aa, Homo sapiens
  Payload ID: 10811
  Gene Symbol: NAA38
  Gene Name: N(alpha)-acetyltransferase 38, NatC auxiliary subunit
  Uniprot ID: Q9BRA0
  ENSP ID: ENSP00000332103
MAVAVGVRAAPVLGLARALVLGLRGSQAARWRGWGTAAPGSLWALCECPAGCRELWFRGRAAWAARSERLLHPAQDSDGEREDSAAERARQQLEALLNKTMRIRMTDGRTLVGCFLCTDRDCNVILGSAQEFLKPSDSFSAGEPRVLGLAMVPGHHIVSIEVQRESLTGPPYL

SEQ ID NO: 54726 - protein, 73 aa, Homo sapiens
  Payload ID: 10811
  Gene Symbol: NAA38
  Gene Name: N(alpha)-acetyltransferase 38, NatC auxiliary subunit
  ENSP ID: ENSP00000459449
MRIRMTDGRTLVGCFLCTDRDCNVILGSAQEFLKPSDSFSAGEPRVLGLAMVPGHHIVSIEVQRESLTGPPYL

SEQ ID NO: 54727 - protein, 83 aa, Homo sapiens
  Payload ID: 10811
  Gene Symbol: NAA38
  Gene Name: N(alpha)-acetyltransferase 38, NatC auxiliary subunit
  ENSP ID: ENSP00000460085
MRIRMTDGRTLVGCFLCTDRDCNVILGSAQEFLKPSGQCPGNAHPPDSFSAGEPRVLGLAMVPGHHIVSIEVQRESLTGPPYL

SEQ ID NO: 54728 - protein, 125 aa, Homo sapiens
  Payload ID: 10811
  Gene Symbol: NAA38
  Gene Name: N(alpha)-acetyltransferase 38, NatC auxiliary subunit
  Uniprot ID: Q9BRA0
  ENSP ID: ENSP00000460172
MAGAGPTMLLREENGCCSRRQSSSSAGDSDGEREDSAAERARQQLEALLNKTMRIRMTDGRTLVGCFLCTDRDCNVILGSAQEFLKPSDSFSAGEPRVLGLAMVPGHHIVSIEVQRESLTGPPYL

SEQ ID NO: 54729 - protein, 135 aa, Homo sapiens
  Payload ID: 10811
  Gene Symbol: NAA38
  Gene Name: N(alpha)-acetyltransferase 38, NatC auxiliary subunit
  ENSP ID: ENSP00000460841
MAGAGPTMLLREENGCCSRRQSSSSAGDSDGEREDSAAERARQQLEALLNKTMRIRMTDGRTLVGCFLCTDRDCNVILGSAQEFLKPSGQCPGNAHPPDSFSAGEPRVLGLAMVPGHHIVSIEVQRESLTGPPYL

SEQ ID NO: 54730 - protein, 99 aa, Homo sapiens
  Payload ID: 10811
  Gene Symbol: NAA38
  Gene Name: N(alpha)-acetyltransferase 38, NatC auxiliary subunit
  ENSP ID: ENSP00000461545
MDSDGEREDSAAERARQQLEALLNKTMRIRMTDGRTLVGCFLCTDRDCNVILGSAQEFLKPSDSFSAGEPRVLGLAMVPGHHIVSIEVQRESLTGPPYL

SEQ ID NO: 54731 - protein, 237 aa, Homo sapiens
  Payload ID: 10812
  Gene Symbol: NAA40
  Gene Name: N(alpha)-acetyltransferase 40, NatD catalytic subunit
  Uniprot ID: Q86UY6
  ENSP ID: ENSP00000367024
MGRKSSKAKEKKQKRLEERAAMDAVCAKVDAANRLGDPLEAFPVFKKYDRNGLNVSIECKRVSGLEPATVDWAFDLTKTNMQTMYEQSEWGWKDREKREEMTDDRAWYLIAWENSSVPVAFSHFRFDVECGDEVLYCYEVQLESKVRRKGLGKFLIQILQLMANSTQMKKVMLTVFKHNHGAYQFFREALQFEIDDSSPSMSGCCGEDCSYEILSRRTKFGDSHHSHAGGHCGGCCH

SEQ ID NO: 54732 - protein, 124 aa, Homo sapiens
  Payload ID: 10812
  Gene Symbol: NAA40
  Gene Name: N(alpha)-acetyltransferase 40, NatD catalytic subunit
  ENSP ID: ENSP00000438639
MGRKSSKAKEKKQKRLEERAAMDAVCAKVDAANRLGDPLEAFPVFKKYDRNGTQMKKVMLTVFKHNHGAYQFFREALQFEIDDSSPSMSGCCGEDCSYEILSRRTKFGDSHHSHAGGHCGGCCH

SEQ ID NO: 54733 - protein, 39 aa, Homo sapiens
  Payload ID: 10812
  Gene Symbol: NAA40
  Gene Name: N(alpha)-acetyltransferase 40, NatD catalytic subunit
  ENSP ID: ENSP00000440304
MGRKSSKAKEKKQKRLEERAAMDAVCAKVDAANRVECLH

SEQ ID NO: 54734 - protein, 69 aa, Homo sapiens
  Payload ID: 10812
  Gene Symbol: NAA40
  Gene Name: N(alpha)-acetyltransferase 40, NatD catalytic subunit
  ENSP ID: ENSP00000440849
MGRKSSKAKEKKQKRLEERAAMDAVCAKVDAANRVMPNLTLLGLSTKAFLAHVTSELGKWWVLGGCSWF

SEQ ID NO: 54735 - protein, 216 aa, Homo sapiens
  Payload ID: 10812
  Gene Symbol: NAA40
  Gene Name: N(alpha)-acetyltransferase 40, NatD catalytic subunit
  Uniprot ID: Q86UY6
  ENSP ID: ENSP00000442055
MDAVCAKVDAANRLGDPLEAFPVFKKYDRNGLNVSIECKRVSGLEPATVDWAFDLTKTNMQTMYEQSEWGWKDREKREEMTDDRAWYLIAWENSSVPVAFSHFRFDVECGDEVLYCYEVQLESKVRRKGLGKFLIQILQLMANSTQMKKVMLTVFKHNHGAYQFFREALQFEIDDSSPSMSGCCGEDCSYEILSRRTKFGDSHHSHAGGHCGGCCH

SEQ ID NO: 54736 - protein, 169 aa, Homo sapiens
  Payload ID: 10813
  Gene Symbol: NAA50
  Gene Name: N(alpha)-acetyltransferase 50, NatE catalytic subunit
  Uniprot ID: Q9GZZ1
  ENSP ID: ENSP00000240922
MKGSRIELGDVTPHNIKQLKRLNQVIFPVSYNDKFYKDVLEVGELAKLAYFNDIAVGAVCCRVDHSQNQKRLYIMTLGCLAPYRRLGIGTKMLNHVLNICEKDGTFDNIYLHVQISNESAIDFYRKFGFEIIETKKNYYKRIEPADAHVLQKNLKVPSGQNADVQKTDN

SEQ ID NO: 54737 - protein, 129 aa, Homo sapiens
  Payload ID: 10813
  Gene Symbol: NAA50
  Gene Name: N(alpha)-acetyltransferase 50, NatE catalytic subunit
  ENSP ID: ENSP00000417110
MKGSRIELGDVTPHNIKQLKRLNQVIFPVSYNDKFYKDVLEVGELAKLGTKMLNHVLNICEKDGTFDNIYLHVQISNESAIDFYRKFGFEIIETKKNYYKRIEPADAHVLQKNLKVPSGQNADVQKTDN

SEQ ID NO: 54738 - protein, 95 aa, Homo sapiens
  Payload ID: 10813
  Gene Symbol: NAA50
  Gene Name: N(alpha)-acetyltransferase 50, NatE catalytic subunit
  ENSP ID: ENSP00000417488
MTLGCLAPYRRLGIGTKMLNHVLNICEKDGTFDNIYLHVQISNESAIDFYRKFGFEIIETKKNYYKRIEPADAHVLQKNLKVPSGQNADVQKTDN

SEQ ID NO: 54739 - protein, 168 aa, Homo sapiens
  Payload ID: 10813
  Gene Symbol: NAA50
  Gene Name: N(alpha)-acetyltransferase 50, NatE catalytic subunit
  ENSP ID: ENSP00000417837
MKGRIELGDVTPHNIKQLKRLNQVIFPVSYNDKFYKDVLEVGELAKLAYFNDIAVGAVCCRVDHSQNQKRLYIMTLGCLAPYRRLGIGTKMLNHVLNICEKDGTFDNIYLHVQISNESAIDFYRKFGFEIIETKKNYYKRIEPADAHVLQKNLKVPSGQNADVQKTDN

SEQ ID NO: 54740 - protein, 48 aa, Homo sapiens
  Payload ID: 10813
  Gene Symbol: NAA50
  Gene Name: N(alpha)-acetyltransferase 50, NatE catalytic subunit
  ENSP ID: ENSP00000418323
MKGSRIELGDVTPHNIKQLKRLNQVIFPVSYNDKFYKDVLEPISMILL

SEQ ID NO: 54741 - protein, 95 aa, Homo sapiens; identical to SEQ ID NO: 54738
  Payload ID: 10813
  Gene Symbol: NAA50
  Gene Name: N(alpha)-acetyltransferase 50, NatE catalytic subunit
  ENSP ID: ENSP00000418473

SEQ ID NO: 54742 - protein, 58 aa, Homo sapiens
  Payload ID: 10813
  Gene Symbol: NAA50
  Gene Name: N(alpha)-acetyltransferase 50, NatE catalytic subunit
  ENSP ID: ENSP00000418490
MKGRIELGDVTPHNIKQLKRLNQVIFPVSYNDKFYKDVLEKNLKVPSGQNADVQKTDN

SEQ ID NO: 54743 - protein, 57 aa, Homo sapiens
  Payload ID: 10813
  Gene Symbol: NAA50
  Gene Name: N(alpha)-acetyltransferase 50, NatE catalytic subunit
  ENSP ID: ENSP00000419729
MKGRIELGDVTPHNIKQLKRLNQVIFPVSYNDKFYKDVLEVGELAKLGAVCCRVDHS

SEQ ID NO: 54744 - protein, 81 aa, Homo sapiens
  Payload ID: 10813
  Gene Symbol: NAA50
  Gene Name: N(alpha)-acetyltransferase 50, NatE catalytic subunit
  ENSP ID: ENSP00000480264
MKGSRIELGDVTPHNIKQLKRLNQVIFPVSYNDKFYKKFGFEIIETKKNYYKRIEPADAHVLQKNLKVPSGQNADVQKTDN

SEQ ID NO: 54745 - protein, 58 aa, Homo sapiens
  Payload ID: 10813
  Gene Symbol: NAA50
  Gene Name: N(alpha)-acetyltransferase 50, NatE catalytic subunit
  ENSP ID: ENSP00000486244
MGSRIELGDVTPHNIKQLKRLNQVIFPVSYNDKFYKDVLEKNLKVPSGQNADVQKTDN

SEQ ID NO: 54746 - protein, 177 aa, Homo sapiens
  Payload ID: 10814
  Gene Symbol: NAA60
  Gene Name: N(alpha)-acetyltransferase 60, NatF catalytic subunit
  Uniprot ID: Q9H7X0
  ENSP ID: ENSP00000354108
MIVAEIKNRTKIHKEDGDILASNFSVDTQVAYILSLGVVKEFRKHGIGSLLLESLKDHISTTAQDHCKAIYLHVLTTNNTAINFYENRDFKQHHYLPYYYSIRGVLKDGFTYVLYINGGHPPWTILDYIQHLGSALASLSPCSIPHRVYRQAHSLLCSFLPWSGISSKSGIEYSRTM

SEQ ID NO: 54747 - protein, 242 aa, Homo sapiens
  Payload ID: 10814
  Gene Symbol: NAA60
  Gene Name: N(alpha)-acetyltransferase 60, NatF catalytic subunit
  Uniprot ID: Q9H7X0
  ENSP ID: ENSP00000385903
MTEVVPSSALSEVSLRLLCHDDIDTVKHLCGDWFPIEYPDSWYRDITSNKKFFSLAATYRGAIVGMIVAEIKNRTKIHKEDGDILASNFSVDTQVAYILSLGVVKEFRKHGIGSLLLESLKDHISTTAQDHCKAIYLHVLTTNNTAINFYENRDFKQHHYLPYYYSIRGVLKDGFTYVLYINGGHPPWTILDYIQHLGSALASLSPCSIPHRVYRQAHSLLCSFLPWSGISSKSGIEYSRTM

SEQ ID NO: 54748 - protein, 242 aa, Homo sapiens; identical to SEQ ID NO: 54747
  Payload ID: 10814
  Gene Symbol: NAA60
  Gene Name: N(alpha)-acetyltransferase 60, NatF catalytic subunit
  Uniprot ID: Q9H7X0
  ENSP ID: ENSP00000393224

SEQ ID NO: 54749 - protein, 249 aa, Homo sapiens
  Payload ID: 10814
  Gene Symbol: NAA60
  Gene Name: N(alpha)-acetyltransferase 60, NatF catalytic subunit
  Uniprot ID: Q9H7X0
  ENSP ID: ENSP00000401237
MFPRRRTERRLGDTGTRKKIAYRKAVPGGRKCGASLSWEKSSREYPDSWYRDITSNKKFFSLAATYRGAIVGMIVAEIKNRTKIHKEDGDILASNFSVDTQVAYILSLGVVKEFRKHGIGSLLLESLKDHISTTAQDHCKAIYLHVLTTNNTAINFYENRDFKQHHYLPYYYSIRGVLKDGFTYVLYINGGHPPWTILDYIQHLGSALASLSPCSIPHRVYRQAHSLLCSFLPWSGISSKSGIEYSRTM

SEQ ID NO: 54750 - protein, 190 aa, Homo sapiens
  Payload ID: 10814
  Gene Symbol: NAA60
  Gene Name: N(alpha)-acetyltransferase 60, NatF catalytic subunit
  Uniprot ID: Q9H7X0
  ENSP ID: ENSP00000405873
MTEVVPSSALSEVSLRLLCHDDIDTVKHLCGDWFPIEYPDSWYRDITSNKKFFSLAATYRGAIVGMIVAEIKNRTKIHKEDGDILASNFSVDTQVAYILSLGVVKEFRKHGIEPHGLHPAPGLCTSQPEPLLHSAQSLPPGPQPALQLPAMVGHLFQEWHRVQPDHVMSAGQPPPGPTLRPPAEPAFLSI

SEQ ID NO: 54751 - protein, 99 aa, Homo sapiens
  Payload ID: 10814
  Gene Symbol: NAA60
  Gene Name: N(alpha)-acetyltransferase 60, NatF catalytic subunit
  ENSP ID: ENSP00000458505
MTEVVPSSALSEVSLRLLCHDDIDTVKHLCGDWFPIEYPDSWYRDITSNKKFFSLAATYRGAIVGMIVAEIKNRTKIHKEDGDILASNFSVDTQVAYIL

SEQ ID NO: 54752 - protein, 134 aa, Homo sapiens
  Payload ID: 10814
  Gene Symbol: NAA60
  Gene Name: N(alpha)-acetyltransferase 60, NatF catalytic subunit
  ENSP ID: ENSP00000458575
MTEVVPSSALSEVSLRLLCHDDIDTVKHLCGDWFPIEYPDSWYRDITSNKKFFSLAATYRGAIVGMIVAEIKNRTKIHKESPTDYIQHLGSALASLSPCSIPHRVYRQAHSLLCSFLPWSGISSKSGIEYSRTM

SEQ ID NO: 54753 - protein, 242 aa, Homo sapiens; identical to SEQ ID NO: 54747
  Payload ID: 10814
  Gene Symbol: NAA60
  Gene Name: N(alpha)-acetyltransferase 60, NatF catalytic subunit
  Uniprot ID: Q9H7X0
  ENSP ID: ENSP00000458667

SEQ ID NO: 54754 - protein, 41 aa, Homo sapiens
  Payload ID: 10814
  Gene Symbol: NAA60
  Gene Name: N(alpha)-acetyltransferase 60, NatF catalytic subunit
  ENSP ID: ENSP00000458717
MTEVVPSSALSEVSLRLLCHDDIDTVKHLCGDWFPIEMEIF

SEQ ID NO: 54755 - protein, 109 aa, Homo sapiens
  Payload ID: 10814
  Gene Symbol: NAA60
  Gene Name: N(alpha)-acetyltransferase 60, NatF catalytic subunit
  ENSP ID: ENSP00000458928
MTEVVPSSALSEVSLRLLCHDDIDTVKHLCGDWFPIEYPDSWYRDITSNKKFFSLAATYRGAIVGMIVAEIKNRTKIHKEDGDILASNFSVDTQVAYILSLGVVKEFRK

SEQ ID NO: 54756 - protein, 177 aa, Homo sapiens; identical to SEQ ID NO: 54746
  Payload ID: 10814
  Gene Symbol: NAA60
  Gene Name: N(alpha)-acetyltransferase 60, NatF catalytic subunit
  Uniprot ID: Q9H7X0
  ENSP ID: ENSP00000459055

SEQ ID NO: 54757 - protein, 242 aa, Homo sapiens; identical to SEQ ID NO: 54747
  Payload ID: 10814
  Gene Symbol: NAA60
  Gene Name: N(alpha)-acetyltransferase 60, NatF catalytic subunit
  Uniprot ID: Q9H7X0
  ENSP ID: ENSP00000459057

SEQ ID NO: 54758 - protein, 129 aa, Homo sapiens
  Payload ID: 10814
  Gene Symbol: NAA60
  Gene Name: N(alpha)-acetyltransferase 60, NatF catalytic subunit
  ENSP ID: ENSP00000459084
MTEVVPSSALSEVSLRLLCHDDIDTVKHLCGDWFPIEYPDSWYRDITSNKKFFSLAATYRGAIVGMIVAEIKNRTKIHKEDGDILASNFSVDTQVAYILSLGVVKEFRKHGIGSLLLESLKDHISTTAQ

SEQ ID NO: 54759 - protein, 77 aa, Homo sapiens
  Payload ID: 10814
  Gene Symbol: NAA60
  Gene Name: N(alpha)-acetyltransferase 60, NatF catalytic subunit
  ENSP ID: ENSP00000459188
MTEVVPSSALSEVSLRLLCHDDIDTVKHLCGDWFPIEYPDSWYRDITSNKKFFSLAATYRGAIVGMIVAEIKNRTKI

SEQ ID NO: 54760 - protein, 106 aa, Homo sapiens
  Payload ID: 10814
  Gene Symbol: NAA60
  Gene Name: N(alpha)-acetyltransferase 60, NatF catalytic subunit
  ENSP ID: ENSP00000459275
MTEVVPSSALSEVSLRLLCHDDIDTVKHLCGDWFPIEYPDSWYRDITSNKKFFSLAATYRGAIVGMIVAEIKNRTKIHKEDGDILASNFSVDTQVAYILSLGVVKE

SEQ ID NO: 54761 - protein, 120 aa, Homo sapiens
  Payload ID: 10814
  Gene Symbol: NAA60
  Gene Name: N(alpha)-acetyltransferase 60, NatF catalytic subunit
  ENSP ID: ENSP00000459544
MTEVVPSSALSEVSLRLLCHDDIDTVKHLCGDWFPIEYPDSWYRDITSNKKFFSLAATYRGAIVGMIVAEIKNRTKIHKEDGDILASNFSVDTQVAYILSLGVVKEFRKHGIGSLLLESL

SEQ ID NO: 54762 - protein, 141 aa, Homo sapiens
  Payload ID: 10814
  Gene Symbol: NAA60
  Gene Name: N(alpha)-acetyltransferase 60, NatF catalytic subunit
  ENSP ID: ENSP00000459750
MTEVVPSSALSEVSLRLLCHDDIDTVKHLCGDWFPIEYPDSWYRDITSNKKFFSLAATYRGAIVGMIVAEIKNRTKIHKEDGDILASNFSVDTQVAYILSLGVVKEFRKHGIGSLLLESLKDHISTTAQDHCKAIYLHVLT

SEQ ID NO: 54763 - protein, 121 aa, Homo sapiens
  Payload ID: 10814
  Gene Symbol: NAA60
  Gene Name: N(alpha)-acetyltransferase 60, NatF catalytic subunit
  ENSP ID: ENSP00000459790
MTEVVPSSALSEVSLRLLCHDDIDTVKHLCGDWFPIEYPDSWYRDITSNKKFFSLAATYRGAIVGMIVAEIKNRTKIHKEDGDILASNFSVDTQVAYILSLGVVKEFRKHGIGSLLLESLK

SEQ ID NO: 54764 - protein, 179 aa, Homo sapiens
  Payload ID: 10814
  Gene Symbol: NAA60
  Gene Name: N(alpha)-acetyltransferase 60, NatF catalytic subunit
  Uniprot ID: Q9H7X0
  ENSP ID: ENSP00000460763
MTEVVPSSALSEVSLRLLCHDDIDTVKHLCGDWFPIEYPDSWYRDITSNKKFFSLAATYRGAIVGMIVAEIKNRTKIHKEDGDILASNFSVDTQVAYILSLGVVKEFRKHGIESTARPTACSAASCHGRASLPRVASSTAGPCDVGWAAATRPHPSAARRARLPVHLTPSVFCKELPAI

SEQ ID NO: 54765 - protein, 87 aa, Homo sapiens
  Payload ID: 10814
  Gene Symbol: NAA60
  Gene Name: N(alpha)-acetyltransferase 60, NatF catalytic subunit
  ENSP ID: ENSP00000461438
MTEVVPSSALSEVSLRLLCHDDIDTVKHLCGDWFPIEYPDSWYRDITSNKKFFSLAATYRGAIVGMIVAEIKNRTKIHKEVPSYLKV

SEQ ID NO: 54766 - protein, 93 aa, Homo sapiens
  Payload ID: 10814
  Gene Symbol: NAA60
  Gene Name: N(alpha)-acetyltransferase 60, NatF catalytic subunit
  ENSP ID: ENSP00000461443
MTEVVPSSALSEVSLRLLCHDDIDTVKHLCGDWFPIEYPDSWYRDITSNKKFFSLAATYRGAIVGMIVAEIKNRTKIHKEDGDILASNFSVDT

SEQ ID NO: 54767 - protein, 80 aa, Homo sapiens
  Payload ID: 10814
  Gene Symbol: NAA60
  Gene Name: N(alpha)-acetyltransferase 60, NatF catalytic subunit
  ENSP ID: ENSP00000461507
MTEVVPSSALSEVSLRLLCHDDIDTVKHLCGDWFPIEYPDSWYRDITSNKKFFSLAATYRGAIVGMIVAEIKNRTKIHKE

SEQ ID NO: 54768 - protein, 134 aa, Homo sapiens; identical to SEQ ID NO: 54752
  Payload ID: 10814
  Gene Symbol: NAA60
  Gene Name: N(alpha)-acetyltransferase 60, NatF catalytic subunit
  ENSP ID: ENSP00000461703

SEQ ID NO: 54769 - protein, 179 aa, Homo sapiens; identical to SEQ ID NO: 54764
  Payload ID: 10814
  Gene Symbol: NAA60
  Gene Name: N(alpha)-acetyltransferase 60, NatF catalytic subunit
  Uniprot ID: Q9H7X0
  ENSP ID: ENSP00000461730

SEQ ID NO: 54770 - protein, 48 aa, Homo sapiens
  Payload ID: 10814
  Gene Symbol: NAA60
  Gene Name: N(alpha)-acetyltransferase 60, NatF catalytic subunit
  ENSP ID: ENSP00000482351
MFPRRRTERRLGDTGTRKKIAYRKAVPGGRKCGASLSWEKSSRDVKTD

SEQ ID NO: 54771 - protein, 186 aa, Homo sapiens
  Payload ID: 10815
  Gene Symbol: N6AMT1
  Gene Name: N-6 adenine-specific DNA methyltransferase 1 (putative)
  Uniprot ID: Q9Y5N5
  ENSP ID: ENSP00000286764
MAGENFATPFHGHVGRGAFSDVYEPAEDTFLLLDALEAAAAELAGVEICLEVGSGSGVVSAFLASMIGPQALYMCTDINPEAAACTLETARCNKVHIQPVITDLVGSHGIEAAWAGGRNGREVMDRFFPLVPDLLSPRGLFYLVTIKENNPEEILKIMKTKGLQGTTALSRQAGQETLSVLKFTKS

SEQ ID NO: 54772 - protein, 214 aa, Homo sapiens
  Payload ID: 10815
  Gene Symbol: N6AMT1
  Gene Name: N-6 adenine-specific DNA methyltransferase 1 (putative)
  ENSP ID: ENSP00000303584
MAGENFATPFHGHVGRGAFSDVYEPAEDTFLLLDALEAAAAELAGVEICLEVGSGSGVVSAFLASMIGPQALYMCTDINPEAAACTLETARCNKVHIQPVITDLVKGLLPRLTEKVDLLVFNPPYVVTPPQEVGSHGIEAAWAGGRNGREVMDRFFPLVPDLLSPRGLFYLVTIKENNPEEILKIMKTKGLQGTTALSRQAGQETLSVLKFTKS

SEQ ID NO: 54773 - protein, 214 aa, Homo sapiens; identical to SEQ ID NO: 54772
  Payload ID: 10815
  Gene Symbol: N6AMT1
  Gene Name: N-6 adenine-specific DNA methyltransferase 1 (putative)
  ENSP ID: ENSP00000436490

SEQ ID NO: 54774 - protein, 214 aa, Homo sapiens
  Payload ID: 10816
  Gene Symbol: N6AMT2
  Gene Name: N-6 adenine-specific DNA methyltransferase 2 (putative)
  Uniprot ID: Q8WVE0
  ENSP ID: ENSP00000372202
MSDLEDDETPQLSAHALAALQEFYAEQKQQIEPGEDDKYNIGIIEENWQLSQFWYSQETALQLAQEAIAAVGEGGRIACVSAPSVYQKLRELCRENFSIYIFEYDKRFAMYGEEFIFYDYNNPLDLPERIAAHSFDIVIADPPYLSEECLRKTSETVKYLTRGKILLCTGAIMEEQAAELLGVKMCTFVPRHTRNLANEFRCYVNYDSGLDCGI

SEQ ID NO: 54775 - protein, 214 aa, Homo sapiens; identical to SEQ ID NO: 54774
  Payload ID: 10816
  Gene Symbol: N6AMT2
  Gene Name: N-6 adenine-specific DNA methyltransferase 2 (putative)
  Uniprot ID: Q8WVE0
  ENSP ID: ENSP00000372206

SEQ ID NO: 54776 - protein, 207 aa, Homo sapiens
  Payload ID: 10817
  Gene Symbol: NKAIN1
  Gene Name: Na+/K+ transporting ATPase interacting 1
  Uniprot ID: Q4KMZ8
  ENSP ID: ENSP00000362841
MGKCSGRCTLVAFCCLQLVAALERQIFDFLGYQWAPILANFLHIMAVILGIFGTVQYRSRYLILYAAWLVLWVGWNAFIICFYLEVGQLSQDRDFIMTFNTSLHRSWWMENGPGCLVTPVLNSRLALEDHHVISVTGCLLDYPYIEALSSALQIFLALFGFVFACYVSKVFLEEEDSFDFIGGFDSYGYQAPQKTSHLQLQPLYTSG

SEQ ID NO: 54777 - protein, 151 aa, Homo sapiens
  Payload ID: 10817
  Gene Symbol: NKAIN1
  Gene Name: Na+/K+ transporting ATPase interacting 1
  ENSP ID: ENSP00000433225
  MOD_RES (1)..(1): Any amino acid
XGYQWAPILANFLHIMAVILGIFGTVQYRSRYLILDRDFIMTFNTSLHRSWWMENGPGCLVTPVLNSRLALEDHHVISVTGCLLDYPYIEALSSALQIFLALFGFVFACYVSKVFLEEEDSFDFIGGFDSYGYQAPQKTSHLQLQPLYTSG

SEQ ID NO: 54778 - protein, 126 aa, Homo sapiens
  Payload ID: 10817
  Gene Symbol: NKAIN1
  Gene Name: Na+/K+ transporting ATPase interacting 1
  ENSP ID: ENSP00000473611
MAVILGIFGTVQYRSRYLILYAAWLVLWVGWNAFIICFYLEVGQLSQDRDFIMTFNTSLHRSWWMENGPGCLVTPVLNSRLALEDHHVISVTGCLLDYPYIEALSSALQIFLALFGFVFACYVSKV

SEQ ID NO: 54779 - protein, 188 aa, Homo sapiens
  Payload ID: 10818
  Gene Symbol: NKAIN2
  Gene Name: Na+/K+ transporting ATPase interacting 2
  Uniprot ID: Q5VXU1
  ENSP ID: ENSP00000357401
MGYCSGRCTLIFICGMQLVCVLERQIFDFLGYQWAPILANFVHIIIVILGLFGTIQYRPRYITGYAVWLVLWVTWNVFVICFYLEAGDLSKETDLILTFNISMHRSWWMENGPGCTVTSVTPAPDWAPEDHRYITVSGCLLEYQYIEVAHSSLQIVLAVSVGSQPLLLVPLGLFYFCANSVHTNGICG

SEQ ID NO: 54780 - protein, 208 aa, Homo sapiens
  Payload ID: 10818
  Gene Symbol: NKAIN2
  Gene Name: Na+/K+ transporting ATPase interacting 2
  Uniprot ID: Q5VXU1
  ENSP ID: ENSP00000357402
MGYCSGRCTLIFICGMQLVCVLERQIFDFLGYQWAPILANFVHIIIVILGLFGTIQYRPRYITGYAVWLVLWVTWNVFVICFYLEAGDLSKETDLILTFNISMHRSWWMENGPGCTVTSVTPAPDWAPEDHRYITVSGCLLEYQYIEVAHSSLQIVLALAGFIYACYVVKCITEEEDSFDFIGGFDSYGYQGPQKTSHLQLQPMYMSK

SEQ ID NO: 54781 - protein, 207 aa, Homo sapiens
  Payload ID: 10818
  Gene Symbol: NKAIN2
  Gene Name: Na+/K+ transporting ATPase interacting 2
  Uniprot ID: Q5VXU1
  ENSP ID: ENSP00000437798
MGIIRFLLLYCPTNILTVCVLERQIFDFLGYQWAPILANFVHIIIVILGLFGTIQYRPRYITGYAVWLVLWVTWNVFVICFYLEAGDLSKETDLILTFNISMHRSWWMENGPGCTVTSVTPAPDWAPEDHRYITVSGCLLEYQYIEVAHSSLQIVLALAGFIYACYVVKCITEEEDSFDFIGGFDSYGYQGPQKTSHLQLQPMYMSK

SEQ ID NO: 54782 - protein, 49 aa, Homo sapiens
  Payload ID: 10818
  Gene Symbol: NKAIN2
  Gene Name: Na+/K+ transporting ATPase interacting 2
  ENSP ID: ENSP00000440287
VCVLERQIFDFLGYQWAPILANFVHIIIVILGLFGTIQYRPRYITGYHV

SEQ ID NO: 54783 - protein, 197 aa, Homo sapiens
  Payload ID: 10819
  Gene Symbol: NKAIN3
  Gene Name: Na+/K+ transporting ATPase interacting 3
  Uniprot ID: Q8N8D7
  ENSP ID: ENSP00000429073
MGCCTGRCSLICLCALQLVSALERQIFDFLGFQWAPILGNFLHIIVVILGLFGTIQYRPRYIMVYTVWTALWVTWNVFIICFYLEVGGLSKDTDLMTFNISVHRSWWREHGPGCVRRVLPPSAHGMMDDYTYVSVTGCIVDFQYLEVIHSAVQILLSLVGFVYACYVISISMEEEDTYSCDLQVCKHLFIQMLQIIE

SEQ ID NO: 54784 - protein, 101 aa, Homo sapiens
  Payload ID: 10819
  Gene Symbol: NKAIN3
  Gene Name: Na+/K+ transporting ATPase interacting 3
  ENSP ID: ENSP00000429393
MGCCTGRCSLICLCALQLVSALERQIFDFLGFQWAPILGNFLHIIVVILGLFGTIQYRPRYIMVDTDLMTFNISVHRSWWREHGPGCVRRVLPPSAHGMMD

SEQ ID NO: 54785 - protein, 146 aa, Homo sapiens
  Payload ID: 10820
  Gene Symbol: NKAIN4
  Gene Name: Na+/K+ transporting ATPase interacting 4
  ENSP ID: ENSP00000359330
MVYTLWAAVWVTWNVFIICFYLEVGGLLKDSELLTFSLSRHRSWWRERWPGCLHEEVPAVGLGAPHGQALVSGAGCALEPSYVEALHSCLQILIALLGFVCGCQVVSVFTEEEDSFDFIGGFDPFPLYHVNEKPSSLLSKQVYLPA

SEQ ID NO: 54786 - protein, 119 aa, Homo sapiens
  Payload ID: 10820
  Gene Symbol: NKAIN4
  Gene Name: Na+/K+ transporting ATPase interacting 4
  ENSP ID: ENSP00000359336
MVYTLWAAVWVTWNVFIICFYLEVGGLLKDSELLTFSLSRHRSWWRERWPGCLHEEVPAVGLGAPHGQALVSGAGCALEPSYVEALHSCLQILIALLGFVCGCQVVSVFTEEEDSCLRK

SEQ ID NO: 54787 - protein, 208 aa, Homo sapiens
  Payload ID: 10820
  Gene Symbol: NKAIN4
  Gene Name: Na+/K+ transporting ATPase interacting 4
  Uniprot ID: Q8IVV8
  ENSP ID: ENSP00000359340
MGSCSGRCALVVLCAFQLVAALERQVFDFLGYQWAPILANFVHIIIVILGLFGTIQYRLRYVMVYTLWAAVWVTWNVFIICFYLEVGGLLKDSELLTFSLSRHRSWWRERWPGCLHEEVPAVGLGAPHGQALVSGAGCALEPSYVEALHSCLQILIALLGFVCGCQVVSVFTEEEDSFDFIGGFDPFPLYHVNEKPSSLLSKQVYLPA

SEQ ID NO: 54788 - protein, 167 aa, Homo sapiens
  Payload ID: 10820
  Gene Symbol: NKAIN4
  Gene Name: Na+/K+ transporting ATPase interacting 4
  ENSP ID: ENSP00000359341
VWVTWNVFIICFYLEVGGLLKDSELLTFSLSRHRSWWRERWPGCLHEEVPAVGLGAPHGQALVSGAGCALEPSYVEALHSCLQILIANPRWLAPQRRRNPWWLLAGVGWGQSFWALSVAARWSACLRRKRTALISLVDLIHFLSTMSMKSHPVSCPSRCTSPQARPH

SEQ ID NO: 54789 - protein, 1562 aa, Homo sapiens
  Payload ID: 10821
  Gene Symbol: NACAD
  Gene Name: NAC alpha domain containing
  Uniprot ID: O15069
  ENSP ID: ENSP00000420477
MPGEAARAELLLPEADRPGPRTDLSCDAAAATTILGGDRREPCALTPGPSHLALTFLPSKPGARPQPEGASWDAGPGGAPSAWADPGEGGPSPMLLPEGLSSQALSTEAPLPATLEPRIVMGEETCQALLSPRAARTALRDQEGGHASPDPPPELCSQGDLSVPSPPPDPDSFFTPPSTPTKTTYALLPACGPHGDARDSEAELRDELLDSPPASPSGSYITADGDSWASSPSCSLSLLAPAEGLDFPSGWGLSPQGSMVDERELHPAGTPEPPSSESSLSADSSSSWGQEGHFFDLDFLANDPMIPAALLPFQGSLIFQVEAVEVTPLSPEEEEEEAVADPDPGGDLAGEGEEDSTSASFLQSLSDLSITEGMDEAFAFRDDTSAASSDSDSASYAEADDERLYSGEPHAQATLLQDSVQKTEEESGGGAKGLQAQDGTVSWAVEAAPQTSDRGAYLSQRQELISEVTEEGLALGQESTATVTPHTLQVAPGLQVEVATRVTPQAGEEETDSTAGQESAAMAMPQPSQEGISEILGQESVTAEKLPTPQEETSLTLCPDSPQNLKEEGGLDLPSGRKPVAAATIVPRQAKEDLTLPQDSAMTPPLPLQDTDLSSAPKPVAAATIVSQQAEEGLTLPQDSVMTPPLPLQDTELSSAPKPVAAATLVSQQAEEGLTLPQDSAMTPPLPLQDTDLSSAPKPVAAATLVSQQAEEGLTLPQDSAMTPPLPLQDTDLSSAPKPVAAATLVSQQAEEGLTLPQDSAMTPPLPLQDTDLSSAPKPVAAATIVSQQAEEGLTLPQDSAMTPPLPLQDTDLSSAPKPVAAATIVSQQAEEGLTLPQDSAMTPPLPLQDTDLSSAPKPVAAATPVSQQAEEGLTLPQDSAMTPPLPLQDTDLSSAPKPVAAATPVSQQAEEGLTLPQDSAMTAPLPLQDTGPTSGPEPLAVATPQTLQAEAGCAPGTEPVATMAQQEVGEALGPRPAPEEKNAALPTVPEPAALDQVQQDDPQPAAEAGTPWAAQEDADSTLGMEALSLPEPASGAGEEIAEALSRPGREACLEARAHTGDGAKPDSPQKETLEVENQQEGGLKPLAQEHGPRSALGGAREVPDAPPAACPEVSQARLLSPAREERGLSGKSTPEPTLPSAVATEASLDSCPESSVGAVSSLDRGCPDAPAPTSAPTSQQPEPVLGLGSVEQPHEVPSVLGTPLLQPPENLAKGQPSTPVDRPLGPDPSAPGTLAGAALPPLEPPAPCLCQDPQEDSVEDEEPPGSLGLPPPQAGVQPAAAAVSGTTQPLGTGPRVSLSPHSPLLSPKVASMDAKDLALQILPPCQVPPPSGPQSPAGPQGLSAPEQQEDEDSLEEDSPRALGSGQHSDSHGESSAELDEQDILAPQTVQCPAQAPAGGSEETIAKAKQSRSEKKARKAMSKLGLRQIQGVTRITIQKSKNILFVIAKPDVFKSPASDTYVVFGEAKIEDLSQQVHKAAAEKFKVPSEPSALVPESAPRPRVRLECKEEEEEEEEEVDEAGLELRDIELVMAQANVSRAKAVRALRDNHSDIVNAIMELTM

SEQ ID NO: 54790 - protein, 587 aa, Homo sapiens
  Payload ID: 10822
  Gene Symbol: NACC2
  Gene Name: NACC family member 2, BEN and BTB (POZ) domain containing
  Uniprot ID: Q96BF6
  ENSP ID: ENSP00000277554
MSQMLHIEIPNFGNTVLGCLNEQRLLGLYCDVSIVVKGQAFKAHRAVLAASSLYFRDLFSGNSKSAFELPGSVPPACFQQILSFCYTGRLTMTASEQLVVMYTAGFLQIQHIVERGTDLMFKVSSPHCDSQTAVIEDAGSEPQSPCNQLQPAAAAAAPYVVSPSVPIPLLTRVKHEAMELPPAGPGLAPKRPLETGPRDGVAVAAGAAVAAGTAPLKLPRVSYYGVPSLATLIPGIQQMPYPQGERTSPGASSLPTTDSPTSYHNEEDEEDDEAYDTMVEEQYGQMYIKASGSYAVQEKPEPVPLESRSCVLIRRDLVALPASLISQIGYRCHPKLYSEGDPGEKLELVAGSGVYITRGQLMNCHLCAGVKHKVLLRRLLATFFDRNTLANSCGTGIRSSTSDPSRKPLDSRVLNAVKLYCQNFAPSFKESEMNVIAADMCTNARRVRKRWLPKIKSMLPEGVEMYRTVMGSAAASVPLDPEFPPAAAQVFEQRIYAERRGDAATIVALRTDAVNVDLSAAANPAFDAGEEVDGAGSVIQEVAAPEPLPADGQSPPQPFEQGGGGPSRPQTPAAAARRPEGTYAGTL

SEQ ID NO: 54791 - protein, 587 aa, Homo sapiens; identical to SEQ ID NO: 54790
  Payload ID: 10822
  Gene Symbol: NACC2
  Gene Name: NACC family member 2, BEN and BTB (POZ) domain containing
  Uniprot ID: Q96BF6
  ENSP ID: ENSP00000360818

SEQ ID NO: 54792 - protein, 707 aa, Homo sapiens
  Payload ID: 10823
  Gene Symbol: NAALAD2
  Gene Name: N-acetylated alpha-linked acidic dipeptidase 2
  ENSP ID: ENSP00000320083
MAESRGRLYLWMCLAAALASFLMGFMVGWFIKPLKETTTSVRYHQSIRWKLVSEMKAENIKSFLRSFTKLPHLAGTEQNFLLAKKIQTQWKKFGLDSAKLVHYDVLLSYPNETNANYISIVDEHETEIFKTSYLEPPPDGYENVTNIVPPYNAFSAQGMPEGDLVYVNYARTEDFFKLEREMGINCTGKIVIARYGKIFRGNKVKNAMLAGAIGIILYSDPADYFAPEVQPYPKGWNLPGTAAQRGNVLNLNGAGDPLTPGYPAKEYTFRLDVEEGVGIPRIPVHPIGYNDAEILLRKVRMHVYNINKITRIYNVVGTIRGSVEPDRYVILGGHRDSWVFGAIDPTSGVAVLQEIARSFGKLMSKGWRPRRTIIFASWDAEEFGLLGSTEWAEENVKILQERSIAYINSDSSIEGNYTLRVDCTPLLYQLVYKLTKEIPSPDDGFESKSLYESWLEKDPSPENKNLPRINKLGSGSDFEAYFQRLGIASGRARYTKNKKTDKYSSYPVYHTIYETFELVEKFYDPTFKKQLSVAQLRGALVYELVDSKIIPFNIQDYAEALKNYAASIYNLSKKHDQQLTDHGVSFDSLFSAVKNFSEAASDFHKRLIQVDLNNPIAVRMMNDQLMLLERAFIDPLGLPGKLFYRHIIFAPSSHNKYAGESFPGIYDAIFDIENKANSRLAWKEVKKHISIAAFTIQAAAGTLKEVL

SEQ ID NO: 54793 - protein, 305 aa, Homo sapiens
  Payload ID: 10823
  Gene Symbol: NAALAD2
  Gene Name: N-acetylated alpha-linked acidic dipeptidase 2
  Uniprot ID: Q9Y3Q0
  ENSP ID: ENSP00000365111
MAESRGRLYLWMCLAAALASFLMGFMVGWFIKPLKETTTSVRYHQSIRWKLVSEMKAENIKSFLRSFTKLPHLAGTEQNFLLAKKIQTQWKKFGLDSAKLVHYDVLLSYPNETNANYISIVDEHETEIFKTSYLEPPPDGYENVTNIVPPYNAFSAQGMPEGDLVYVNYARTEDFFKLEREMGINCTGKIVIARYGKIFRGNKVKNAMLAGAIGIILYSDPADYFAPEVQPYPKGWNLPGTAAQRGNVLNLNGAGDPLTPGYPAKGTSYLLQVATTNMLENHFLESMMLSLILKIKPTLVWPGKK

SEQ ID NO: 54794 - protein, 88 aa, Homo sapiens
  Payload ID: 10823
  Gene Symbol: NAALAD2
  Gene Name: N-acetylated alpha-linked acidic dipeptidase 2
  ENSP ID: ENSP00000431989
MAESRGRLYLWMCLAAALASFLMGFMVGWFIKPLKETTTSVRYHQSIRWKLVSEMKAENIKSFLRSFTKLPHLAGTEQNFLLAKKIQT

SEQ ID NO: 54795 - protein, 740 aa, Homo sapiens
  Payload ID: 10823
  Gene Symbol: NAALAD2
  Gene Name: N-acetylated alpha-linked acidic dipeptidase 2
  Uniprot ID: Q9Y3Q0
  ENSP ID: ENSP00000432481
MAESRGRLYLWMCLAAALASFLMGFMVGWFIKPLKETTTSVRYHQSIRWKLVSEMKAENIKSFLRSFTKLPHLAGTEQNFLLAKKIQTQWKKFGLDSAKLVHYDVLLSYPNETNANYISIVDEHETEIFKTSYLEPPPDGYENVTNIVPPYNAFSAQGMPEGDLVYVNYARTEDFFKLEREMGINCTGKIVIARYGKIFRGNKVKNAMLAGAIGIILYSDPADYFAPEVQPYPKGWNLPGTAAQRGNVLNLNGAGDPLTPGYPAKEYTFRLDVEEGVGIPRIPVHPIGYNDAEILLRYLGGIAPPDKSWKGALNVSYSIGPGFTGSDSFRKVRMHVYNINKITRIYNVVGTIRGSVEPDRYVILGGHRDSWVFGAIDPTSGVAVLQEIARSFGKLMSKGWRPRRTIIFASWDAEEFGLLGSTEWAEENVKILQERSIAYINSDSSIEGNYTLRVDCTPLLYQLVYKLTKEIPSPDDGFESKSLYESWLEKDPSPENKNLPRINKLGSGSDFEAYFQRLGIASGRARYTKNKKTDKYSSYPVYHTIYETFELVEKFYDPTFKKQLSVAQLRGALVYELVDSKIIPFNIQDYAEALKNYAASIYNLSKKHDQQLTDHGVSFDSLFSAVKNFSEAASDFHKRLIQVDLNNPIAVRMMNDQLMLLERAFIDPLGLPGKLFYRHIIFAPSSHNKYAGESFPGIYDAIFDIENKANSRLAWKEVKKHISIAAFTIQAAAGTLKEVL

SEQ ID NO: 54796 - protein, 283 aa, Homo sapiens
  Payload ID: 10823
  Gene Symbol: NAALAD2
  Gene Name: N-acetylated alpha-linked acidic dipeptidase 2
  ENSP ID: ENSP00000433710
MAESRGRLYLWMCLAAALASFLMGFMVGWFIKPLKETTTSVRYHQSIRWKLVSEMKAENIKSFLRSFTKLPHLAGTEQNFLLAKKIQTQWKKFGLDSAKLVHYDVLLSYPNETNANYISIVDEHETEIFKTSYLEPPPDGYENVTNIVPPYNAFSAQGMPEGDLVYVNYARTEDFFKLEREMGINCTGKIVIARYGKIFRGNKVKNAMLAGAIGIILYSDPADYFAPEVQPYPKGWNLPGTAAQRGNVLNLNGAGDPLTPGYPAKATWEELLHQIRVGREPLM

SEQ ID NO: 54797 - protein, 372 aa, Homo sapiens
  Payload ID: 10823
  Gene Symbol: NAALAD2
  Gene Name: N-acetylated alpha-linked acidic dipeptidase 2
  ENSP ID: ENSP00000435249
MAESRGRLYLWMCLAAALASFLMGFMVGWFIKPLKETTTSVRYHQSIRWKLVSEMKAENIKSFLRSFTKLPHLAGTEQNFLLAKKIQTQWKKFGLDSAKLVHYDVLLSYPNETNANYISIVDEHETEIFKTSYLEPPPDGYENVTNIVPPYNAFSAQGMPEGDLVYVNYARTEDFFKLEREMGINCTGKIVIARYGKIFRGNKVKNAMLAGAIGIILYSDPADYFAPEVQPYPKGWNLPGTAAQRGNVLNLNGAGDPLTPGYPAKDRYVILGGHRDSWVFGAIDPTSGVAVLQEIARSFGKLMSKGWRPRRTIIFASWDAEEFGLLGSTEWAEVNKTKKVLIIFLVNREQICMCLRMIKNIFHYLIWFCFGE

SEQ ID NO: 54798 - protein, 107 aa, Homo sapiens
  Payload ID: 10823
  Gene Symbol: NAALAD2
  Gene Name: N-acetylated alpha-linked acidic dipeptidase 2
  ENSP ID: ENSP00000435670
MKAENIKSFLRSFTKLPHLAGTEQNFLLAKKIQTQWKKFGLDSAKLVHYDVLLSYPNETNANYISIVDEHETEIFKTSYLEPPPDGYENVTNIVPPYNAFSAQGMPE

SEQ ID NO: 54799 - protein, 739 aa, Homo sapiens
  Payload ID: 10824
  Gene Symbol: NAALADL1
  Gene Name: N-acetylated alpha-linked acidic dipeptidase-like 1
  ENSP ID: ENSP00000340111
MQWTKVLGLGLGAAALLGLGIILGHFAIPKKANSLAPQDLDLEILETVMGQLDAHRIRENLRELSREPHLASSPRDEDLVQLLLQRWKDPESGLDSAEASTYEVLLSFPSQEQPNVVDIVGPTGGIIHSCHRTEENVTGEQGGPDVVQPYAAYAPSGTPQGLLVYANRGAEEDFKELQTQGIKLEGTIALTRYGGVGRGAKAVNAAKHGVAGVLVYTDPADINDGLSSPDETFPNSWYLPPSGVERGSYYEYFGDPLTPYLPAVPSSFRVDLANVSGFPPIPTQPIGFQDARDLLCNLNGTLAPATWQGALGCHYRLGPGFRPDGDFPADSQVNVSVYNRLELRNSSNVLGIIRGAVEPDRYVLYGNHRDSWVHGAVDPSSGTAVLLELSRVLGTLLKKGTWRPRRSIVFASWGAEEFGLIGSTEFTEEFFNKLQERTVAYINVDISVFANATLRVQGTPPVQSVVFSATKEIRSPGPGDLSIYDNWIRYFNRSSPVYGLVPSLGSLGAGSDYAPFVHFLGISSMDIAYTYDRSKTSARIYPTYHTAFDTFDYVDKFLDPGFSSHQAVARTAGSVILRLSDSFFLPLKVSDYSETLRSFLQAAQQDLGALLEQHSISLGPLVTAVEKFEAEAAALGQRISTLQKGSPDPLQVRMLNDQLMLLERTFLNPRAFPEERYYSHVLWAPRGLRSHIPGLSNACSRARDTASGSEAWAEVQRQLSIVVTALEGAAATLRPVADL

SEQ ID NO: 54800 - protein, 791 aa, Homo sapiens
  Payload ID: 10824
  Gene Symbol: NAALADL1
  Gene Name: N-acetylated alpha-linked acidic dipeptidase-like 1
  Uniprot ID: Q9UQQ1
  ENSP ID: ENSP00000344244
MQWTKVLGLGLGAAALLGLGIILGHFAIPKKANSLAPQDLDLEILETVMGQLDAHRIRENLRELSREPHLASSPRDEDLVQLLLQRWKDPESGLDSAEASTYEVLLSFPSQEQPNVVDIVGPTGGIIHSCHRTEENVTGEQGGPDVVQPYAAYAPSGTPQGLLVYANRGAEEDFKELQTQGIKLEGTIALTRYGGVGRGAKAVNAAKHGVAGVLVYTDPADINDGLSSPDETFPNSWYLPPSGVERGSYYEYFGDPLTPYLPAVPSSFRVDLANVSGFPPIPTQPIGFQDARDLLCNLNGTLAPATWQGALGCHYRLGPGFRPDGDFPADSQVNVSVYNRLELRNSSNVLGIIRGAVEPGEPSSCCLHPRPLLCSGCRCPHPALPLPPPSPAPPAHLSLSSGSLPLFLWPDRYVLYGNHRDSWVHGAVDPSSGTAVLLELSRVLGTLLKKGTWRPRRSIVFASWGAEEFGLIGSTEFTEEFFNKLQERTVAYINVDISVFANATLRVQGTPPVQSVVFSATKEIRSPGPGDLSIYDNWIRYFNRSSPVYGLVPSLGSLGAGSDYAPFVHFLGISSMDIAYTYDRSKTSARIYPTYHTAFDTFDYVDKFLDPGFSSHQAVARTAGSVILRLSDSFFLPLKVSDYSETLRSFLQAAQQDLGALLEQHSISLGPLVTAVEKFEAEAAALGQRISTLQKGSPDPLQVRMLNDQLMLLERTFLNPRAFPEERYYSHVLWAPRTGSVVTFPGLSNACSRARDTASGSEAWAEVQRQLSIVVTALEGAAATLRPVADL

SEQ ID NO: 54801 - protein, 699 aa, Homo sapiens
  Payload ID: 10824
  Gene Symbol: NAALADL1
  Gene Name: N-acetylated alpha-linked acidic dipeptidase-like 1
  Uniprot ID: Q9UQQ1
  ENSP ID: ENSP00000347955
MQWTKVLGLGLGAAALLGLGIILGHFAIPKKANSLAPQDLDLEILETVMGQLDAHRIRENLRELSREPHLASSPRDEDLVQLLLQRWKDPESGLDSAEASTYEVLLSFPSQEQPNVVDIVGPTGGIIHSCHRTEENVTGEQGGPDVVQPYAAYAPSGTPQAVNAAKHGVAGVLVYTDPADINDGLSSPDETFPNSWYLPPSGVERGSYYEYFGDPLTPYLPAVPSSFRVDLANVSGFPPIPTQPIGFQDARDLLCNLNGTLAPATWQGALGCHYRLGPGFRPDGDFPADSQVNVSVYNRLELRNSSNVLGIIRGAVEPDRYVLYGNHRDSWVHGAVDPSSGTAVLLELSRVLGTLLKKGTWRPRRSIVFASWGAEEFGLIGSTEFTEEFFNKLQERTVAYINVDISVFANATLRVQGTPPVQSVVFSATKEIRSPGPGDLSIYDNWIRYFNRSSPVYGLVPSLGSLGAGSDYAPFVHFLGISSMDIAYTYDRSKTSARIYPTYHTAFDTFDYVDKFLDPGFSSHQAVARTAGSVILRLSDSFFLPLKVSDYSETLRSFLQAAQQDLGALLEQHSISLGPLVTAVEKFEAEAAALGQRISTLQKGSPDPLQVRMLNDQLMLLERTFLNPRAFPEERYYSHVLWAPRTGSVVTFPGLSNACSRARDTASGSEAWAEVQRQLSIVVTALEGAAATLRPVADL

SEQ ID NO: 54802 - protein, 705 aa, Homo sapiens
  Payload ID: 10824
  Gene Symbol: NAALADL1
  Gene Name: N-acetylated alpha-linked acidic dipeptidase-like 1
  ENSP ID: ENSP00000349045
MQWTKVLGLGLGAAALLGLGIILGHFAIPKKANSLAPQDLDLEILETVMGQLDAHRIRENLRELSREPHLASSPRDEDLVQLLLQRWKDPESGLDSAEASTYEVLLSFPSQEQPNVVDIVGPTGGIIHSCHRTEENVTGEQGGPDVVQPYAAYAPSGTPQGLLVYANRGAEEDFKELQTQGIKLEGTIALTRYGGVGRGAKAVNAAKHGVAGVLVYTDPADINDGLSSPDETFPNSWYLPPSGVERGSYYEYFGDPLTPYLPAVPSSFRVDLANVSGFPPIPTQPIGFQDARDLLCQVNVSVYNRLELRNSSNVLGIIRGAVEPDRYVLYGNHRDSWVHGAVDPSSGTAVLLELSRVLGTLLKKGTWRPRRSIVFASWGAEEFGLIGSTEFTEEFFNKLQERTVAYINVDISVFANATLRVQGTPPVQSVVFSATKEIRSPGPGDLSIYDNWIRYFNRSSPVYGLVPSLGSLGAGSDYAPFVHFLGISSMDIAYTYDRSKTSARIYPTYHTAFDTFDYVDKFLDPGFSSHQAVARTAGSVILRLSDSFFLPLKVSDYSETLRSFLQAAQQDLGALLEQHSISLGPLVTAVEKFEAEAAALGQRISTLQKGSPDPLQVRMLNDQLMLLERTFLNPRAFPEERYYSHVLWAPRTGSVVTFPGLSNACSRARDTASGSEAWAEVQRQLSIVVTALEGAAATLRPVADL

SEQ ID NO: 54803 - protein, 740 aa, Homo sapiens
  Payload ID: 10824
  Gene Symbol: NAALADL1
  Gene Name: N-acetylated alpha-linked acidic dipeptidase-like 1
  Uniprot ID: Q9UQQ1
  ENSP ID: ENSP00000351484
MQWTKVLGLGLGAAALLGLGIILGHFAIPKKANSLAPQDLDLEILETVMGQLDAHRIRENLRELSREPHLASSPRDEDLVQLLLQRWKDPESGLDSAEASTYEVLLSFPSQEQPNVVDIVGPTGGIIHSCHRTEENVTGEQGGPDVVQPYAAYAPSGTPQGLLVYANRGAEEDFKELQTQGIKLEGTIALTRYGGVGRGAKAVNAAKHGVAGVLVYTDPADINDGLSSPDETFPNSWYLPPSGVERGSYYEYFGDPLTPYLPAVPSSFRVDLANVSGFPPIPTQPIGFQDARDLLCNLNGTLAPATWQGALGCHYRLGPGFRPDGDFPADSQVNVSVYNRLELRNSSNVLGIIRGAVEPDRYVLYGNHRDSWVHGAVDPSSGTAVLLELSRVLGTLLKKGTWRPRRSIVFASWGAEEFGLIGSTEFTEEFFNKLQERTVAYINVDISVFANATLRVQGTPPVQSVVFSATKEIRSPGPGDLSIYDNWIRYFNRSSPVYGLVPSLGSLGAGSDYAPFVHFLGISSMDIAYTYDRSKTSARIYPTYHTAFDTFDYVDKFLDPGFSSHQAVARTAGSVILRLSDSFFLPLKVSDYSETLRSFLQAAQQDLGALLEQHSISLGPLVTAVEKFEAEAAALGQRISTLQKGSPDPLQVRMLNDQLMLLERTFLNPRAFPEERYYSHVLWAPRTGSVVTFPGLSNACSRARDTASGSEAWAEVQRQLSIVVTALEGAAATLRPVADL

SEQ ID NO: 54804 - protein, 61 aa, Homo sapiens
  Payload ID: 10824
  Gene Symbol: NAALADL1
  Gene Name: N-acetylated alpha-linked acidic dipeptidase-like 1
  ENSP ID: ENSP00000431322
MLNDQLMLLERTFLNPRAFPEERYYSHVLWAPRTGSVVTFPGLSNACSRARDTASGSEAWA

SEQ ID NO: 54805 - protein, 26 aa, Homo sapiens
  Payload ID: 10824
  Gene Symbol: NAALADL1
  Gene Name: N-acetylated alpha-linked acidic dipeptidase-like 1
  ENSP ID: ENSP00000431513
MLNDQLMLLERTFLNPRAFPEERYYR

SEQ ID NO: 54806 - protein, 87 aa, Homo sapiens
  Payload ID: 10824
  Gene Symbol: NAALADL1
  Gene Name: N-acetylated alpha-linked acidic dipeptidase-like 1
  ENSP ID: ENSP00000431977
MLNDQLMLLERTFLNPRAFPEERYYSHVLWAPRTGSVVTFPGLSNACSRARDTASGSEAWAEVQRQLSIVVTALEGAAATLRPVADL

SEQ ID NO: 54807 - protein, 77 aa, Homo sapiens
  Payload ID: 10824
  Gene Symbol: NAALADL1
  Gene Name: N-acetylated alpha-linked acidic dipeptidase-like 1
  ENSP ID: ENSP00000433538
MLNDQLMLLERTFLNPRAFPEERYYSHVLWAPRTGSVVTFPGLSNACSRARDTASGSEAWAEVQRQLSIVVTALEGA

SEQ ID NO: 54808 - protein, 27 aa, Homo sapiens
  Payload ID: 10824
  Gene Symbol: NAALADL1
  Gene Name: N-acetylated alpha-linked acidic dipeptidase-like 1
  ENSP ID: ENSP00000433892
MLNDQLMLLERTFLNPRAFPEERYYSH

SEQ ID NO: 54809 - protein, 98 aa, Homo sapiens
  Payload ID: 10824
  Gene Symbol: NAALADL1
  Gene Name: N-acetylated alpha-linked acidic dipeptidase-like 1
  ENSP ID: ENSP00000434225
ETLRSFLQAAQQDLGALLEQHSISLGPLVTAVEKFEAEAAALGQRISTLQKGSPDPLQVRMLNDQLMLLERTFLNPRAFPEERYYSPPFTPTLSCLLS

SEQ ID NO: 54810 - protein, 70 aa, Homo sapiens
  Payload ID: 10824
  Gene Symbol: NAALADL1
  Gene Name: N-acetylated alpha-linked acidic dipeptidase-like 1
  ENSP ID: ENSP00000434233
MDIAYTYDRSKTSARIYPTYHTAFDTFDYVDKFLDPGFSSHQAVARTAGSVILRLSDSFFLPLKVSDYSE

SEQ ID NO: 54811 - protein, 74 aa, Homo sapiens
  Payload ID: 10824
  Gene Symbol: NAALADL1
  Gene Name: N-acetylated alpha-linked acidic dipeptidase-like 1
  ENSP ID: ENSP00000435267
MLNDQLMLLERTFLNPRAFPEERYYSHVLWAPRTGSVVTFPGLSNACSRARDTASGSEAWAEVQRQLSIVVTAL

SEQ ID NO: 54812 - protein, 35 aa, Homo sapiens
  Payload ID: 10824
  Gene Symbol: NAALADL1
  Gene Name: N-acetylated alpha-linked acidic dipeptidase-like 1
  ENSP ID: ENSP00000435549
MLNDQLMLLERTFLNPRAFPEERYYSHVLWAPRTG

SEQ ID NO: 54813 - protein, 48 aa, Homo sapiens
  Payload ID: 10824
  Gene Symbol: NAALADL1
  Gene Name: N-acetylated alpha-linked acidic dipeptidase-like 1
  ENSP ID: ENSP00000435917
SPGPGDLSIYDNWIRYFNRSSPVYGLVPRLQQPSGCGPDSGECDSPAQ

SEQ ID NO: 54814 - protein, 54 aa, Homo sapiens
  Payload ID: 10825
  Gene Symbol: NAALADL2
  Gene Name: N-acetylated alpha-linked acidic dipeptidase-like 2
  ENSP ID: ENSP00000396969
AEVIDVSYGMADDLKRIRKIKNVTNQIALLKLGKLPLLYKMKVLDKADQTSPLY

SEQ ID NO: 54815 - protein, 795 aa, Homo sapiens
  Payload ID: 10825
  Gene Symbol: NAALADL2
  Gene Name: N-acetylated alpha-linked acidic dipeptidase-like 2
  Uniprot ID: Q58DX5
  ENSP ID: ENSP00000404705
MGENEASLPNTSLQGKKMAYQKVHADQRAPGHSQYLDNDDLQATALDLEWDMEKELEESGFDQFQLDGAENQNLGHSETIDLNLDSIQPATSPKGRFQRLQEESDYITHYTRSAPKSNRCNFCHVLKILCTATILFIFGILIGYYVHTNCPSDAPSSGTVDPQLYQEILKTIQAEDIKKSFRNLVQLYKNEDDMEISKKIKTQWTSLGLEDVQFVNYSVLLDLPGPSPSTVTLSSSGQCFHPNGQPCSEEARKDSSQDLLYSYAAYSAKGTLKAEVIDVSYGMADDLKRIRKIKNVTNQIALLKLGKLPLLYKLSSLEKAGFGGVLLYIDPCDLPKTVNPSHDTFMVSLNPGGDPSTPGYPSVDESFRQSRSNLTSLLVQPISAPLVAKLISSPKARTKNEACSSLELPNNEIRVVSMQVQTVTKLKTVTNVVGFVMGLTSPDRYIIVGSHHHTAHSYNGQEWASSTAIITAFIRALMSKVKRGWRPDRTIVFCSWGGTAFGNIGSYEWGEDFKKVLQKNVVAYISLHSPIRGNSSLYPVASPSLQQLVVEKNNFNCTRRAQCPETNISSIQIQGDADYFINHLGVPIVQFAYEDIKTLEGPSFLSEARFSTRATKIEEMDPSFNLHETITKLSGEVILQIANEPVLPFNALDIALEVQNNLKGDQPNTHQLLAMALRLRESAELFQSDEMRPANDPKERAPIRIRMLNDILQDMEKSFLVKQAPPGFYRNILYHLDEKTSRFSILIEAWEHCKPLASNETLQEALSEVLNSINSAQVYFKAGLDVFKSVLDGKN

SEQ ID NO: 54816 - protein, 115 aa, Homo sapiens
  Payload ID: 10825
  Gene Symbol: NAALADL2
  Gene Name: N-acetylated alpha-linked acidic dipeptidase-like 2
  ENSP ID: ENSP00000409858
MAYQKVHADQRAPGHSQYLDNDDLQATALDLEWDMEKELEESGFDQFQLDGAENQNLGHSETIDLNLDSIQPATSPKGRFQRLQEESDYITHYTRSAPKSNRCNFCHVLKILCTA

SEQ ID NO: 54817 - protein, 783 aa, Homo sapiens
  Payload ID: 10825
  Gene Symbol: NAALADL2
  Gene Name: N-acetylated alpha-linked acidic dipeptidase-like 2
  ENSP ID: ENSP00000479989
FTGKKMAYQKVHADQRAPGHSQYLDNDDLQATALDLEWDMEKELEESGFDQFQLDGAENQNLGHSETIDLNLDSIQPATSPKGRFQRLQEESDYITHYTRSAPKSNRCNFCHVLKILCTATILFIFGILIGYYVHTNCPSDAPSSGTVDPQLYQEILKTIQAEDIKKSFRNLVQLYKNEDDMEISKKIKTQWTSLGLEDVQFVNYSVLLDLPGPSPSTVTLSSSGQCFHPNGQPCSEEARKDSSQDLLYSYAAYSAKGTLKAEVIDVSYGMADDLKRIRKIKNVTNQIALLKLGKLPLLYKLSSLEKAGFGGVLLYIDPCDLPKTVNPSHDTFMVSLNPGGDPSTPGYPSVDESFRQSRSNLTSLLVQPISAPLVAKLISSPKARTKNEACSSLELPNNEIRVVSMQVQTVTKLKTVTNVVGFVMGLTSPDRYIIVGSHHHTAHSYNGQEWASSTAIITAFIRALMSKVKRGWRPDRTIVFCSWGGTAFGNIGSYEWGEDFKKVLQKNVVAYISLHSPIRGNSSLYPVASPSLQQLVVEKNNFNCTRRAQCPETNISSIQIQGDADYFINHLGVPIVQFAYEDIKTLEGPSFLSEARFSTRATKIEEMDPSFNLHETITKLSGEVILQIANEPVLPFNALDIALEVQNNLKGDQPNTHQLLAMALRLRESAELFQSDEMRPANDPKERAPIRIRMLNDILQDMEKSFLVKQAPPGFYRNILYHLDEKTSRFSILIEAWEHCKPLASNETLQEALSEVLNSINSAQVYFKAGLDVFKSVLDGKN

SEQ ID NO: 54818 - protein, 411 aa, Homo sapiens
  Payload ID: 10826
  Gene Symbol: NAGA
  Gene Name: N-acetylgalactosaminidase, alpha-
  Uniprot ID: P17050
  ENSP ID: ENSP00000379680
MLLKTVLLLGHVAQVLMLDNGLLQTPPMGWLAWERFRCNINCDEDPKNCISEQLFMEMADRMAQDGWRDMGYTYLNIDDCWIGGRDASGRLMPDPKRFPHGIPFLADYVHSLGLKLGIYADMGNFTCMGYPGTTLDKVVQDAQTFAEWKVDMLKLDGCFSTPEERAQGYPKMAAALNATGRPIAFSCSWPAYEGGLPPRVNYSLLADICNLWRNYDDIQDSWWSVLSILNWFVEHQDILQPVAGPGHWNDPDMLLIGNFGLSLEQSRAQMALWTVLAAPLLMSTDLRTISAQNMDILQNPLMIKINQDPLGIQGRRIHKEKSLIEVYMRPLSNKASALVFFSCRTDMPYRYHSSLGQLNFTGSVIYEAQDVYSGDIISGLRDETNFTVIINPSGVVMWYLYPIKNLEMSQQ

SEQ ID NO: 54819 - protein, 411 aa, Homo sapiens; identical to SEQ ID NO: 54818
  Payload ID: 10826
  Gene Symbol: NAGA
  Gene Name: N-acetylgalactosaminidase, alpha-
  Uniprot ID: P17050
  ENSP ID: ENSP00000384603

SEQ ID NO: 54820 - protein, 411 aa, Homo sapiens; identical to SEQ ID NO: 54818
  Payload ID: 10826
  Gene Symbol: NAGA
  Gene Name: N-acetylgalactosaminidase, alpha-
  Uniprot ID: P17050
  ENSP ID: ENSP00000385283

SEQ ID NO: 54821 - protein, 344 aa, Homo sapiens
  Payload ID: 10827
  Gene Symbol: NAGK
  Gene Name: N-acetylglucosamine kinase
  Uniprot ID: Q9UJ70
  ENSP ID: ENSP00000244204
MAAIYGGVEGGGTRSEVLLVSEDGKILAEADGLSTNHWLIGTDKCVERINEMVNRAKRKAGVDPLVPLRSLGLSLSGGDQEDAGRILIEELRDRFPYLSESYLITTDAAGSIATATPDGGVVLISGTGSNCRLINPDGSESGCGGWGHMMGDEGSAYWIAHQAVKIVFDSIDNLEAAPHDIGYVKQAMFHYFQVPDRLGILTHLYRDFDKCRFAGFCRKIAEGAQQGDPLSRYIFRKAGEMLGRHIVAVLPEIDPVLFQGKIGLPILCVGSVWKSWELLKEGFLLALTQGREIQAQNFFSSFTLMKLRHSSALGGASLGARHIGHLLPMDYSANAIAFYSYTFS

SEQ ID NO: 54822 - protein, 390 aa, Homo sapiens
  Payload ID: 10827
  Gene Symbol: NAGK
  Gene Name: N-acetylglucosamine kinase
  Uniprot ID: Q9UJ70
  ENSP ID: ENSP00000389087
MRTRTGSQLAAREVTGSGAVPRQLEGRRCQAGRDANGGTSSDGSSSMAAIYGGVEGGGTRSEVLLVSEDGKILAEADGLSTNHWLIGTDKCVERINEMVNRAKRKAGVDPLVPLRSLGLSLSGGDQEDAGRILIEELRDRFPYLSESYLITTDAAGSIATATPDGGVVLISGTGSNCRLINPDGSESGCGGWGHMMGDEGSAYWIAHQAVKIVFDSIDNLEAAPHDIGYVKQAMFHYFQVPDRLGILTHLYRDFDKCRFAGFCRKIAEGAQQGDPLSRYIFRKAGEMLGRHIVAVLPEIDPVLFQGKIGLPILCVGSVWKSWELLKEGFLLALTQGREIQAQNFFSSFTLMKLRHSSALGGASLGARHIGHLLPMDYSANAIAFYSYTFS

SEQ ID NO: 54823 - protein, 293 aa, Homo sapiens
  Payload ID: 10827
  Gene Symbol: NAGK
  Gene Name: N-acetylglucosamine kinase
  ENSP ID: ENSP00000396070
MVNRAKRKAGVDPLVPLRSLGLSLSGGDQEDAGRILIEELRDRFPYLSESYLITTDAAGSIATATPDGGVVLISGTGSNCRLINPDGSESGCGGWGHMMGDEGSAYWIAHQAVKIVFDSIDNLEAAPHDIGYVKQAMFHYFQVPDRLGILTHLYRDFDKCRFAGFCRKIAEGAQQGDPLSRYIFRKAGEMLGRHIVAVLPEIDPVLFQGKIGLPILCVGSVWKSWELLKEGFLLALTQGREIQAQNFFSSFTLMKLRHSSALGGASLGARHIGHLLPMDYSANAIAFYSYTFS

SEQ ID NO: 54824 - protein, 159 aa, Homo sapiens
  Payload ID: 10827
  Gene Symbol: NAGK
  Gene Name: N-acetylglucosamine kinase
  ENSP ID: ENSP00000400941
MAAIYGGVEGGGTRSEVLLVSEDGKILAEADGLSTNHWLIGTDKCVERINEMVNRAKRKAGVDPLVPLRSLGLSLSGGDQEDAGRILIEELRDRFPYLSESYLITTDAAGSIATATPDGGVVLISGTGSNCRLINPDGSESGCGGWGHMMGDEGSALAH

SEQ ID NO: 54825 - protein, 196 aa, Homo sapiens
  Payload ID: 10827
  Gene Symbol: NAGK
  Gene Name: N-acetylglucosamine kinase
  ENSP ID: ENSP00000404531
MMGDEGSAYWIAHQAVKIVFDSIDNLEAAPHDIGYVKQAMFHYFQVPDRLGILTHLYRDFDKCRFAGFCRKIAEGAQQGDPLSRYIFRKAGEMLGRHIVAVLPEIDPVLFQGKIGLPILCVGSVWKSWELLKEGFLLALTQGREIQAQNFFSSFTLMKLRHSSALGGASLGARHIGHLLPMDYSANAIAFYSYTFS

SEQ ID NO: 54826 - protein, 59 aa, Homo sapiens
  Payload ID: 10827
  Gene Symbol: NAGK
  Gene Name: N-acetylglucosamine kinase
  ENSP ID: ENSP00000408550
MRTRTGSQLAAREVTGSGAVPRQLEGRRCQAGRDANGGTSSDGSSSMAAIYGGVEGAYL

SEQ ID NO: 54827 - protein, 340 aa, Homo sapiens
  Payload ID: 10827
  Gene Symbol: NAGK
  Gene Name: N-acetylglucosamine kinase
  ENSP ID: ENSP00000411846
MAAIYGGVEGGGTRSEVLLVSEDGKILAEADGLSTNHWLIGTDKCVERINEMVNRAKRKAGVDPLVPLRSLGLSLSGGDQEDAGRILIEELRDRFPYLSESYLITTDAAGSIATATPDGGVVLISGTGSNCRLINPDGSESGCGGWGHMMGDEGSAYWIAHQAVKIVFDSIDNLEAAPHDIGYVKQAMFHYFQVPDRLGILTHLYRDFDKCRFAGFCRKIAEGAQQGDPLSRYIFRKAGEMLGRHIVAVLPEIDPGKIGLPILCVGSVWKSWELLKEGFLLALTQGREIQAQNFFSSFTLMKLRHSSALGGASLGARHIGHLLPMDYSANAIAFYSYTFS

SEQ ID NO: 54828 - protein, 136 aa, Homo sapiens
  Payload ID: 10827
  Gene Symbol: NAGK
  Gene Name: N-acetylglucosamine kinase
  ENSP ID: ENSP00000431204
DAAGSIATATPDGGVVLISGTGSNCRLINPDGSESGCGGWGHMMGDEGSAYWIAHQAVKIVFDSIDNLEAAPHDIGYVKQAMFHYFQVPDRLGILTHLYRDFDKCRCSAGRPPFPLYLQEGWGDAGQTHRSSVARD

SEQ ID NO: 54829 - protein, 84 aa, Homo sapiens
  Payload ID: 10827
  Gene Symbol: NAGK
  Gene Name: N-acetylglucosamine kinase
  ENSP ID: ENSP00000435207
MVNRAKRKAGVDPLVPLRSLGLSLSGGDQEDAGRILIEELRDRFPYLSESYLITTDAAGSIATATPDGGVVLISGTGSNCRLIN

SEQ ID NO: 54830 - protein, 182 aa, Homo sapiens
  Payload ID: 10827
  Gene Symbol: NAGK
  Gene Name: N-acetylglucosamine kinase
  ENSP ID: ENSP00000435437
  MOD_RES (1)..(1): Any amino acid
XSEVLLVSEDGKILAEADGLSTNHWLIGTDKCVERINEMVNRAKRKAGVDPLVPLRSLGLSLSGGDQEDAGRILIEELRDRFPYLSESYLITTDAAGSIATATPDGGVVLISGTGSNCRLINPDGSESGCGGWGHMMGDEGSAYWIAHQAVKIVFDSIDNLEAAPHDIGYVKQAMFHYFQIG

SEQ ID NO: 54831 - protein, 94 aa, Homo sapiens
  Payload ID: 10827
  Gene Symbol: NAGK
  Gene Name: N-acetylglucosamine kinase
  ENSP ID: ENSP00000436326
MMGDEGSAYWIAHQAVKIVFDSIDNLEAAPHDIGYVKQAMFHYFQVPDRLGILTHLYRDFDKCRFAGFCRKIAEGAQQGDPLSRYIFRKAGEML

SEQ ID NO: 54832 - protein, 109 aa, Homo sapiens
  Payload ID: 10827
  Gene Symbol: NAGK
  Gene Name: N-acetylglucosamine kinase
  ENSP ID: ENSP00000437192
  MOD_RES (1)..(1): Any amino acid
XEAAPHDIGYVKQAMFHYFQVLFQGKIGLPILCVGSVWKSWELLKEGFLLALTQGREIQAQNFFSSFTLMKLRHSSALGGASLGARHIGHLLPMDYSANAIAFYSYTFS

SEQ ID NO: 54833 - protein, 390 aa, Homo sapiens; identical to SEQ ID NO: 54822
  Payload ID: 10827
  Gene Symbol: NAGK
  Gene Name: N-acetylglucosamine kinase
  Uniprot ID: Q9UJ70
  ENSP ID: ENSP00000477639

SEQ ID NO: 54834 - protein, 1256 aa, Homo sapiens
  Payload ID: 10828
  Gene Symbol: GNPTAB
  Gene Name: N-acetylglucosamine-1-phosphate transferase, alpha and beta subunits
  Uniprot ID: Q3T906
  ENSP ID: ENSP00000299314
MLFKLLQRQTYTCLSHRYGLYVCFLGVVVTIVSAFQFGEVVLEWSRDQYHVLFDSYRDNIAGKSFQNRLCLPMPIDVVYTWVNGTDLELLKELQQVREQMEEEQKAMREILGKNTTEPTKKSEKQLECLLTHCIKVPMLVLDPALPANITLKDLPSLYPSFHSASDIFNVAKPKNPSTNVSVVVFDSTKDVEDAHSGLLKGNSRQTVWRGYLTTDKEVPGLVLMQDLAFLSGFPPTFKETNQLKTKLPENLSSKVKLLQLYSEASVALLKLNNPKDFQELNKQTKKNMTIDGKELTISPAYLLWDLSAISQSKQDEDISASRFEDNEELRYSLRSIERHAPWVRNIFIVTNGQIPSWLNLDNPRVTIVTHQDVFRNLSHLPTFSSPAIESHIHRIEGLSQKFIYLNDDVMFGKDVWPDDFYSHSKGQKVYLTWPVPNCAEGCPGSWIKDGYCDKACNNSACDWDGGDCSGNSGGSRYIAGGGGTGSIGVGQPWQFGGGINSVSYCNQGCANSWLADKFCDQACNVLSCGFDAGDCGQDHFHELYKVILLPNQTHYIIPKGECLPYFSFAEVAKRGVEGAYSDNPIIRHASIANKWKTIHLIMHSGMNATTIHFNLTFQNTNDEEFKMQITVEVDTREGPKLNSTAQKGYENLVSPITLLPEAEILFEDIPKEKRFPKFKRHDVNSTRRAQEEVKIPLVNISLLPKDAQLSLNTLDLQLEHGDITLKGYNLSKSALLRSFLMNSQHAKIKNQAIITDETNDSLVAPQEKQVHKSILPNSLGVSERLQRLTFPAVSVKVNGHDQGQNPPLDLETTARFRVETHTQKTIGGNVTKEKPPSLIVPLESQMTKEKKITGKEKENSRMEENAENHIGVTEVLLGRKLQHYTDSYLGFLPWEKKKYFQDLLDEEESLKTQLAYFTDSKNTGRQLKDTFADSLRYVNKILNSKFGFTSRKVPAHMPHMIDRIVMQELQDMFPEEFDKTSFHKVRHSEDMQFAFSYFYYLMSAVQPLNISQVFDEVDTDQSGVLSDREIRTLATRIHELPLSLQDLTGLEHMLINCSKMLPADITQLNNIPPTQESYYDPNLPPVTKSLVTNCKPVTDKIHKAYKDKNKYRFEIMGEEEIAFKMIRTNVSHVVGQLDDIRKNPRKFVCLNDNIDHNHKDAQTVKAVLRDFYESMFPIPSQFELPREYRNRFLHMHELQEWRAYRDKLKFWTHCVLATLIMFTIFSFFAEQLIALKRKIFPRRRIHKEASPNRIRV

SEQ ID NO: 54835 - protein, 71 aa, Homo sapiens
  Payload ID: 10828
  Gene Symbol: GNPTAB
  Gene Name: N-acetylglucosamine-1-phosphate transferase, alpha and beta subunits
  ENSP ID: ENSP00000376651
MLFKLLQRQTYTCLSHRYGLYVCFLGVVVTIVSAFQFGEVVLEWSRDQYHVLFDSYRDNIAGKSFQNRSVR

SEQ ID NO: 54836 - protein, 490 aa, Homo sapiens
  Payload ID: 10828
  Gene Symbol: GNPTAB
  Gene Name: N-acetylglucosamine-1-phosphate transferase, alpha and beta subunits
  Uniprot ID: Q3T906
  ENSP ID: ENSP00000449150
MLFKLLQRQTYTCLSHRYGLYVCFLGVVVTIVSAFQFGEVVLEWSRDQYHVLFDSYRDNIAGKSFQNRLCLPMPIDVVYTWVNGTDLELLKELQQVREQMEEEQKAMREILGKNTTEPTKKSEKQLECLLTHCIKVPMLVLDPALPANITLKDLPSLYPSFHSASDIFNVAKPKNPSTNVSVVVFDSTKDVEDAHSGLLKGNSRQTVWRGYLTTDKEVPGLVLMQDLAFLSGFPPTFKETNQLKTKLPENLSSKVKLLQLYSEASVALLKLNNPKDFQELNKQTKKNMTIDGKELTISPAYLLWDLSAISQSKQDEDISASRFEDNEELRYSLRSIERHAPWVRNIFIVTNGQIPSWLNLDNPRVTIVTHQDVFRNLSHLPTFSSPAIESHIHRIEGLSQKFIYLNDDVMFGKDVWPDDFYSHSKGQKVYLTWPVPNCAEGCPGSWIKDGYCDKACNNSACDWDGGDCSGKDVLNCNSFIFMEYFLLNHY

SEQ ID NO: 54837 - protein, 138 aa, Homo sapiens
  Payload ID: 10828
  Gene Symbol: GNPTAB
  Gene Name: N-acetylglucosamine-1-phosphate transferase, alpha and beta subunits
  ENSP ID: ENSP00000449217
EKQLECLLTHCIKVPMLVLDPALPANITLKDLPSLYPSFHSASDIFNVAKPKNPSTNVSVVVFDSTKDVEDAHSGLLKGNSRQTVWRGYLTTDKEVPGLVLMQDLAFLSGFPPTFKETNQLKTKLPENLSSKVKLVRT

SEQ ID NO: 54838 - protein, 117 aa, Homo sapiens
  Payload ID: 10828
  Gene Symbol: GNPTAB
  Gene Name: N-acetylglucosamine-1-phosphate transferase, alpha and beta subunits
  ENSP ID: ENSP00000449557
  MOD_RES (1)..(1): Any amino acid
XDITQLNNIPPTQESYYDPNLPPVTKSLVTNCKPVTDKIHKAYKDKNKYRFEIMGEEEIAFKMIRTNVSHVVGQLDDIRKNPRISLCCPSWNAVMQTWLTVASTSWAQAILPPQPPD

SEQ ID NO: 54839 - protein, 96 aa, Homo sapiens
  Payload ID: 10828
  Gene Symbol: GNPTAB
  Gene Name: N-acetylglucosamine-1-phosphate transferase, alpha and beta subunits
  ENSP ID: ENSP00000450161
PPVTKSLVTNCKPVTDKIHKAYKDKNKYRFEIMGEEEIAFKMIRTNVSHVVGQLDDIRKNPRISLCCPSWNAVMQTWLTVASTSWAQAILPPQPPD

SEQ ID NO: 54840 - protein, 68 aa, Homo sapiens
  Payload ID: 10828
  Gene Symbol: GNPTAB
  Gene Name: N-acetylglucosamine-1-phosphate transferase, alpha and beta subunits
  ENSP ID: ENSP00000450413
MLFKLLQRQTYTCLSHRYGLYVCFLGVVVTIVSAFQFGEVVLEWSRDQYHVLFDSYRDNIAGKSFQNR

SEQ ID NO: 54841 - protein, 305 aa, Homo sapiens
  Payload ID: 10829
  Gene Symbol: GNPTG
  Gene Name: N-acetylglucosamine-1-phosphate transferase, gamma subunit
  Uniprot ID: Q9UJJ9
  ENSP ID: ENSP00000204679
MAAGLARLLLLLGLSAGGPAPAGAAKMKVVEEPNAFGVNNPFLPQASRLQAKRDPSPVSGPVHLFRLSGKCFSLVESTYKYEFCPFHNVTQHEQTFRWNAYSGILGIWHEWEIANNTFTGMWMRDGDACRSRSRQSKVELACGKSNRLAHVSEPSTCVYALTFETPLVCHPHALLVYPTLPEALQRQWDQVEQDLADELITPQGHEKLLRTLFEDAGYLKTPEENEPTQLEGGPDSLGFETLENCRKAHKELSKEIKRLKGLLTQHGIPYTRPTETSNLEHLGHETPRAKSPEQLRGDPGLRGSL

SEQ ID NO: 54842 - protein, 76 aa, Homo sapiens
  Payload ID: 10829
  Gene Symbol: GNPTG
  Gene Name: N-acetylglucosamine-1-phosphate transferase, gamma subunit
  ENSP ID: ENSP00000434413
MAAGLARLLLLLGLSAGGPAPAGAAKMKVVEEPNAFGVNNPFLPQASRLQAKRDPSPVSETGFHRVSQDGLDLLTS

SEQ ID NO: 54843 - protein, 184 aa, Homo sapiens
  Payload ID: 10829
  Gene Symbol: GNPTG
  Gene Name: N-acetylglucosamine-1-phosphate transferase, gamma subunit
  ENSP ID: ENSP00000435349
  MOD_RES (1)..(1): Any amino acid
XRLLLLLGLSAGGEWPGRPRPQAPRALCTPASPLTVSLPVGPAPAGAAKMKVVEEPNAFGVNNPFLPQASRLQAKRDPSPVSGPVHLFRLSGKCFSLVESTYKYEFCPFHNVTQHEQTFRWNAYSGILGIWHEWEIANNTFTGMWMRDGDACRSRSRQSKVELACGKSNRLAHVSEPSTCVYAL

SEQ ID NO: 54844 - protein, 76 aa, Homo sapiens; identical to SEQ ID NO: 54842
  Payload ID: 10829
  Gene Symbol: GNPTG
  Gene Name: N-acetylglucosamine-1-phosphate transferase, gamma subunit
  ENSP ID: ENSP00000460728

SEQ ID NO: 54845 - protein, 61 aa, Homo sapiens
  Payload ID: 10829
  Gene Symbol: GNPTG
  Gene Name: N-acetylglucosamine-1-phosphate transferase, gamma subunit
  ENSP ID: ENSP00000480060
MAAGLARLLLLLGLSAGGPAPAGAAKMKVVEEPNAFGVNNPFLPQASRLQAKRDPSPVSGE

SEQ ID NO: 54846 - protein, 515 aa, Homo sapiens
  Payload ID: 10830
  Gene Symbol: NAGPA
  Gene Name: N-acetylglucosamine-1-phosphodiester alpha-N-acetylglucosaminidase
  Uniprot ID: Q9UK23
  ENSP ID: ENSP00000310998
MATSTGRWLLLRLALFGFLWEASGGLDSGASRDDDLLLPYPRARARLPRDCTRVRAGNREHESWPPPPATPGAGGLAVRTFVSHFRDRAVAGHLTRAVEPLRTFSVLEPGGPGGCAARRRATVEETARAADCRVAQNGGFFRMNSGECLGNVVSDERRVSSSGGLQNAQFGIRRDGTLVTGYLSEEEVLDTENPFVQLLSGVVWLIRNGSIYINESQATECDETQETGSFSKFVNVISARTAIGHDRKGQLVLFHADGQTEQRGINLWEMAEFLLKQDVVNAINLDGGGSATFVLNGTLASYPSDHCQDNMWRCPRQVSTVVCVHEPRCQPPDCHGHGTCVDGHCQCTGHFWRGPGCDELDCGPSNCSQHGLCTETGCRCDAGWTGSNCSEECPLGWHGPGCQRPCKCEHHCPCDPKTGNCSVSRVKQCLQPPEATLRAGELSFFTRTAWLALTLALAFLLLISTAANLSLLLSRAERNRRLHGDYAYHPLQEMNGEPLAAEKEQPGGAHNPFKD

SEQ ID NO: 54847 - protein, 481 aa, Homo sapiens
  Payload ID: 10830
  Gene Symbol: NAGPA
  Gene Name: N-acetylglucosamine-1-phosphodiester alpha-N-acetylglucosaminidase
  Uniprot ID: Q9UK23
  ENSP ID: ENSP00000371381
MATSTGRWLLLRLALFGFLWEASGGLDSGASRDDDLLLPYPRARARLPRDCTRVRAGNREHESWPPPPATPGAGGLAVRTFVSHFRDRAVAGHLTRAVEPLRTFSVLEPGGPGGCAARRRATVEETARAADCRVAQNGGFFRMNSGECLGNVVSDERRVSSSGGLQNAQFGIRRDGTLVTGYLSEEEVLDTENPFVQLLSGVVWLIRNGSIYINESQATECDETQETGSFSKFVNVISARTAIGHDRKGQLVLFHADGQTEQRGINLWEMAEFLLKQDVVNAINLDGGGSATFVLNGTLASYPSDHCQDNMWRCPRQVSTVVCVHEPRCQPPDCHGHGTCVDGHCQCTGHFWRGPGCDELDCGPSNCSQHGLCTETGCRCDAGWTGSNCSEVKQCLQPPEATLRAGELSFFTRTAWLALTLALAFLLLISTAANLSLLLSRAERNRRLHGDYAYHPLQEMNGEPLAAEKEQPGGAHNPFKD

SEQ ID NO: 54848 - protein, 309 aa, Homo sapiens
  Payload ID: 10830
  Gene Symbol: NAGPA
  Gene Name: N-acetylglucosamine-1-phosphodiester alpha-N-acetylglucosaminidase
  Uniprot ID: Q9UK23
  ENSP ID: ENSP00000455900
MATSTGRWLLLRLALFGFLWEASGGLDSGASRDDDLLLPYPRARARLPRDCTRVRAGNREHESWPPPPATPGAGGLAVRTFVSHFRDRAVAGHLTRAVEPLRTFSVLEPGGPGGCAARRRATVEETARAADCRVAQNGGFFRMNSGECLGNVVSDERRVSSSGGLQNAQFGIRRDGTLVTGYLSEEEVLDTENPFVQLLSGVVWLIRNGSIYINESQATECDETQETGSFSKFVNVISARTAIGHDRKGQLVLFHADGQTEQRGINLWEMAEFLLKQDVVNAINLDGGGSATFVLNGTLASYPSDHWQA

SEQ ID NO: 54849 - protein, 104 aa, Homo sapiens
  Payload ID: 10830
  Gene Symbol: NAGPA
  Gene Name: N-acetylglucosamine-1-phosphodiester alpha-N-acetylglucosaminidase
  ENSP ID: ENSP00000464994
NREHESWPPPPATPGAGGLAVRTFVSHFRDRAVAGHLTRAVEPLRTFSVLEPGGPGGCAARRRATVEETARAADCRVAQNGGFFRMNSGECLGNVVSDERRVPV

SEQ ID NO: 54850 - protein, 40 aa, Homo sapiens
  Payload ID: 10830
  Gene Symbol: NAGPA
  Gene Name: N-acetylglucosamine-1-phosphodiester alpha-N-acetylglucosaminidase
  ENSP ID: ENSP00000465523
  MOD_RES (1)..(1): Any amino acid
XSSSGGLQNAQFGIRRDGTLVTGMGIGIASLQSLFIIQYH

SEQ ID NO: 54851 - protein, 172 aa, Homo sapiens
  Payload ID: 10830
  Gene Symbol: NAGPA
  Gene Name: N-acetylglucosamine-1-phosphodiester alpha-N-acetylglucosaminidase
  ENSP ID: ENSP00000465949
VSDERRVSSSGGLQNAQFGIRRDGTLVTGYLSEEEVLDTENPFVQLLSGVVWLIRNGSIYINESQATECDETQETGSFSKFVNVISARTAIGHDRKGQLVLFHADGQTEQRGINLWEMAEFLLKQDVVNAINLDGGGSATFVLNGTLASYPSDHCCSGGSGGRIAIPHLKNR

SEQ ID NO: 54852 - protein, 315 aa, Homo sapiens
  Payload ID: 10830
  Gene Symbol: NAGPA
  Gene Name: N-acetylglucosamine-1-phosphodiester alpha-N-acetylglucosaminidase
  ENSP ID: ENSP00000467385
  MOD_RES (1)..(1): Any amino acid
XESWPPPPATPGAGGLAVRTFVSHFRDRAVAGHLTRAVEPLRTFSVLEPGGPGGCAARRRATVEETARAADCRVAQNGGFFRMNSGECLGNVVSDERRVSSSGGLQNAQFGIRRDGTLVTGYLSEEEVLDTENPFVQLLSGVVWLIRNGSIYINESQATECDETQETGSFSKFVNVISARTAIGHDRKGQLVLFHADGQTEQRGINLWEMAEFLLKQDVVNAINLDGGGSATFVLNGTLASYPSDHWTAWLALTLALAFLLLISTAANLSLLLSRAERNRRLHGDYAYHPLQEMNGEPLAAEKEQPGGAHNPFKD

SEQ ID NO: 54853 - protein, 190 aa, Homo sapiens
  Payload ID: 10830
  Gene Symbol: NAGPA
  Gene Name: N-acetylglucosamine-1-phosphodiester alpha-N-acetylglucosaminidase
  ENSP ID: ENSP00000468270
  MOD_RES (1)..(1): Any amino acid
XHESWPPPPATPGAGGLAVRTFVSHFRDRAVAGHLTRAVEPLRTFSVLEPGGPGGCAARRRATVEETARAADCRVAQNGGFFRMNSGECLGNVVSDERRVSSSGGLQNAQFGIRRDGTLVTGYLSEEEVLDTENPFVQLLSGVVWLIRNGSIYINESQATECDETQETARTTCGAVPAKCPPWCVCTNPA

SEQ ID NO: 54854 - protein, 743 aa, Homo sapiens
  Payload ID: 10831
  Gene Symbol: NAGLU
  Gene Name: N-acetylglucosaminidase, alpha
  Uniprot ID: P54802
  ENSP ID: ENSP00000225927
MEAVAVAAAVGVLLLAGAGGAAGDEAREAAAVRALVARLLGPGPAADFSVSVERALAAKPGLDTYSLGGGGAARVRVRGSTGVAAAAGLHRYLRDFCGCHVAWSGSQLRLPRPLPAVPGELTEATPNRYRYYQNVCTQSYSFVWWDWARWEREIDWMALNGINLALAWSGQEAIWQRVYLALGLTQAEINEFFTGPAFLAWGRMGNLHTWDGPLPPSWHIKQLYLQHRVLDQMRSFGMTPVLPAFAGHVPEAVTRVFPQVNVTKMGSWGHFNCSYSCSFLLAPEDPIFPIIGSLFLRELIKEFGTDHIYGADTFNEMQPPSSEPSYLAAATTAVYEAMTAVDTEAVWLLQGWLFQHQPQFWGPAQIRAVLGAVPRGRLLVLDLFAESQPVYTRTASFQGQPFIWCMLHNFGGNHGLFGALEAVNGGPEAARLFPNSTMVGTGMAPEGISQNEVVYSLMAELGWRKDPVPDLAAWVTSFAARRYGVSHPDAGAAWRLLLRSVYNCSGEACRGHNRSPLVRRPSLQMNTSIWYNRSDVFEAWRLLLTSAPSLATSPAFRYDLLDLTRQAVQELVSLYYEEARSAYLSKELASLLRAGGVLAYELLPALDEVLASDSRFLLGSWLEQARAAAVSEAEADFYEQNSRYQLTLWGPEGNILDYANKQLAGLVANYYTPRWRLFLEALVDSVAQGIPFQQHQFDKNVFQLEQAFVLSKQRYPSQPRGDTVDLAKKIFLKYYPRWVAGSW

SEQ ID NO: 54855 - protein, 81 aa, Homo sapiens
  Payload ID: 10831
  Gene Symbol: NAGLU
  Gene Name: N-acetylglucosaminidase, alpha
  ENSP ID: ENSP00000466892
MGDLFQGRGPSRVGCAPAHDTARRYRYYQNVCTQSYSFVWWDWARWEREIDWMALNGINLALAWSGQEAIWQRVYLALGLT

SEQ ID NO: 54856 - protein, 170 aa, Homo sapiens
  Payload ID: 10831
  Gene Symbol: NAGLU
  Gene Name: N-acetylglucosaminidase, alpha
  ENSP ID: ENSP00000467135
  MOD_RES (1)..(1): Any amino acid
XGRRGAAPLPARLLWLPRGLVRLSAAPAAATASRAGGADRGHAQQVYLALGLTQAEINEFFTGPAFLAWGRMGNLHTWDGPLPPSWHIKQLYLQHRVLDQMRSFGMTPVLPAFAGHVPEAVTRVFPQVNVTKMGSWGHFNCSYSCSFLLAPEDPIFPIIGSLFLRELIKE

SEQ ID NO: 54857 - protein, 122 aa, Homo sapiens
  Payload ID: 10831
  Gene Symbol: NAGLU
  Gene Name: N-acetylglucosaminidase, alpha
  ENSP ID: ENSP00000467836
RGAAPLPARLLWLPRGLVRLSAAPAAATASRAGGADRGHAQQVYLALGLTQAEINEFFTGPAFLAWGRMGNLHTWDGPLPPSWHIKQLYLQHRVLDQMRSFGMTPVLPAFAGHVPEAVTSGY

SEQ ID NO: 54858 - protein, 65 aa, Homo sapiens
  Payload ID: 10831
  Gene Symbol: NAGLU
  Gene Name: N-acetylglucosaminidase, alpha
  ENSP ID: ENSP00000468665
  MOD_RES (1)..(1): Any amino acid
XFGTDHIYGADTFNEMQPPSSEPSYLAAATTAVYEAMTAVLGARPDQGCAGSCAPWPPPGSGPVC

SEQ ID NO: 54859 - protein, 534 aa, Homo sapiens
  Payload ID: 10832
  Gene Symbol: NAGS
  Gene Name: N-acetylglutamate synthase
  Uniprot ID: Q8N159
  ENSP ID: ENSP00000293404
MATALMAVVLRAAAVAPRLRGRGGTGGARRLSCGARRRAARGTSPGRRLSTAWSQPQPPPEEYAGADDVSQSPVAEEPSWVPSPRPPVPHESPEPPSGRSLVQRDIQAFLNQCGASPGEARHWLTQFQTCHHSADKPFAVIEVDEEVLKCQQGVSSLAFALAFLQRMDMKPLVVLGLPAPTAPSGCLSFWEAKAQLAKSCKVLVDALRHNAAAAVPFFGGGSVLRAAEPAPHASYGGIVSVETDLLQWCLESGSIPILCPIGETAARRSVLLDSLEVTASLAKALRPTKIIFLNNTGGLRDSSHKVLSNVNLPADLDLVCNAEWVSTKERQQMRLIVDVLSRLPHHSSAVITAASTLLTELFSNKGSGTLFKNAERMLRVRSLDKLDQGRLVDLVNASFGKKLRDDYLASLRPRLHSIYVSEGYNAAAILTMEPVLGGTPYLDKFVVSSSRQGQGSGQMLWECLRRDLQTLFWRSRVTNPINPWYFKHSDGSFSNKQWIFFWFGLADIRDSYELVNHAKGLPDSFHKPASDPGS

SEQ ID NO: 54860 - protein, 511 aa, Homo sapiens
  Payload ID: 10832
  Gene Symbol: NAGS
  Gene Name: N-acetylglutamate synthase
  ENSP ID: ENSP00000465408
SCGARRRAARGTSPGRRLSTAWSQPQPPPEEYAGADDVSQSPVAEEPSWVPSPRPPVPHESPEPPSGRSLVQRDIQAFLNQCGASPGEARHWLTQFQTCHHSADKPFAVIEVDEEVLKCQQGVSSLAFALAFLQRMDMKPLVVLGLPAPTAPSGCLSFWEAKAQLAKSCKVLVDALRHNAAAAVPFFGGGSVLRAAEPAPHASYGGIVSVETDLLQWCLESGSIPILCPIGETAARRSVLLDSLEVTASLAKALRPTKIIFLNNTGGLRDSSHKVLSNVNLPADLDLVCNAEWVSTKERQQMRLIVDVLSRLPHHSSAVITAASTLLTELFSNKGSGTLFKNAERMLRVRSLDKLDQGRLVDLVNASFGKKLRDDYLASLRPRLHSIYVSEGLPLSRCARYNAAAILTMEPVLGGTPYLDKFVVSSSRQGQGSGQMLWECLRRDLQTLFWRSRVTNPINPWYFKHSDGSFSNKQWIFFWFGLADIRDSYELVNHAKGLPDSFHKPASDPGS

SEQ ID NO: 54861 - protein, 320 aa, Homo sapiens
  Payload ID: 10833
  Gene Symbol: NPL
  Gene Name: N-acetylneuraminate pyruvate lyase (dihydrodipicolinate synthase)
  Uniprot ID: Q9BXD5
  ENSP ID: ENSP00000258317
MAFPKKKLQGLVAATITPMTENGEINFSVIGQYVDYLVKEQGVKNIFVNGTTGEGLSLSVSERRQVAEEWVTKGKDKLDQVIIHVGALSLKESQELAQHAAEIGADGIAVIAPFFLKPWTKDILINFLKEVAAAAPALPFYYYHIPALTGVKIRAEELLDGILDKIPTFQGLKFSDTDLLDFGQCVDQNRQQQFAFLFGVDEQLLSALVMGATGAVGSTYNYLGKKTNQMLEAFEQKDFSLALNYQFCIQRFINFVVKLGFGVSQTKAIMTLVSGIPMGPPRLPLQKASREFTDSAEAKLKSLDFLSFTDLKDGNLEAGS

SEQ ID NO: 54862 - protein, 240 aa, Homo sapiens
  Payload ID: 10833
  Gene Symbol: NPL
  Gene Name: N-acetylneuraminate pyruvate lyase (dihydrodipicolinate synthase)
  Uniprot ID: Q9BXD5
  ENSP ID: ENSP00000356523
MAFPKKKLQGLVAATITPMTENGEINFSVIGQYVDYLVKEQGVKNIFVNGTTGEGLSLSVSERRQVAEEWVTKGKDKLDQVIIHVGALSLKESQELAQHAAEIGADGIAVIAPFFLKPWTKDILINFLKEVAAAAPALPFYYYHIPALTGVKIRAEELLDGILDKIPTFQGLKFSDTDLLDFGQCVDQNRQQQFAFLFGVDEFCIQRFINFVVKLENSKLKVSKNQRTLPLGTTNFPFLH

SEQ ID NO: 54863 - protein, 320 aa, Homo sapiens; identical to SEQ ID NO: 54861
  Payload ID: 10833
  Gene Symbol: NPL
  Gene Name: N-acetylneuraminate pyruvate lyase (dihydrodipicolinate synthase)
  Uniprot ID: Q9BXD5
  ENSP ID: ENSP00000356524

SEQ ID NO: 54864 - protein, 301 aa, Homo sapiens
  Payload ID: 10833
  Gene Symbol: NPL
  Gene Name: N-acetylneuraminate pyruvate lyase (dihydrodipicolinate synthase)
  Uniprot ID: Q9BXD5
  ENSP ID: ENSP00000356525
MSRAPGILASWRRAPSLSVQKGSQTARHTCHPEVPLGNCFLPVYKASPLTVTRLWAERLDQVIIHVGALSLKESQELAQHAAEIGADGIAVIAPFFLKPWTKDILINFLKEVAAAAPALPFYYYHIPALTGVKIRAEELLDGILDKIPTFQGLKFSDTDLLDFGQCVDQNRQQQFAFLFGVDEQLLSALVMGATGAVGSTYNYLGKKTNQMLEAFEQKDFSLALNYQFCIQRFINFVVKLGFGVSQTKAIMTLVSGIPMGPPRLPLQKASREFTDSAEAKLKSLDFLSFTDLKDGNLEAGS

SEQ ID NO: 54865 - protein, 240 aa, Homo sapiens; identical to SEQ ID NO: 54862
  Payload ID: 10833
  Gene Symbol: NPL
  Gene Name: N-acetylneuraminate pyruvate lyase (dihydrodipicolinate synthase)
  Uniprot ID: Q9BXD5
  ENSP ID: ENSP00000356526

SEQ ID NO: 54866 - protein, 230 aa, Homo sapiens
  Payload ID: 10833
  Gene Symbol: NPL
  Gene Name: N-acetylneuraminate pyruvate lyase (dihydrodipicolinate synthase)
  ENSP ID: ENSP00000482415
MAFPKKKLQGLVAATITPMTENGEINFSVIGQYVDYLVKEQGVKNIFVNGTTGEGLSLSVSERRQVAEEWVTKGKDKLDQVIIHVGALSLKESQELAQHAAEIGADGIAVIAPFFLKPWTKDILINFLKEVAAAAPALPFYYYHIPALTGVKIRAEELLDGILDKIPTFQGLKFSDTDLLDFGQCVDQNRQQQFAFLFGVDEQLLSALVMGATGAVGSFVSRDLSTLLSN

SEQ ID NO: 54867 - protein, 248 aa, Homo sapiens
  Payload ID: 10834
  Gene Symbol: NANP
  Gene Name: N-acetylneuraminic acid phosphatase
  Uniprot ID: Q8TBE9
  ENSP ID: ENSP00000302441
MGLSRVRAVFFDLDNTLIDTAGASRRGMLEVIKLLQSKYHYKEEAEIICDKVQVKLSKECFHPYNTCITDLRTSHWEEAIQETKGGAANRKLAEECYFLWKSTRLQHMTLAEDVKAMLTELRKEVRLLLLTNGDRQTQREKIEACACQSYFDAVVVGGEQREEKPAPSIFYYCCNLLGVQPGDCVMVGDTLETDIQGGLNAGLKATVWINKNGIVPLKSSPVPHYMVSSVLELPALLQSIDCKVSMST

SEQ ID NO: 54868 - protein, 359 aa, Homo sapiens
  Payload ID: 10835
  Gene Symbol: NANS
  Gene Name: N-acetylneuraminic acid synthase
  Uniprot ID: Q9NR45
  ENSP ID: ENSP00000210444
MPLELELCPGRWVGGQHPCFIIAEIGQNHQGDLDVAKRMIRMAKECGADCAKFQKSELEFKFNRKALERPYTSKHSWGKTYGEHKRHLEFSHDQYRELQRYAEEVGIFFTASGMDEMAVEFLHELNVPFFKVGSGDTNNFPYLEKTAKKGRPMVISSGMQSMDTMKQVYQIVKPLNPNFCFLQCTSAYPLQPEDVNLRVISEYQKLFPDIPIGYSGHETGIAISVAAVALGAKVLERHITLDKTWKGSDHSASLEPGELAELVRSVRLVERALGSPTKQLLPCEMACNEKLGKSVVAKVKIPEGTILTMDMLTVKVGEPKGYPPEDIFNLVGKKVLVTVEEDDTIMEELVDNHGKKIKS

SEQ ID NO: 54869 - protein, 140 aa, Homo sapiens
  Payload ID: 10835
  Gene Symbol: NANS
  Gene Name: N-acetylneuraminic acid synthase
  ENSP ID: ENSP00000404107
MVLVLDYSGRPMVISSGMQSMDTMKQVYQIVKPLNPNFCFLQCTSAYPLQPEDVNLRVISEYQKLFPDIPIGYSGHETGIAISVAAVALGAKVLERHITLDKTWKGSDHSASLEPGELAELVRSVRLVERALGSPTKQLL

SEQ ID NO: 54870 - protein, 115 aa, Homo sapiens
  Payload ID: 10835
  Gene Symbol: NANS
  Gene Name: N-acetylneuraminic acid synthase
  ENSP ID: ENSP00000404642
EDVNLRVISEYQKLFPDIPIGYSGHETGIAISVAAVALGAKVLERHITLDKTWKGSDHSASLEPGELAELVRSVRLVERALGSPTKQLLPCEMACNEKVCPAGLYSVLLPCVEKG

SEQ ID NO: 54871 - protein, 290 aa, Homo sapiens
  Payload ID: 10836
  Gene Symbol: NAT1
  Gene Name: N-acetyltransferase 1 (arylamine N-acetyltransferase)
  Uniprot ID: P18440
  ENSP ID: ENSP00000307218
MDIEAYLERIGYKKSRNKLDLETLTDILQHQIRAVPFENLNIHCGDAMDLGLEAIFDQVVRRNRGGWCLQVNHLLYWALTTIGFETTMLGGYVYSTPAKKYSTGMIHLLLQVTIDGRNYIVDAGFGRSYQMWQPLELISGKDQPQVPCVFRLTEENGFWYLDQIRREQYIPNEEFLHSDLLEDSKYRKIYSFTLKPRTIEDFESMNTYLQTSPSSVFTSKSFCSLQTPDGVHCLVGFTLTHRRFNYKDNTDLIEFKTLSEEEIEKVLKNIFNISLQRKLVPKHGDRFFTI

SEQ ID NO: 54872 - protein, 290 aa, Homo sapiens; identical to SEQ ID NO: 54871
  Payload ID: 10836
  Gene Symbol: NAT1
  Gene Name: N-acetyltransferase 1 (arylamine N-acetyltransferase)
  Uniprot ID: P18440
  ENSP ID: ENSP00000428270

SEQ ID NO: 54873 - protein, 290 aa, Homo sapiens; identical to SEQ ID NO: 54871
  Payload ID: 10836
  Gene Symbol: NAT1
  Gene Name: N-acetyltransferase 1 (arylamine N-acetyltransferase)
  Uniprot ID: P18440
  ENSP ID: ENSP00000429341

SEQ ID NO: 54874 - protein, 290 aa, Homo sapiens; identical to SEQ ID NO: 54871
  Payload ID: 10836
  Gene Symbol: NAT1
  Gene Name: N-acetyltransferase 1 (arylamine N-acetyltransferase)
  Uniprot ID: P18440
  ENSP ID: ENSP00000429407

SEQ ID NO: 54875 - protein, 290 aa, Homo sapiens; identical to SEQ ID NO: 54871
  Payload ID: 10836
  Gene Symbol: NAT1
  Gene Name: N-acetyltransferase 1 (arylamine N-acetyltransferase)
  Uniprot ID: P18440
  ENSP ID: ENSP00000440900

SEQ ID NO: 54876 - protein, 352 aa, Homo sapiens
  Payload ID: 10836
  Gene Symbol: NAT1
  Gene Name: N-acetyltransferase 1 (arylamine N-acetyltransferase)
  ENSP ID: ENSP00000443194
MLLLLLHKEAALEPQGPAVGYNSLPVSDDHHVSGIQARKKQQSVFWIKTEDQPTFNLLRKGIMDIEAYLERIGYKKSRNKLDLETLTDILQHQIRAVPFENLNIHCGDAMDLGLEAIFDQVVRRNRGGWCLQVNHLLYWALTTIGFETTMLGGYVYSTPAKKYSTGMIHLLLQVTIDGRNYIVDAGFGRSYQMWQPLELISGKDQPQVPCVFRLTEENGFWYLDQIRREQYIPNEEFLHSDLLEDSKYRKIYSFTLKPRTIEDFESMNTYLQTSPSSVFTSKSFCSLQTPDGVHCLVGFTLTHRRFNYKDNTDLIEFKTLSEEEIEKVLKNIFNISLQRKLVPKHGDRFFTI

SEQ ID NO: 54877 - protein, 1025 aa, Homo sapiens
  Payload ID: 10837
  Gene Symbol: NAT10
  Gene Name: N-acetyltransferase 10 (GCN5-related)
  Uniprot ID: Q9H0A0
  ENSP ID: ENSP00000257829
MHRKKVDNRIRILIENGVAERQRSLFVVVGDRGKDQVVILHHMLSKATVKARPSVLWCYKKELGFSSHRKKRMRQLQKKIKNGTLNIKQDDPFELFIAATNIRYCYYNETHKILGNTFGMCVLQDFEALTPNLLARTVETVEGGGLVVILLRTMNSLKQLYTVTMDVHSRYRTEAHQDVVGRFNERFILSLASCKKCLVIDDQLNILPISSHVATMEALPPQTPDESLGPSDLELRELKESLQDTQPVGVLVDCCKTLDQAKAVLKFIEGISEKTLRSTVALTAARGRGKSAALGLAIAGAVAFGYSNIFVTSPSPDNLHTLFEFVFKGFDALQYQEHLDYEIIQSLNPEFNKAVIRVNVFREHRQTIQYIHPADAVKLGQAELVVIDEAAAIPLPLVKSLLGPYLVFMASTINGYEGTGRSLSLKLIQQLRQQSAQSQVSTTAENKTTTTARLASARTLYEVSLQESIRYAPGDAVEKWLNDLLCLDCLNITRIVSGCPLPEACELYYVNRDTLFCYHKASEVFLQRLMALYVASHYKNSPNDLQMLSDAPAHHLFCLLPPVPPTQNALPEVLAVIQVCLEGEISRQSILNSLSRGKKASGDLIPWTVSEQFQDPDFGGLSGGRVVRIAVHPDYQGMGYGSRALQLLQMYYEGRFPCLEEKVLETPQEIHTVSSEAVSLLEEVITPRKDLPPLLLKLNERPAERLDYLGVSYGLTPRLLKFWKRAGFVPVYLRQTPNDLTGEHSCIMLKTLTDEDEADQGGWLAAFWKDFRRRFLALLSYQFSTFSPSLALNIIQNRNMGKPAQPALSREELEALFLPYDLKRLEMYSRNMVDYHLIMDMIPAISRIYFLNQLGDLALSAAQSALLLGIGLQHKSVDQLEKEIELPSGQLMGLFNRIIRKVVKLFNEVQEKAIEEQMVAAKDVVMEPTMKTLSDDLDEAAKEFQEKHKKEVGKLKSMDLSEYIIRGDDEEWNEVLNKAGPNASIISLKSDKKRKLEAKQEPKQSKKLKNRETKNKKDMKLKRKK

SEQ ID NO: 54878 - protein, 953 aa, Homo sapiens
  Payload ID: 10837
  Gene Symbol: NAT10
  Gene Name: N-acetyltransferase 10 (GCN5-related)
  Uniprot ID: Q9H0A0
  ENSP ID: ENSP00000433011
MRQLQKKIKNGTLNIKQDDPFELFIAATNIRYCYYNETHKILGNTFGMCVLQDFEALTPNLLARTVETVEGGGLVVILLRTMNSLKQLYTVTMDVHSRYRTEAHQDVVGRFNERFILSLASCKKCLVIDDQLNILPISSHVATMEALPPQTPDESLGPSDLELRELKESLQDTQPVGVLVDCCKTLDQAKAVLKFIEGISEKTLRSTVALTAARGRGKSAALGLAIAGAVAFGYSNIFVTSPSPDNLHTLFEFVFKGFDALQYQEHLDYEIIQSLNPEFNKAVIRVNVFREHRQTIQYIHPADAVKLGQAELVVIDEAAAIPLPLVKSLLGPYLVFMASTINGYEGTGRSLSLKLIQQLRQQSAQSQVSTTAENKTTTTARLASARTLYEVSLQESIRYAPGDAVEKWLNDLLCLDCLNITRIVSGCPLPEACELYYVNRDTLFCYHKASEVFLQRLMALYVASHYKNSPNDLQMLSDAPAHHLFCLLPPVPPTQNALPEVLAVIQVCLEGEISRQSILNSLSRGKKASGDLIPWTVSEQFQDPDFGGLSGGRVVRIAVHPDYQGMGYGSRALQLLQMYYEGRFPCLEEKVLETPQEIHTVSSEAVSLLEEVITPRKDLPPLLLKLNERPAERLDYLGVSYGLTPRLLKFWKRAGFVPVYLRQTPNDLTGEHSCIMLKTLTDEDEADQGGWLAAFWKDFRRRFLALLSYQFSTFSPSLALNIIQNRNMGKPAQPALSREELEALFLPYDLKRLEMYSRNMVDYHLIMDMIPAISRIYFLNQLGDLALSAAQSALLLGIGLQHKSVDQLEKEIELPSGQLMGLFNRIIRKVVKLFNEVQEKAIEEQMVAAKDVVMEPTMKTLSDDLDEAAKEFQEKHKKEVGKLKSMDLSEYIIRGDDEEWNEVLNKAGPNASIISLKSDKKRKLEAKQEPKQSKKLKNRETKNKKDMKLKRKK

SEQ ID NO: 54879 - protein, 145 aa, Homo sapiens
  Payload ID: 10837
  Gene Symbol: NAT10
  Gene Name: N-acetyltransferase 10 (GCN5-related)
  ENSP ID: ENSP00000435569
MHRKKVDNRIRILIENGVAERQRSLFVVVGDRGKDQVVILHHMLSKATVKARPSVLWCYKKELGFSSHRKKRMRQLQKKIKNGTLNIKQDDPFELFIAATNIRYCYYNETHKILGNTFGMCVLQDFEALTPNLLARTVETVEGGG

SEQ ID NO: 54880 - protein, 288 aa, Homo sapiens
  Payload ID: 10837
  Gene Symbol: NAT10
  Gene Name: N-acetyltransferase 10 (GCN5-related)
  ENSP ID: ENSP00000437324
MHRKKVDNRIRILIENGVAERQRSLFVVVGDRGKDQVVILHHMLSKATVKARPSVLWCYKKELGFSSHRKKRMRQLQKKIKNGTLNIKQDDPFELFIAATNIRYCYYNETHKILGNTFGMCVLQDFEALTPNLLARTVETVEGGGLVVILLRTMNSLKQLYTVTMDVHSRYRTEAHQDVVGRFNERFILSLASCKKCLVIDDQLNILPISSHVATMEALPPQTPDESLGPSDLELRELKESLQDTQPVGVLVDCCKTLDQAKQEPKQSKKLKNRETKNKKDMKLKRKK

SEQ ID NO: 54881 - protein, 834 aa, Homo sapiens
  Payload ID: 10837
  Gene Symbol: NAT10
  Gene Name: N-acetyltransferase 10 (GCN5-related)
  ENSP ID: ENSP00000479141
MNSLKQLYTVTMDVHSRYRTEAHQDVVGRFNERFILSLASCKKCLVIDDQLNILPISSHVATMEALPPQTPDESLGPSDLELRELKESLQDTQPVGVLVDCCKTLDQAKAVLKFIEGISEKTLRSTVALTAARGRGKSAALGLAIAGAVAFGYSNIFVTSPSPDNLHTLFEFVFKGFDALQYQEHLDYEIIQSLNPEFNKAVIRVNVFREHRQTIQYIHPADAVKLGQAELVVIDEAAAIPLPLVKSLLGPYLVFMASTINGYEGTGRSLSLKLIQQLRQQSAQSQVSTTAENKTTTTARLASARTLYEVSLQESIRYAPGDAVEKWLNDLLCLDCLNITRIVSGCPLPEACELYYVNRDTLFCYHKASEVFLQRLMALYVASHYKNSPNDLQMLSDAPAHHLFCLLPPVPPTQNALPEVLAVIQVCLEGEISRQSILNSLSRGKKASGDLIPWTVSEQFQDPDFGGLSGGRVVRIAVHPDYQGMGYGSRALQLLQMYYEGRFPCLEEKVLETPQEIHTVSSEAVSLLEEVITPRKDLPPLLLKLNERPAERLDYLGVSYGLTPRLLKFWKRAGFVPVYLRQTPNDLTGEHSCIMLKTLTDEDEADQGGWLAAFWKDFRRRFLALLSYQFSTFSPSLALNIIQNRNMGKPAQPALSREELEALFLPYDLKRLEMYSRNMVDYHLIMDMIPAISRIYFLNQLGDLALSAAQSALLLGIGLQHKSVDQLEKEIELPSGQLMGLFNRIIRKVVKLFNEVQEKAIEEQMVAAKDVVMEPTMKTLSDDLDEAAKEFQEKHKKEVGKLKSMDLSEYIIRGDDEEWNEVLNKAGRTPRSSA

SEQ ID NO: 54882 - protein, 206 aa, Homo sapiens
  Payload ID: 10838
  Gene Symbol: NAT14
  Gene Name: N-acetyltransferase 14 (GCN5-related, putative)
  Uniprot ID: Q8WUY8
  ENSP ID: ENSP00000205194
MAPSHLSVREMREDEKPLVLEMLKAGVKDTENRVALHALTRPPALLLLAAASSGLRFVLASFALALLLPVFLAVAAVKLGLRARWGSLPPPGGLGGPWVAVRGSGDVCGVLALAPGTNAGDGARVTRLSVSRWHRRRGVGRRLLAFAEARARAWAGGMGEPRARLVVPVAVAAWGVGGMLEGCGYQAEGGWGCLGYTLVREFSKDL

SEQ ID NO: 54883 - protein, 52 aa, Homo sapiens
  Payload ID: 10838
  Gene Symbol: NAT14
  Gene Name: N-acetyltransferase 14 (GCN5-related, putative)
  ENSP ID: ENSP00000470543
MAPSHLSVREMREDEKPLVLEMLKVRGRGPRGPGSGCSGGIASGFSHPLPPT

SEQ ID NO: 54884 - protein, 173 aa, Homo sapiens
  Payload ID: 10838
  Gene Symbol: NAT14
  Gene Name: N-acetyltransferase 14 (GCN5-related, putative)
  ENSP ID: ENSP00000471807
  MOD_RES (1)..(1): Any amino acid
XTENRVALHALTRPPALLLLAAASSGLRFVLASFALALLLPVFLAVAAVKLGLRARWGSLPPPGGLGGPWVAVRGSGDVCGVLALAPGTNAGDGARVTRLSVSRWHRRRGVGRRLLAFAEARARAWAGGMGEPRARLVVPVAVAAWGSVLSVPQAGRAIWGGGEEAEQNTPQS

SEQ ID NO: 54885 - protein, 44 aa, Homo sapiens
  Payload ID: 10838
  Gene Symbol: NAT14
  Gene Name: N-acetyltransferase 14 (GCN5-related, putative)
  ENSP ID: ENSP00000472383
MAPTPVCTEKPPRVMSAKSVLSVPQAGRAIWGGGEEAEQNTPQS

SEQ ID NO: 54886 - protein, 369 aa, Homo sapiens
  Payload ID: 10839
  Gene Symbol: NAT16
  Gene Name: N-acetyltransferase 16 (GCN5-related, putative)
  Uniprot ID: Q8N8M0
  ENSP ID: ENSP00000300303
MKLEASCGTATSEVPKPEKKTARDAEPSSETRPQEVEAEPRSGSGPEAEAEPLDFVVATEREFEEVLAISGGIYGGLDYLPSRYHSWLRDPDRTVVLAKRNGGVIALESVNVIDAGETVLVEGLRVAPWERGKGVAGLLQRFCSQLVKRQHPGVKVARLTRDDQLGPRELKKYRLITKQGILLVRFNASALLAGLGARLAALRTSGTFSPLPTEAVSEAGGDVARLLLSPSVQRDVLPGGTIIQDWQPYRPSESNLRLLAAKGLEWRVDSRARPRVLTLCTRPFPIPHGGDGTWRYLNIDAFGSDGAQVQSQLLWHLQRQAPRLVGLNVMCQLFLEPQLWSQLADFCQVGLGLELVKGYTEQYLLEADI

SEQ ID NO: 54887 - protein, 156 aa, Homo sapiens
  Payload ID: 10839
  Gene Symbol: NAT16
  Gene Name: N-acetyltransferase 16 (GCN5-related, putative)
  ENSP ID: ENSP00000391769
MKLEASCGTATSEVPKPEKKTARDAEPSSETRPQEVEAEPRSGSGPEAEAEPLDFVVATEREFEEVLAISGGIYGGLDYLPSRYHSWLRDPDRTVVLAKRNGGVIALESVNVIDAGETVLVEGLRVAPWERGKGVAGLLQRFCSQLVKRQHPGVKV

SEQ ID NO: 54888 - protein, 112 aa, Homo sapiens
  Payload ID: 10839
  Gene Symbol: NAT16
  Gene Name: N-acetyltransferase 16 (GCN5-related, putative)
  Uniprot ID: Q8N8M0
  ENSP ID: ENSP00000394435
MKLEASCGTATSEVPKPEKKTARDAEPSSETRPQEVEAEPRSGSGPEAEAEPLDFVVATEREFEEVLAISGGIYGGLDYLPSRYHSWLRDPDRTVVLAKRNGGVVSPGARPR

SEQ ID NO: 54889 - protein, 369 aa, Homo sapiens; identical to SEQ ID NO: 54886
  Payload ID: 10839
  Gene Symbol: NAT16
  Gene Name: N-acetyltransferase 16 (GCN5-related, putative)
  Uniprot ID: Q8N8M0
  ENSP ID: ENSP00000395125

SEQ ID NO: 54890 - protein, 290 aa, Homo sapiens
  Payload ID: 10840
  Gene Symbol: NAT2
  Gene Name: N-acetyltransferase 2 (arylamine N-acetyltransferase)
  Uniprot ID: P11245
  ENSP ID: ENSP00000286479
MDIEAYFERIGYKNSRNKLDLETLTDILEHQIRAVPFENLNMHCGQAMELGLEAIFDHIVRRNRGGWCLQVNQLLYWALTTIGFQTTMLGGYFYIPPVNKYSTGMVHLLLQVTIDGRNYIVDAGSGSSSQMWQPLELISGKDQPQVPCIFCLTEERGIWYLDQIRREQYITNKEFLNSHLLPKKKHQKIYLFTLEPRTIEDFESMNTYLQTSPTSSFITTSFCSLQTPEGVYCLVGFILTYRKFNYKDNTDLVEFKTLTEEEVEEVLRNIFKISLGRNLVPKPGDGSLTI

SEQ ID NO: 54891 - protein, 160 aa, Homo sapiens
  Payload ID: 10840
  Gene Symbol: NAT2
  Gene Name: N-acetyltransferase 2 (arylamine N-acetyltransferase)
  ENSP ID: ENSP00000428416
MWQPLELISGKDQPQVPCIFCLTEERGIWYLDQIRREQYITNKEFLNSHLLPKKKHQKIYLFTLEPRTIEDFESMNTYLQTSPTSSFITTSFCSLQTPEGVYCLVGFILTYRKFNYKDNTDLVEFKTLTEEEVEEVLRNIFKISLGRNLVPKPGDGSLTI

SEQ ID NO: 54892 - protein, 308 aa, Homo sapiens
  Payload ID: 10841
  Gene Symbol: NAT6
  Gene Name: N-acetyltransferase 6 (GCN5-related)
  Uniprot ID: Q93015
  ENSP ID: ENSP00000346927
MQELTLSPGPAKLTPTLDPTHRMELILSTSPAELTLDPACQPKLPLDSTCQPEMTFNPGPTELTLDPEHQPEETPAPSLAELTLEPVHRRPELLDACADLINDQWPRSRTSRLHSLGQSSDAFPLCLMLLSPHPTLEAAPVVVGHARLSRVLNQPQSLLVETVVVARALRGRGFGRRLMEGLEVFARARGFRKLHLTTHDQVHFYTHLGYQLGEPVQGLVFTSRRLPATLLNAFPTAPSPRPPRKAPNLTAQAAPRGPKGPPLPPPPPLPECLTISPPVPSGPPSKSLLETQYQNVRGRPIFWMEKDI

SEQ ID NO: 54893 - protein, 86 aa, Homo sapiens
  Payload ID: 10841
  Gene Symbol: NAT6
  Gene Name: N-acetyltransferase 6 (GCN5-related)
  ENSP ID: ENSP00000388316
MELILSTSPAELTLDPACQPKLPLDSTCQPEMTFNPGPTELTLDPEHQPEETPAPSLAELTLEPVHRRPELLDACADLINDQWPRS

SEQ ID NO: 54894 - protein, 57 aa, Homo sapiens
  Payload ID: 10841
  Gene Symbol: NAT6
  Gene Name: N-acetyltransferase 6 (GCN5-related)
  ENSP ID: ENSP00000391158
MELILSTSPAELTLDPACQPKLPLDSTCQPEMTFNPGPTELTLDPEHQPEETPAPSL

SEQ ID NO: 54895 - protein, 286 aa, Homo sapiens
  Payload ID: 10841
  Gene Symbol: NAT6
  Gene Name: N-acetyltransferase 6 (GCN5-related)
  Uniprot ID: Q93015
  ENSP ID: ENSP00000391893
MELILSTSPAELTLDPACQPKLPLDSTCQPEMTFNPGPTELTLDPEHQPEETPAPSLAELTLEPVHRRPELLDACADLINDQWPRSRTSRLHSLGQSSDAFPLCLMLLSPHPTLEAAPVVVGHARLSRVLNQPQSLLVETVVVARALRGRGFGRRLMEGLEVFARARGFRKLHLTTHDQVHFYTHLGYQLGEPVQGLVFTSRRLPATLLNAFPTAPSPRPPRKAPNLTAQAAPRGPKGPPLPPPPPLPECLTISPPVPSGPPSKSLLETQYQNVRGRPIFWMEKDI

SEQ ID NO: 54896 - protein, 286 aa, Homo sapiens; identical to SEQ ID NO: 54895
  Payload ID: 10841
  Gene Symbol: NAT6
  Gene Name: N-acetyltransferase 6 (GCN5-related)
  Uniprot ID: Q93015
  ENSP ID: ENSP00000400559

SEQ ID NO: 54897 - protein, 286 aa, Homo sapiens; identical to SEQ ID NO: 54895
  Payload ID: 10841
  Gene Symbol: NAT6
  Gene Name: N-acetyltransferase 6 (GCN5-related)
  Uniprot ID: Q93015
  ENSP ID: ENSP00000410610

SEQ ID NO: 54898 - protein, 9 aa, Homo sapiens
  Payload ID: 10841
  Gene Symbol: NAT6
  Gene Name: N-acetyltransferase 6 (GCN5-related)
  ENSP ID: ENSP00000413623
MELILSTSP

SEQ ID NO: 54899 - protein, 227 aa, Homo sapiens
  Payload ID: 10842
  Gene Symbol: NAT8
  Gene Name: N-acetyltransferase 8 (GCN5-related, putative)
  Uniprot ID: Q9UHE5
  ENSP ID: ENSP00000272425
MAPCHIRKYQESDRQWVVGLLSRGMAEHAPATFRQLLKLPRTLILLLGGPLALLLVSGSWLLALVFSISLFPALWFLAKKPWTEYVDMTLCTDMSDITKSYLSERGSCFWVAESEEKVVGMVGALPVDDPTLREKRLQLFHLFVDSEHRRQGIAKALVRTVLQFARDQGYSEVILDTGTIQLSAMALYQSMGFKKTGQSFFCVWARLVALHTVHFIYHLPSSKVGSL

SEQ ID NO: 54900 - protein, 224 aa, Homo sapiens
  Payload ID: 10843
  Gene Symbol: NAT8B
  Gene Name: N-acetyltransferase 8B (GCN5-related, putative, gene/pseudogene)
  ENSP ID: ENSP00000485054
MAPYHIRKYQESDRKVVGLLSRGMAEHAPATFRRLLKLPRTLILLLGGALALLLVSGSWILALVFSLSLLPALWFLAKKPWTRYVDIALRTDMSDITKSYLSECGSCFWVGESEEKVVGTVGALPVDDPTLREKRLQLFHLSVDNEHRGQGIAKALVRTVLQFARDGYSEVVLDTSNIQLSAMGLYQSLGFKKTGQSFFHVWARLVDLHTVHFIYHLPSAQAGR

SEQ ID NO: 54901 - protein, 134 aa, Homo sapiens
  Payload ID: 10844
  Gene Symbol: NAT8L
  Gene Name: N-acetyltransferase 8-like (GCN5-related, putative)
  ENSP ID: ENSP00000328464
MADIEQYYMKPPGSCFWVAVLDGNVVGIVAARAHEEDNTVELLRMSVDSRFRGKGIAKALGRKVLEFAVVHNYSAVVLGTTAVKVAAHKLYESLGFRHMGASDHYVLPGMTLSLAERLFFQVRYHRYRLQLREE

SEQ ID NO: 54902 - protein, 302 aa, Homo sapiens
  Payload ID: 10844
  Gene Symbol: NAT8L
  Gene Name: N-acetyltransferase 8-like (GCN5-related, putative)
  Uniprot ID: Q8N9F0
  ENSP ID: ENSP00000413064
MHCGPPDMVCETKIVAAEDHEALPGAKKDALLAAAGAMWPPLPAAPGPAAAPPAPPPAPVAQPHGGAGGAGPPGGRGVCIREFRAAEQEAARRIFYDGIMERIPNTAFRGLRQHPRAQLLYALLAALCFAVSRSLLLTCLVPAALLGLRYYYSRKVIRAYLECALHTDMADIEQYYMKPPGSCFWVAVLDGNVVGIVAARAHEEDNTVELLRMSVDSRFRGKGIAKALGRKVLEFAVVHNYSAVVLGTTAVKVAAHKLYESLGFRHMGASDHYVLPGMTLSLAERLFFQVRYHRYRLQLREE

SEQ ID NO: 54903 - protein, 207 aa, Homo sapiens
  Payload ID: 10845
  Gene Symbol: NAT9
  Gene Name: N-acetyltransferase 9 (GCN5-related, putative)
  Uniprot ID: Q9BTE0
  ENSP ID: ENSP00000350467
MRLNQNTLLLGKKVVLVPYTSEHVPSRYHEWMKSEELQRLTASEPLTLEQEYAMQCSWQEDADKCTFIVLDAEKWQAQPGATEESCMVGDVNLFLTDLEDLTLGEIEVMIAEPSCRGKGLGTEAVLAMLSYGVTTLGLTKFEAKIGQGNEPSIRMFQKLHFEQVATSSVFQEVTLRLTVSESEHQWLLEQTSHVEEKPYRDGSAEPC

SEQ ID NO: 54904 - protein, 206 aa, Homo sapiens
  Payload ID: 10845
  Gene Symbol: NAT9
  Gene Name: N-acetyltransferase 9 (GCN5-related, putative)
  Uniprot ID: Q9BTE0
  ENSP ID: ENSP00000462019
MRLNQNTLLLGKKVVLVPYTSEHVPRYHEWMKSEELQRLTASEPLTLEQEYAMQCSWQEDADKCTFIVLDAEKWQAQPGATEESCMVGDVNLFLTDLEDLTLGEIEVMIAEPSCRGKGLGTEAVLAMLSYGVTTLGLTKFEAKIGQGNEPSIRMFQKLHFEQVATSSVFQEVTLRLTVSESEHQWLLEQTSHVEEKPYRDGSAEPC

SEQ ID NO: 54905 - protein, 140 aa, Homo sapiens
  Payload ID: 10845
  Gene Symbol: NAT9
  Gene Name: N-acetyltransferase 9 (GCN5-related, putative)
  ENSP ID: ENSP00000462120
MRLNQNTLLLGKKVVLVPYTSEHVPSRYHEWMKSEELQRLTASEPLTLEQEYAMQCSWQEDADKCTFIVLDAEKWQAQPGATEESCMVGDVNLFLTDLEDLTLGEIEVMIAEPSCRGKGLGTEAVLAMLSYGGDPQTDSE

SEQ ID NO: 54906 - protein, 139 aa, Homo sapiens
  Payload ID: 10845
  Gene Symbol: NAT9
  Gene Name: N-acetyltransferase 9 (GCN5-related, putative)
  ENSP ID: ENSP00000462454
MRLNQNTLLLGKKVVLVPYTSEHVPRYHEWMKSEELQRLTASEPLTLEQEYAMQCSWQEDADKCTFIVLDAEKWQAQPGATEESCMVGDVNLFLTDLEDLTLGEIEVMIAEPSCRGKGLGTEAVLAMLSYGGDPQTDSE

SEQ ID NO: 54907 - protein, 212 aa, Homo sapiens
  Payload ID: 10845
  Gene Symbol: NAT9
  Gene Name: N-acetyltransferase 9 (GCN5-related, putative)
  ENSP ID: ENSP00000462835
MQAATMRLNQNTLLLGKKVVLVPYTSEHVPSRYHEWMKSEELQRLTASEPLTLEQEYAMQCSWQEDADKCTFIVLDAEKWQAQPGATEESCMVGDVNLFLTDLEDLTLGEIEVMIAEPSCRGKGLGTEAVLAMLSYGVTTLGLTKFEAKIGQGNEPSIRMFQKLHFEQVATSSVFQEVTLRLTVSESEHQWLLEQTSHVEEKPYRDGSAEPC

SEQ ID NO: 54908 - protein, 135 aa, Homo sapiens
  Payload ID: 10845
  Gene Symbol: NAT9
  Gene Name: N-acetyltransferase 9 (GCN5-related, putative)
  ENSP ID: ENSP00000463353
MRLNQNTLLLGKKVVLVPYTSEHVPSRYHEWMKSEELQRLTASEPLTLEQEYAMQCSWQEDADKCTFIVLDAEKWQAQPGATEESCMVGDVNLFLTDLEDLTLGEIEVMIAEPSCRGKGLGTEAVLAMLSYETSL

SEQ ID NO: 54909 - protein, 207 aa, Homo sapiens
  Payload ID: 10845
  Gene Symbol: NAT9
  Gene Name: N-acetyltransferase 9 (GCN5-related, putative)
  ENSP ID: ENSP00000463523
MRLNQNTLLLGKKVVLVPYTSEHVPRYHEWMKSEELQRLTASEPLTLEQEYAMQCSWQEDADKCTFIVLDAEKWQAQPGATEESCMVGDVNLFLTDLEDLTLGEIEVMIAAWDRRVGAGASLLAPVSSPLRGVTTLGLTKFEAKIGQGNEPSIRMFQKLHFEQVATSSVFQEVTLRLTVSESEHQWLLEQTSHVEEKPYRDGSAEPC

SEQ ID NO: 54910 - protein, 82 aa, Homo sapiens
  Payload ID: 10845
  Gene Symbol: NAT9
  Gene Name: N-acetyltransferase 9 (GCN5-related, putative)
  ENSP ID: ENSP00000463760
MKSEELQRLTASEPLTLEQEYAMQCSWQEDADKCTFIVLDAEKWQAQPGATEESCMVGDVNLFLTDLEDLTLGEIEVMIAEP

SEQ ID NO: 54911 - protein, 202 aa, Homo sapiens
  Payload ID: 10845
  Gene Symbol: NAT9
  Gene Name: N-acetyltransferase 9 (GCN5-related, putative)
  ENSP ID: ENSP00000463824
MRLNQNTLLLGKKVVLVPYTSEHVPSRYHEWMKSEELQRLTASEPLTLEQEYAMQCSWQEDADKCTFIVLDAEKWQAQPGATEESCMVGDVNLFLTDLEDLTLGEIEVMIAEPSCRGKGLGTEAVLAMLSYGLTKFEAKIGQGNEPSIRMFQKLHFEQVATSSVFQEVTLRLTVSESEHQWLLEQTSHVEEKPYRDGSAEPC

SEQ ID NO: 54912 - protein, 109 aa, Homo sapiens
  Payload ID: 10845
  Gene Symbol: NAT9
  Gene Name: N-acetyltransferase 9 (GCN5-related, putative)
  ENSP ID: ENSP00000463860
MRLNQNTLLLGKKVVLVPYTSEHVPSRYHEWMKSEELQRLTASEPLTLEQEYAMQCSWQEDADKCTFIVLDAEKWQAQPGATEESCMVGDVNLFLTDLEDLTLGEIEVM

SEQ ID NO: 54913 - protein, 183 aa, Homo sapiens
  Payload ID: 10845
  Gene Symbol: NAT9
  Gene Name: N-acetyltransferase 9 (GCN5-related, putative)
  ENSP ID: ENSP00000464142
MRLNQNTLLLGKKVVLVPYTSEHVPRYHEWMKSEELQRLTASEPLTLEQEYAMQCSWQEDADKCTFIVLDAEKWQAQPGATEESCMVGDVNLFLTDLEDLTLGEIEVMIAEPSCRGKGLGTEAVLAMLSYGVTTLGLTKFEAKIGQGNEPSIRMFQKLHFEQVATSSVFQEVTLRLTVSESEH

SEQ ID NO: 54914 - protein, 211 aa, Homo sapiens
  Payload ID: 10845
  Gene Symbol: NAT9
  Gene Name: N-acetyltransferase 9 (GCN5-related, putative)
  ENSP ID: ENSP00000464281
MQAATMRLNQNTLLLGKKVVLVPYTSEHVPRYHEWMKSEELQRLTASEPLTLEQEYAMQCSWQEDADKCTFIVLDAEKWQAQPGATEESCMVGDVNLFLTDLEDLTLGEIEVMIAEPSCRGKGLGTEAVLAMLSYGVTTLGLTKFEAKIGQGNEPSIRMFQKLHFEQVATSSVFQEVTLRLTVSESEHQWLLEQTSHVEEKPYRDGSAEPC

SEQ ID NO: 54915 - protein, 56 aa, Homo sapiens
  Payload ID: 10845
  Gene Symbol: NAT9
  Gene Name: N-acetyltransferase 9 (GCN5-related, putative)
  ENSP ID: ENSP00000464505
MQAATMRLNQNTLLLGKKVVLVPYTSEHVPRYHEWMKSEELQRLTASEPLTLEQEY

SEQ ID NO: 54916 - protein, 156 aa, Homo sapiens
  Payload ID: 10845
  Gene Symbol: NAT9
  Gene Name: N-acetyltransferase 9 (GCN5-related, putative)
  ENSP ID: ENSP00000464681
MRLNQNTLLLGKKVVLVPYTSEHVPRYHEWMKSEELQRLTASEPLTLEQEYAMQCSWQEDADKCTFIVLDAEKWQAQPGATEESCMVGDVNLFLTDLEDLTLGEIEVMIAGGGPPVSAPSWSSVSPKWLLTIPMRQHTDSMRMVMIVATSELLRIK

SEQ ID NO: 54917 - protein, 113 aa, Homo sapiens
  Payload ID: 10846
  Gene Symbol: NATD1
  Gene Name: N-acetyltransferase domain containing 1
  Uniprot ID: Q8N6N6
  ENSP ID: ENSP00000478388
MAHSAAAVPLGALEQGCPIRVEHDRRRRQFTVRLNGCHDRAVLLYEYVGKRIVDLQHTEVPDAYRGRGIAKHLAKAALDFVVEEDLKAHLTCWYIQKYVKENPLPQYLERLQP

SEQ ID NO: 54918 - protein, 1432 aa, Homo sapiens
  Payload ID: 10847
  Gene Symbol: NWD1
  Gene Name: NACHT and WD repeat domain containing 1
  Uniprot ID: Q149M9
  ENSP ID: ENSP00000369136
MQRGKPCRALPTLKCQTFCQRHGLMFEVVDLRWGIRNIEATDHLTTELCLEEVDRCWKTSIGPAFVALIGDQYGPCLIPSRIDEKEWEVLRDHLTARPSDLELVARYFQRDENAFPPTYVLQAPGTGEACEPEEATLTSVLRSGAQEARRLGLITQEQWQHYHRSVIEWEIERSLLSSEDREQGATVFLREIQDLHKHILEDCALRMVDRLADGCLDADAQNLLSSLKSHITDMHPGVLKTHRLPWSRDLVNPKNKTHACYLKELGEQFVVRANHQVLTRLRELDTAGQELAWLYQEIRHHLWQSSEVIQTFCGRQELLARLGQQLRHDDSKQHTPLVLFGPPGIGKTALMCKLAEQMPRLLGHKTVTVLRLLGTSQMSSDARGLLKSICFQVCLAYGLPLPPAQVLDAHTRVVQFFHTLLHTVSCRNFESLVLLLDAMDDLDSVRHARRVPWLPLNCPPRVHLILSACSGALGVLDTLQRVLLDPEAYWEVKPLSGNQGQQMIQLLLAAARRTLSPVHTDLLWASLPECGNPGRLRLAFEEARKWASFTVPVPLATTAEEATHQLCTRLEQTHGQLLVAHVLGYIVSSRHGLSEAELKDVLSLDDEVLQDVYRDWTPPSKELLRFPPLLWVRLRRDLGYYLARRPVDGFTLLAIAHRQLVEVVRERYLSGSERAKRHGVLADFFSGTWSQGTKKLITLPLVGKPLNLDRKVAPQPLWFSHTVANLRKLKELPYHLLHSGRLEELKQEVLGSMSWISCRGISGGIEDLLDDFDLCAPHLDSPEVGLVREALQLCRPAVELRGMERSLLYTELLARLHFFATSHPALVGQLCQQAQSWFQLCAHPVLVPLGGFLQPPGGPLRATLSGCHKGITAMAWGVEEKLLVIGTQDGIMAVWDMEEQHVIHMLTGHTGEVRCVKIFAKGTLANSASKDYTLHLWNLLSGQEKFTIWDGGSKNPAEPQIWNLHVDEAHKVVYSASGSKINAWNLETAEPVFHILGDASDPWMCMAVLASQATLLTVSRDGVVSLWSSATGKLQGKQHMSSIKEETPTCAVSVQKQGKLVTGFSNGSISLVSSKGDRLLEKLPDAVRFLVVSEDESLLAAGFGRSVRIFLADSRGFRRFMAMDLEHEDMVETAVFGTENNLIITGSLDALIQVWSLSEQGTLLDILEGVGAPVSLLARGGALVASASPQSSSFKVWDLSDAHRSRVPAPFLDRTGLTAVSHNGSYVYFPKIGDKNKVTIWDLAEGEEQDSLDTSSEIRCLEVAEQRKLLFTGLVSGVVLVFPLNSRQDVICIPPPEARKAINCMSLSKCEDRLAIAYDNIVLVLDITSGDPCPVIDGPRYTFYTQLPETLSSVAILTDYRVVYSMTNGDLFLYECATSKAFPLETHRSRVACVEVSHKEQLVVSGSEDALLCLWDLQARKWKFEMSYTAPC

SEQ ID NO: 54919 - protein, 76 aa, Homo sapiens
  Payload ID: 10847
  Gene Symbol: NWD1
  Gene Name: NACHT and WD repeat domain containing 1
  Uniprot ID: Q149M9
  ENSP ID: ENSP00000400248
MQRGKPCRALPTLKCQTFCQRHGLMFEVVDLRWGIRNIEATDHLTTELCLEEVDRCWKTSIGPAFVEKCADPCPGQ

SEQ ID NO: 54920 - protein, 179 aa, Homo sapiens
  Payload ID: 10847
  Gene Symbol: NWD1
  Gene Name: NACHT and WD repeat domain containing 1
  ENSP ID: ENSP00000428224
MQRGKPCRALPTLKCQTFCQRHGLMFEVVDLRWGIRNIEATDHLTTELCLEEVDRCWKTSIGPAFVALIGDQYGPCLIPSRIDEKEWEVLRDHLTARPSDLELVARYFQRDENAFPPTYVLQAPGTGEACEPEEATLTSVLRSGAQEARRLGLITQEQWQHYHRSGEAAGTPLWRPTRN

SEQ ID NO: 54921 - protein, 1432 aa, Homo sapiens; identical to SEQ ID NO: 54918
  Payload ID: 10847
  Gene Symbol: NWD1
  Gene Name: NACHT and WD repeat domain containing 1
  Uniprot ID: Q149M9
  ENSP ID: ENSP00000428579

SEQ ID NO: 54922 - protein, 1564 aa, Homo sapiens
  Payload ID: 10847
  Gene Symbol: NWD1
  Gene Name: NACHT and WD repeat domain containing 1
  Uniprot ID: Q149M9
  ENSP ID: ENSP00000447224
MQRGKPCRALPTLKCQTFCQRHGLMFEVVDLRWGIRNIEATDHLTTELCLEEVDRCWKTSIGPAFVALIGDQYGPCLIPSRIDEKEWEVLRDHLTARPSDLELVARYFQRDENAFPPTYVLQAPGTGEACEPEEATLTSVLRSGAQEARRLGLITQEQWQHYHRSVIEWEIERSLLSSEDREQGATVFLREIQDLHKHILEDCALRMVDRLADGCLDADAQNLLSSLKSHITDMHPGVLKTHRLPWSRDLVNPKNKTHACYLKELGEQFVVRANHQVLTRLRELDTAGQELAWLYQEIRHHLWQSSEVIQTFCGRQELLARLGQQLRHDDSKQHTPLVLFGPPGIGKTALMCKLAEQMPRLLGHKTVTVLRLLGTSQMSSDARGLLKSICFQVCLAYGLPLPPAQVLDAHTRVVQFFHTLLHTVSCRNFESLVLLLDAMDDLDSVRHARRVPWLPLNCPPRVHLILSACSGALGVLDTLQRVLLDPEAYWEVKPLSGNQGQQMIQLLLAAARRTLSPVHTDLLWASLPECGNPGRLRLAFEEARKWASFTVPVPLATTAEEATHQLCTRLEQTHGQLLVAHVLGYIVSSRHGLSEAELKDVLSLDDEVLQDVYRDWTPPSKELLRFPPLLWVRLRRDLGYYLARRPVDGFTLLAIAHRQLVEVVRERYLSGSERAKRHGVLADFFSGTWSQGTKKLITLPLVGKPLNLDRKVAPQPLWFSHTVANLRKLKELPYHLLHSGRLEELKQEVLGSMSWISCRGISGGIEDLLDDFDLCAPHLDSPEVGLVREALQLCRPAVELRGMERSLLYTELLARLHFFATSHPALVGQLCQQAQSWFQLCAHPVLVPLGGFLQPPGGPLRATLSGCHKGITAMAWGVEEKLLVIGTQDGIMAVWDMEEQHVIHMLTGHTGEVRCVKIFAKGTLANSASKDYTLHLWNLLSGQEKFTIWDGGSKNPAEPQIWNLHVDEAHKVVYSASGSKINAWNLETAEPVFHILGDASDPWMCMAVLASQATLLTVSRDGVVSLWSSATGKLQGKQHMSSIKEETPTCAVSVQKQGKLVTGFSNGSISLVSSKGDRLLEKLPDAVRFLVVSEDESLLAAGFGRSVRIFLADSRGFRRFMAMDLEHEDMVETAVFGTENNLIITGSLDALIQVWSLSEQGTLLDILEGVGAPVSLLARGGALVASASPQSSSFKVWDLSDAHRSRVPAPFLDRTGLTAVSHNGSYVYFPKIGDKNKVTIWDLAEGEEQDSLDTSSEIRCLEVAEQRKLLFTGLVSGVVLVFPLNSRQDVICIPPPEARKAINCMSLSKCEDRLAIAYDNIVLVLDITSGDPCPVIDGPRYTFYTQLPETLSSVAILTDYRVVYSMTNGDLFLYECATSKAFPLETHRSRVACVEVSHKEQLVVSGSEDALLCLWDLQARKWKFEMSYTSSYCRGVQCACFSKDDKYVYVGLKDRSILVWSVLDGTLLTVQFVHAVVNRIIPTTSGFIAPTRHGYLIRENFQCLSAKASPQDPLKNFKKAMWMVKSRQREELVAAAGAPQDLESESAQGNETKSNKCSQVCLIV

SEQ ID NO: 54923 - protein, 1522 aa, Homo sapiens
  Payload ID: 10847
  Gene Symbol: NWD1
  Gene Name: NACHT and WD repeat domain containing 1
  ENSP ID: ENSP00000447548
MQRGKPCRALPTLKCQTFCQRHGLMFEVVDLRWGIRNIEATDHLTTELCLEEVDRCWKTSIGPAFVALIGDQYGPCLIPSRIDEKEWEVLRDHLTARPSDLELVARYFQRDENAFPPTYVLQAPGTGEACEPEEATLTSVLRSGAQEARRLGLITQEQWQHYHRSVIEWEIERSLLSSEDREQGATVFLREIQDLHKHILEDCALRMVDRLADGCLDADAQNLLSSLKSHITDMHPGVLKTHRLPWSRDLVNPKNKTHACYLKELGEQFVVRANHQVLTRLRELDTAGQELAWLYQEIRHHLWQSSEVIQTFCGRQELLARLGQQLRHDDSKQHTPLVLFGPPGIGKTALMCKLAEQMPRLLGHKTVTVLRLLGTSQMSSDARGLLKSICFQVCLAYGLPLPPAQVLDAHTRVVQFFHTLLHTVSCRNFESLVLLLDAMDDLDSVRHARRVPWLPLNCPPRVHLILSACSGALGVLDTLQRVLLDPEAYWEVKPLSGNQGQQMIQLLLAAARRTLSPVHTDLLWASLPECGNPGRLRLAFEEARKWASFTVPVPLATTAEEATHQLCTRLEQTHGQLLVAHVLGYIVSSRHGLSEAELKDVLSLDDEVLQDVYRDWTPPSKELLRFPPLLWVRLRRDLGYYLARRPVDGFTLLAIAHRQLVEVVRERYLSGSERAKRHGVLADFFSGTWSQGTKKLITLPLVGKPLNLDRKVAPQPLWFSHTVANLRKLKELPYHLLHSGRLEELKQEVLGSMSWISCRGISGGIEDLLDDFDLCAPHLDSPEVGLVREALQLCRPAVELRGMERSLLYTELLARLHFFATSHPALVGQLCQQAQSWFQLCAHPVLVPLGGFLQPPGGPLRATLSGCHKGITAMAWGVEEKLLVIGTQDGIMAVWDMEEQHVIHMLTGHTGEVRCVKIFAKGTLANSASKDYTLHLWNLLSGQEKFTIWDGGSKNPAEPQIWNLHVDEAHKVVYSASGSKINAWNLETAEPVFHILGDASDPWMCMAVLASQATLLTVSRDGVVSLWSSATGKLQGKQHMSSIKEETPTCAVSVQKQGKLVTGFSNGSISLVSSKGDRLLEKLPDAVRFLVVSEDESLLAAGFGRSVRIFLADSRGFRRFMAMDLEHEDMVETAVFGTENNLIITGSLDALIQVWDLSDAHRSRVPAPFLDRTGLTAVSHNGSYVYFPKIGDKNKVTIWDLAEGEEQDSLDTSSEIRCLEVAEQRKLLFTGLVSGVVLVFPLNSRQDVICIPPPEARKAINCMSLSKCEDRLAIAYDNIVLVLDITSGDPCPVIDGPRYTFYTQLPETLSSVAILTDYRVVYSMTNGDLFLYECATSKAFPLETHRSRVACVEVSHKEQLVVSGSEDALLCLWDLQARKWKFEMSYTSSYCRGVQCACFSKDDKYVYVGLKDRSILVWSVLDGTLLTVQFVHAVVNRIIPTTSGFIAPTRHGYLIRENFQCLSAKASPQDPLKNFKKAMWMVKSRQREELVAAAGAPQDLESESAQGNETKSNKCSQVCLIV

SEQ ID NO: 54924 - protein, 1742 aa, Homo sapiens
  Payload ID: 10848
  Gene Symbol: NWD2
  Gene Name: NACHT and WD repeat domain containing 2
  Uniprot ID: Q9ULI1
  ENSP ID: ENSP00000309501
MWPAGAGTKLPCPRDSALRRAAFSGNLTALPSHLVPAGRSVRVFISANPEDTGAERQALRENVYPKLREFCRENYGLEFQVIDLYWGVEEDEWDSPELQKTRMKLLENCLKTSAGPCFVGLLGEKYGNIRIPGEVEASEFEMILDAAIEAKLETKLLEEWYCRDENSVPAAYYLRPKSEMLRSNRNAMQPSTNAENEKTWQEISDEIKKIFKAAVKLLHEKGKMKHSQAKRYLFSAIEDEFDFALGKQTPAFLKKCVCYIRKIANIERFVKIPEMGKYMDITGTEPRIIRDPEAQEKLIKLRDEFIPTIVASSNLRVYTSVTHCDMKLGYSQEIENHYIEGLGKQFYEDMIDIIQATIQQNFDTETDTLYDEILQHSSLCKTYASFYEYKCESLNIVHNYILPSKAGHINPLIIYGGPCTGKTLLLAEVAKKAYGWLHEDTGPESDPVVIVRFLGTTDMSSDLRTLLLSVCEQLAVNYRCLVQSYPKKIHDLCDLFINLLNESSLQRPLVIIFDALEQLSENDDARKLWWLPAHLPRFVRIVLSTLPNKHGILQKLRCLIHEEDNYIELIPRDRKMCSQVLKHQLLRVKRKVTSGQQIYVNNALSKCTLPMFVNLTFREVRHWRSHKDVDESSLSVTVHESIEQLFWSLEKKCGQKLVSRALGYITMAKMGLSEMELEDVLALDNSVMSELKENTRPSNPLRVPYLYIARLKEGLSGYLIERHVKNVTLLVWANRHLQLIAQKLYLQDDNDLREMHTILADYFLGVWSGGRRKAFCLEDPYLNGCLDLENRSLLEEEKHFMEQASFDRQAPDQPWVFQCNPLEPDIFFVNHRKMSELLYHLTRCGKTDDLLYGIIMNFSWLYTMIKIGQFDKVLSDIELAYNYSQEKELKFLANTLRSIKNKVTAFPGSLSAELQQRLLPVVSSLPKLRHLLLECDKDGPKYCSIVPLHSSMDVTYSPERLPLSSSHLHVTEILPTCNPSTVLTALENGSISTWDVETRQLLRQITTAQSVILGMKLTSDEKYLVVATTNNTLLIYDNVNSCLLSEVEIKGTKHGSSATYINGFTLSANHALAWLEASKDVTVIDLLYGWPLYQFHCWYEVTCVQCSLDGLYAFCGQYLNTTTIFHLGSGEKLCTVTSEFSGGFVKFLLILDTAQEMVMVDSEGSLSVWNTEDISSPQLTDDFDCRREDSEVVSIELSEDQSAVLICKALSIELLDTGLWKVAEKFRAKHNERFISAVLSKNGDCIIATMENTSAVFFWRRDTGQCMASLQEISGSIVKLVKSSHHNMLLSLSTSGVLSIWDIDIITAMSNIDKTGKPIQSLLLPARGEIIYSLDGSDCVHKWNFSSGFIEAVFKHEGIVEHCVLTSTGDIMVTSDDKSSQYVWHTSSGENLFRINGQRISQLLITHNDQFVVSLCEENASRVWRLATGHRVCNILTTLQNAFITSANTFVVGMTKSKVLAVSLWTGSITKKFCCEDGTTIVNFKLIPDCPDIIVFITSAETVNIWSLTDEVICRRVQLPNNFLKNLEDFEISPNGKLGIIARGDENINVLDLYSGKLRVVHASGIIWRQRLSRDGRYLVYICFRNGEEEDENGAIFSLIVMRLADGKNIGACSLYKTPTFLALSQRHLNIIVGFDDGSIGIYTVVDRVDAALKIKIATSNSRQIFNNATHTSRPKCNSYCFKISVDCLWRESTEVFARDSPITVSDSTESNEATPSKKHNSCYERVCSALEARGHSYAPDN

SEQ ID NO: 54925 - protein, 393 aa, Homo sapiens
  Payload ID: 10849
  Gene Symbol: NAPEPLD
  Gene Name: N-acyl phosphatidylethanolamine phospholipase D
  Uniprot ID: Q6IQ20
  ENSP ID: ENSP00000340093
MDENESNQSLMTSSQYPKEAVRKRQNSARNSGASDSSRFSRKSFKLDYRLEEDVTKSKKGKDGRFVNPWPTWKNPSIPNVLRWLIMEKDHSSVPSSKEELDKELPVLKPYFITNPEEAGVREAGLRVTWLGHATVMVEMDELIFLTDPIFSSRASPSQYMGPKRFRRSPCTISELPPIDAVLISHNHYDHLDYNSVIALNERFGNELRWFVPLGLLDWMQKCGCENVIELDWWEENCVPGHDKVTFVFTPSQHWCKRTLMDDNKVLWGSWSVLGPWNRFFFAGDTGYCPAFEEIGKRFGPFDLAAIPIGAYEPRWFMKYQHVDPEEAVRIHTDVQTKKSMAIHWGTFALANEHYLEPPVKLNEALERYGLNAEDFFVLKHGESRYLNNDDENF

SEQ ID NO: 54926 - protein, 393 aa, Homo sapiens; identical to SEQ ID NO: 54925
  Payload ID: 10849
  Gene Symbol: NAPEPLD
  Gene Name: N-acyl phosphatidylethanolamine phospholipase D
  Uniprot ID: Q6IQ20
  ENSP ID: ENSP00000392775

SEQ ID NO: 54927 - protein, 143 aa, Homo sapiens
  Payload ID: 10849
  Gene Symbol: NAPEPLD
  Gene Name: N-acyl phosphatidylethanolamine phospholipase D
  ENSP ID: ENSP00000395138
  MOD_RES (1)..(1): Any amino acid
XQHWCKRTLMDDNKVLWGSWSVLGPWNRFFFAGDTGYCPAFEEIGKRFGPFDLAAIPIGAYEPRWFMKYQHVDPEEAVRIHTDVQTKKSMAIHWGTFALANEHYLEPPVKLNEALERYGLNAEDFFVLKHGESRYLNNDDENF

SEQ ID NO: 54928 - protein, 124 aa, Homo sapiens
  Payload ID: 10849
  Gene Symbol: NAPEPLD
  Gene Name: N-acyl phosphatidylethanolamine phospholipase D
  ENSP ID: ENSP00000404391
MDENESNQSLMTSSQYPKEAVRKRQNSARNSGASDSSRFSRKSFKLDYRLEEDVTKSKKGKDGRFVNPWPTWKNPSIPNVLRWLIMEKDHSSVPSSKEELDKELPVLKPYFITNPEEAGVREAG

SEQ ID NO: 54929 - protein, 393 aa, Homo sapiens; identical to SEQ ID NO: 54925
  Payload ID: 10849
  Gene Symbol: NAPEPLD
  Gene Name: N-acyl phosphatidylethanolamine phospholipase D
  Uniprot ID: Q6IQ20
  ENSP ID: ENSP00000407112

SEQ ID NO: 54930 - protein, 393 aa, Homo sapiens; identical to SEQ ID NO: 54925
  Payload ID: 10849
  Gene Symbol: NAPEPLD
  Gene Name: N-acyl phosphatidylethanolamine phospholipase D
  Uniprot ID: Q6IQ20
  ENSP ID: ENSP00000412376

SEQ ID NO: 54931 - protein, 5 aa, Homo sapiens
  Payload ID: 10849
  Gene Symbol: NAPEPLD
  Gene Name: N-acyl phosphatidylethanolamine phospholipase D
  ENSP ID: ENSP00000414778
MDENE

SEQ ID NO: 54932 - protein, 393 aa, Homo sapiens; identical to SEQ ID NO: 54925
  Payload ID: 10849
  Gene Symbol: NAPEPLD
  Gene Name: N-acyl phosphatidylethanolamine phospholipase D
  Uniprot ID: Q6IQ20
  ENSP ID: ENSP00000419188

SEQ ID NO: 54933 - protein, 393 aa, Homo sapiens; identical to SEQ ID NO: 54925
  Payload ID: 10849
  Gene Symbol: NAPEPLD
  Gene Name: N-acyl phosphatidylethanolamine phospholipase D
  Uniprot ID: Q6IQ20
  ENSP ID: ENSP00000481285

SEQ ID NO: 54934 - protein, 393 aa, Homo sapiens; identical to SEQ ID NO: 54925
  Payload ID: 10849
  Gene Symbol: NAPEPLD
  Gene Name: N-acyl phosphatidylethanolamine phospholipase D
  Uniprot ID: Q6IQ20
  ENSP ID: ENSP00000482162

SEQ ID NO: 54935 - protein, 393 aa, Homo sapiens; identical to SEQ ID NO: 54925
  Payload ID: 10849
  Gene Symbol: NAPEPLD
  Gene Name: N-acyl phosphatidylethanolamine phospholipase D
  Uniprot ID: Q6IQ20
  ENSP ID: ENSP00000487770

SEQ ID NO: 54936 - protein, 143 aa, Homo sapiens; identical to SEQ ID NO: 54927
  Payload ID: 10849
  Gene Symbol: NAPEPLD
  Gene Name: N-acyl phosphatidylethanolamine phospholipase D
  ENSP ID: ENSP00000488070
  MOD_RES (1)..(1): Any amino acid

SEQ ID NO: 54937 - protein, 124 aa, Homo sapiens; identical to SEQ ID NO: 54928
  Payload ID: 10849
  Gene Symbol: NAPEPLD
  Gene Name: N-acyl phosphatidylethanolamine phospholipase D
  ENSP ID: ENSP00000488410

SEQ ID NO: 54938 - protein, 393 aa, Homo sapiens; identical to SEQ ID NO: 54925
  Payload ID: 10849
  Gene Symbol: NAPEPLD
  Gene Name: N-acyl phosphatidylethanolamine phospholipase D
  Uniprot ID: Q6IQ20
  ENSP ID: ENSP00000488504

SEQ ID NO: 54939 - protein, 393 aa, Homo sapiens; identical to SEQ ID NO: 54925
  Payload ID: 10849
  Gene Symbol: NAPEPLD
  Gene Name: N-acyl phosphatidylethanolamine phospholipase D
  Uniprot ID: Q6IQ20
  ENSP ID: ENSP00000488648

SEQ ID NO: 54940 - protein, 5 aa, Homo sapiens
  Payload ID: 10849
  Gene Symbol: NAPEPLD
  Gene Name: N-acyl phosphatidylethanolamine phospholipase D
  ENSP ID: ENSP00000488856
MDENE

SEQ ID NO: 54941 - protein, 359 aa, Homo sapiens
  Payload ID: 10850
  Gene Symbol: NAAA
  Gene Name: N-acylethanolamine acid amidase
  Uniprot ID: Q02083
  ENSP ID: ENSP00000286733
MRTADREARPGLPSLLLLLLAGAGLSAASPPAAPRFNVSLDSVPELRWLPVLRHYDLDLVRAAMAQVIGDRVPKWVHVLIGKVVLELERFLPQPFTGEIRGMCDFMNLSLADCLLVNLAYESSVFCTSIVAQDSRGHIYHGRNLDYPFGNVLRKLTVDVQFLKNGQIAFTGTTFIGYVGLWTGQSPHKFTVSGDERDKGWWWENAIAALFRRHIPVSWLIRATLSESENFEAAVGKLAKTPLIADVYYIVGGTSPREGVVITRNRDGPADIWPLDPLNGAWFRVETNYDHWKPAPKEDDRRTSAIKALNATGQANLSLEALFQILSVVPVYNNFTIYTTVMSAGSPDKYMTRIRNPSRK

SEQ ID NO: 54942 - protein, 167 aa, Homo sapiens
  Payload ID: 10850
  Gene Symbol: NAAA
  Gene Name: N-acylethanolamine acid amidase
  ENSP ID: ENSP00000423142
MRTADREARPGLPSLLLLLLAGAGLSAASPPAAPRFNVSLDSVPELRWLPVLRHYDLDLVRAAMAQVIGDRVPKWVHVLIGKVVLELERFLPQPFTGEIRGMCDFMNLSLADCLLVNLAYESSVFCTSIVAQDSRGHIYHGRNLDYPFGNVLRKLTVDVQFLKNGQV

SEQ ID NO: 54943 - protein, 139 aa, Homo sapiens
  Payload ID: 10850
  Gene Symbol: NAAA
  Gene Name: N-acylethanolamine acid amidase
  ENSP ID: ENSP00000423397
  MOD_RES (1)..(1): Any amino acid
XDKGWWWENAIAALFRRHIPVSWLIRATLSESENFEAAVGKLAKTPLIADVYYIVGGTSPREGVVITRNRDGPADIWPLDPLNGAWFRVETNYDHWKPAPKEDDRRTSAIKALNATGQANLSLEALFQLHNLYYGNERR

SEQ ID NO: 54944 - protein, 252 aa, Homo sapiens
  Payload ID: 10850
  Gene Symbol: NAAA
  Gene Name: N-acylethanolamine acid amidase
  ENSP ID: ENSP00000426977
MCDFMNLSLADCLLVNLAYESSVFCTSIVAQDSRGHIYHGRNLDYPFGNVLRKLTVDVQFLKNGQIAFTGTTFIGYVGLWTGQSPHKFTVSGDERDKGWWWENAIAALFRRHIPVSWLIRATLSESENFEAAVGKLAKTPLIADVYYIVGGTSPREGVVITRNRDGPADIWPLDPLNGAWFRVETNYDHWKPAPKEDDRRTSAIKALNATGQANLSLEALFQVTCVTVSCIPRMFGVLLIVNMKNSVKSSGR

SEQ ID NO: 54945 - protein, 323 aa, Homo sapiens
  Payload ID: 10850
  Gene Symbol: NAAA
  Gene Name: N-acylethanolamine acid amidase
  Uniprot ID: Q02083
  ENSP ID: ENSP00000427641
MRTADREARPGLPSLLLLLLAGAGLSAASPPAAPRFNVSLDSVPELRWLPVLRHYDLDLVRAAMAQVIGDRVPKWVHVLIGKVVLELERFLPQPFTGEIRGMCDFMNLSLADCLLVNLAYESSVFCTSIVAQDSRGHIYHGRNLDYPFGNVLRKLTVDVQFLKNGQIAFTGTTFIGYVGLWTGQSPHKFTVSGDERDKGWWWENAIAALFRRHIPVSWLIRATLSESENFEAAVGKLAKTPLIADVYYIVGGTSPREGVVITRNRDGPADIWPLDPLNGAWFRVETNYDHWKPAPKEDDRRTSAIKALNATGQANLSLEALFQ

SEQ ID NO: 54946 - protein, 222 aa, Homo sapiens
  Payload ID: 10850
  Gene Symbol: NAAA
  Gene Name: N-acylethanolamine acid amidase
  ENSP ID: ENSP00000473575
  MOD_RES (1)..(1): Any amino acid
XTSIVAQDSRGHIYHGRNLDYPFGNVLRKLTVDVQFLKNGQIAFTGTTFIGYVGLWTGQSPHKFTVSGDERDKGWWWENAIAALFRRHIPVSWLIRATLSESENFEAAVGKLAKTPLIADVYYIVGGTSPREGVVITRNRDGPADIWPLDPLNGAWFRVETNYDHWKPAPKEDDRRTSAIKALNATGQANLSLEALFQILSVVPVYNKLFPLAEFPEVGLLS

SEQ ID NO: 54947 - protein, 395 aa, Homo sapiens
  Payload ID: 10851
  Gene Symbol: ASAH1
  Gene Name: N-acylsphingosine amidohydrolase (acid ceramidase) 1
  Uniprot ID: Q13510
  ENSP ID: ENSP00000262097
MPGRSCVALVLLAAAVSCAVAQHAPPWTEDCRKSTYPPSGPTYRGAVPWYTINLDLPPYKRWHELMLDKAPVLKVIVNSLKNMINTFVPSGKIMQVVDEKLPGLLGNFPGPFEEEMKGIAAVTDIPLGEIISFNIFYELFTICTSIVAEDKKGHLIHGRNMDFGVFLGWNINNDTWVITEQLKPLTVNLDFQRNNKTVFKASSFAGYVGMLTGFKPGLFSLTLNERFSINGGYLGILEWILGKKDVMWIGFLTRTVLENSTSYEEAKNLLTKTKILAPAYFILGGNQSGEGCVITRDRKESLDVYELDAKQGRWYVVQTNYDRWKHPFFLDDRRTPAKMCLNRTSQENISFETMYDVLSTKPVLNKLTVYTTLIDVTKGQFETYLRDCPDPCIGW

SEQ ID NO: 54948 - protein, 389 aa, Homo sapiens
  Payload ID: 10851
  Gene Symbol: ASAH1
  Gene Name: N-acylsphingosine amidohydrolase (acid ceramidase) 1
  Uniprot ID: Q13510
  ENSP ID: ENSP00000326970
MNCCIGLGEKARGSHRASYPSLSALFTEASILGFGSFAVKAQWTEDCRKSTYPPSGPTVFPAVIRYRGAVPWYTINLDLPPYKRWHELMLDKAPVPGLLGNFPGPFEEEMKGIAAVTDIPLGEIISFNIFYELFTICTSIVAEDKKGHLIHGRNMDFGVFLGWNINNDTWVITEQLKPLTVNLDFQRNNKTVFKASSFAGYVGMLTGFKPGLFSLTLNERFSINGGYLGILEWILGKKDVMWIGFLTRTVLENSTSYEEAKNLLTKTKILAPAYFILGGNQSGEGCVITRDRKESLDVYELDAKQGRWYVVQTNYDRWKHPFFLDDRRTPAKMCLNRTSQENISFETMYDVLSTKPVLNKLTVYTTLIDVTKGQFETYLRDCPDPCIGW

SEQ ID NO: 54949 - protein, 411 aa, Homo sapiens
  Payload ID: 10851
  Gene Symbol: ASAH1
  Gene Name: N-acylsphingosine amidohydrolase (acid ceramidase) 1
  Uniprot ID: Q13510
  ENSP ID: ENSP00000371152
MNCCIGLGEKARGSHRASYPSLSALFTEASILGFGSFAVKAQWTEDCRKSTYPPSGPTYRGAVPWYTINLDLPPYKRWHELMLDKAPVLKVIVNSLKNMINTFVPSGKIMQVVDEKLPGLLGNFPGPFEEEMKGIAAVTDIPLGEIISFNIFYELFTICTSIVAEDKKGHLIHGRNMDFGVFLGWNINNDTWVITEQLKPLTVNLDFQRNNKTVFKASSFAGYVGMLTGFKPGLFSLTLNERFSINGGYLGILEWILGKKDVMWIGFLTRTVLENSTSYEEAKNLLTKTKILAPAYFILGGNQSGEGCVITRDRKESLDVYELDAKQGRWYVVQTNYDRWKHPFFLDDRRTPAKMCLNRTSQENISFETMYDVLSTKPVLNKLTVYTTLIDVTKGQFETYLRDCPDPCIGW

SEQ ID NO: 54950 - protein, 370 aa, Homo sapiens
  Payload ID: 10851
  Gene Symbol: ASAH1
  Gene Name: N-acylsphingosine amidohydrolase (acid ceramidase) 1
  ENSP ID: ENSP00000427751
MPGRSCVALVLLAAAVSCAVAQHAPPWTEDCRKSTYPPSGPTYRGAVPWYTINLDLPPYKRWHELMLDKAPVLKVIVNSLKNMINTFVPSGKIMQVVDEKLPGLLGNFPGPFEEEMKGIAAVTDIPLGHLIHGRNMDFGVFLGWNINNDTWVITEQLKPLTVNLDFQRNNKTVFKASSFAGYVGMLTGFKPGLFSLTLNERFSINGGYLGILEWILGKKDVMWIGFLTRTVLENSTSYEEAKNLLTKTKILAPAYFILGGNQSGEGCVITRDRKESLDVYELDAKQGRWYVVQTNYDRWKHPFFLDDRRTPAKMCLNRTSQENISFETMYDVLSTKPVLNKLTVYTTLIDVTKGQFETYLRDCPDPCIGW

SEQ ID NO: 54951 - protein, 726 aa, Homo sapiens
  Payload ID: 10852
  Gene Symbol: ASAH2
  Gene Name: N-acylsphingosine amidohydrolase (non-lysosomal ceramidase) 2
  ENSP ID: ENSP00000329886
MSAITVALLSLLFITSGTIENHKDLGGHFFSTTQSPPATQGSTAAQRSTATQHSTATQSSTATQTSPVPLTPESPLFQNFSGYHIGVGRADCTGQVADINLMGYGKSGQNAQGILTRLYSRAFIMAEPDGSNRTVFVSIDIGMVSQRLRLEVLNRLQSKYGSLYRRDNVILSGTHTHSGPAGYFQYTVFVIASEGFSNQTFQHMVTGILKSIDIAHTNMKPGKIFINKGNVDGVQINRSPYSYLQNPQSERARYSSNTDKEMIVLKMVDLNGDDLGLISWFAIHPVSMNNSNHLVNSDNVGYASYLLEQEKNKGYLPGQGPFVAAFASSNLGDVSPNILGPRCINTGESCDNANSTCPIGGPSMCIAKGPGQDMFDSTQIIGRAMYQRAKSKTCKPALGYSFAAGTIDGVGGLNFTQGKTEGDPFWDTIRDQILGKPSEEIKECHKPKPILLHTGELSKPHPWHPDIVDVQIITLGSLAITAIPGEFTTMSGRRLREAVQAEFASHGMQNMTVVISGLCNVYTHYITTYEEYQAQRYEAASTIYGPHTLSAYIQLFRNLAKAIATDTVANLSRGPEPPFFKQLIVPLIPSIVDRAPKGRTFGDVLQPAKPEYRVGEVAEVIFVGANPKNSVQNQTHQTFLTVEKYEATSTSWQIVCNDASWETRFYWHKGLLGLSNATVEWHIPDTAQPGIYRIRYFGHNRKQDILKPAVILSFEGTSPAFEVVTI

SEQ ID NO: 54952 - protein, 780 aa, Homo sapiens
  Payload ID: 10852
  Gene Symbol: ASAH2
  Gene Name: N-acylsphingosine amidohydrolase (non-lysosomal ceramidase) 2
  Uniprot ID: Q9NR71
  ENSP ID: ENSP00000378897
MAKRTFSNLETFLIFLLVMMSAITVALLSLLFITSGTIENHKDLGGHFFSTTQSPPATQGSTAAQRSTATQHSTATQSSTATQTSPVPLTPESPLFQNFSGYHIGVGRADCTGQVADINLMGYGKSGQNAQGILTRLYSRAFIMAEPDGSNRTVFVSIDIGMVSQRLRLEVLNRLQSKYGSLYRRDNVILSGTHTHSGPAGYFQYTVFVIASEGFSNQTFQHMVTGILKSIDIAHTNMKPGKIFINKGNVDGVQINRSPYSYLQNPQSERARYSSNTDKEMIVLKMVDLNGDDLGLISWFAIHPVSMNNSNHLVNSDNVGYASYLLEQEKNKGYLPGQGPFVAAFASSNLGDVSPNILGPRCINTGESCDNANSTCPIGGPSMCIAKGPGQDMFDSTQIIGRAMYQRAKELYASASQEVTGPLASAHQWVDMTDVTVWLNSTHASKTCKPALGYSFAAGTIDGVGGLNFTQGKTEGDPFWDTIRDQILGKPSEEIKECHKPKPILLHTGELSKPHPWHPDIVDVQIITLGSLAITAIPGEFTTMSGRRLREAVQAEFASHGMQNMTVVISGLCNVYTHYITTYEEYQAQRYEAASTIYGPHTLSAYIQLFRNLAKAIATDTVANLSRGPEPPFFKQLIVPLIPSIVDRAPKGRTFGDVLQPAKPEYRVGEVAEVIFVGANPKNSVQNQTHQTFLTVEKYEATSTSWQIVCNDASWETRFYWHKGLLGLSNATVEWHIPDTAQPGIYRIRYFGHNRKQDILKPAVILSFEGTSPAFEVVTI

SEQ ID NO: 54953 - protein, 745 aa, Homo sapiens
  Payload ID: 10852
  Gene Symbol: ASAH2
  Gene Name: N-acylsphingosine amidohydrolase (non-lysosomal ceramidase) 2
  Uniprot ID: Q9NR71
  ENSP ID: ENSP00000388206
MAKRTFSNLETFLIFLLVMMSAITVALLSLLFITSGTIENHKDLGGHFFSTTQSPPATQGSTAAQRSTATQHSTATQSSTATQTSPVPLTPESPLFQNFSGYHIGVGRADCTGQVADINLMGYGKSGQNAQGILTRLYSRAFIMAEPDGSNRTVFVSIDIGMVSQRLRLEVLNRLQSKYGSLYRRDNVILSGTHTHSGPAGYFQYTVFVIASEGFSNQTFQHMVTGILKSIDIAHTNMKPGKIFINKGNVDGVQINRSPYSYLQNPQSERARYSSNTDKEMIVLKMVDLNGDDLGLISWFAIHPVSMNNSNHLVNSDNVGYASYLLEQEKNKGYLPGQGPFVAAFASSNLGDVSPNILGPRCINTGESCDNANSTCPIGGPSMCIAKGPGQDMFDSTQIIGRAMYQRAKSKTCKPALGYSFAAGTIDGVGGLNFTQGKTEGDPFWDTIRDQILGKPSEEIKECHKPKPILLHTGELSKPHPWHPDIVDVQIITLGSLAITAIPGEFTTMSGRRLREAVQAEFASHGMQNMTVVISGLCNVYTHYITTYEEYQAQRYEAASTIYGPHTLSAYIQLFRNLAKAIATDTVANLSRGPEPPFFKQLIVPLIPSIVDRAPKGRTFGDVLQPAKPEYRVGEVAEVIFVGANPKNSVQNQTHQTFLTVEKYEATSTSWQIVCNDASWETRFYWHKGLLGLSNATVEWHIPDTAQPGIYRIRYFGHNRKQDILKPAVILSFEGTSPAFEVVTI

SEQ ID NO: 54954 - protein, 622 aa, Homo sapiens
  Payload ID: 10852
  Gene Symbol: ASAH2
  Gene Name: N-acylsphingosine amidohydrolase (non-lysosomal ceramidase) 2
  ENSP ID: ENSP00000392766
MDSEKSSEWRSDVLNRLQSKYGSLYRRDNVILSGTHTHSGPAGYFQYTVFVIASEGFSNQTFQHMVTGILKSIDIAHTNMKPGKIFINKGNVDGVQINRSPYSYLQNPQSERARYSSNTDKEMIVLKMVDLNGDDLGLISWFAIHPVSMNNSNHLVNSDNVGYASYLLEQEKNKGYLPGQGPFVAAFASSNLGDVSPNILGPRCINTGESCDNANSTCPIGGPSMCIAKGPGQDMFDSTQIIGRAMYQRAKELYASASQEVTGPLASAHQWVDMTDVTVWLNSTHASKTCKPALGYSFAAGTIDGVGGLNFTQGKTEGDPFWDTIRDQILGKPSEEIKECHKPKPILLHTGELSKPHPWHPDIVDVQIITLGSLAITAIPGEFTTMSGRRLREAVQAEFASHGMQNMTVVISGLCNVYTHYITTYEEYQAQRYEAASTIYGPHTLSAYIQLFRNLAKAIATDTVANLSRGPEPPFFKQLIVPLIPSIVDRAPKGRTFGDVLQPAKPEYRVGEVAEVIFVGANPKNSVQNQTHQTFLTVEKYEATSTSWQIVCNDASWETRFYWHKGLLGLSNATVEWHIPDTAQPGIYRIRYFGHNRKQDILKPAVILSFEGTSPAFEVVTI

SEQ ID NO: 54955 - protein, 51 aa, Homo sapiens
  Payload ID: 10852
  Gene Symbol: ASAH2
  Gene Name: N-acylsphingosine amidohydrolase (non-lysosomal ceramidase) 2
  ENSP ID: ENSP00000476403
AQRYEAASTIYGPHTLSAYIQLFRNLAKAIATELHLWKSSLWMQLFMKLQL

SEQ ID NO: 54956 - protein, 144 aa, Homo sapiens
  Payload ID: 10852
  Gene Symbol: ASAH2
  Gene Name: N-acylsphingosine amidohydrolase (non-lysosomal ceramidase) 2
  ENSP ID: ENSP00000476827
AQRYEAASTIYGPHTLSAYIQLFRNLAKAIATGEVAEVIFVGANPKNSVQNQTHQTFLTVEKYEATSTSWQIVCNDASWETRFYWHKGLLGLSNATVEWHIPDTAQPGIYRIRYFGHNRKQDILKPAVILSFEGTSPAFEVVTI

SEQ ID NO: 54957 - protein, 165 aa, Homo sapiens
  Payload ID: 10853
  Gene Symbol: ASAH2B
  Gene Name: N-acylsphingosine amidohydrolase (non-lysosomal ceramidase) 2B
  Uniprot ID: P0C7U1
  ENSP ID: ENSP00000363118
MRQHRQFMDRTHYLLTFSSSETLLRLLLRIVDRAPKGRTFGDVLQPAKPEYRVGEVAEVIFVGANPKNSVQNQTHQTFLTVEKYEATSTSWQIVCNDASWETRFYWHKGLLGLSNATVEWHIPDTAQPGIYRIRYFGHNRKQDILKPAVILSFEGTSPAFEVVTI

SEQ ID NO: 54958 - protein, 160 aa, Homo sapiens
  Payload ID: 10853
  Gene Symbol: ASAH2B
  Gene Name: N-acylsphingosine amidohydrolase (non-lysosomal ceramidase) 2B
  Uniprot ID: P0C7U1
  ENSP ID: ENSP00000363119
MVANLSRGPEPPFFKQLIVPLIPSIVDRAPKGRTFGDVLQPAKPEYRVGEVAEVIFVGANPKNSVQNQTHQTFLTVEKYEATSTSWQIVCNDASWETRFYWHKGLLGLSNATVEWHIPDTAQPGIYRIRYFGHNRKQDILKPAVILSFEGTSPAFEVVTI

SEQ ID NO: 54959 - protein, 414 aa, Homo sapiens
  Payload ID: 10854
  Gene Symbol: NADK
  Gene Name: NAD kinase
  ENSP ID: ENSP00000339727
MGRPRVRQAWPGCCGHTGRLPAGRGYLASHMCDPAGAELIGDGMSDPTPPSNACTGHIQDPASQRLTWNKSPKSVLVIKKMRDASLLQPFKELCTHLMEENMIVYVEKKVLEDPAIASDESFGAVKKKFCTFREDYDDISNQIDFIICLGGDGTLLYASSLFQGSVPPVMAFHLGSLGFLTPFSFENFQSQVTQVIEGNAAVVLRSRLKVRVVKELRGKKTAVHNGLGENGSQAAGLDMDVGKQAMQYQVLNEVVIDRGPSSYLSNVDVYLDGHLITTVQGDGVIVSTPTGSTAYAAAAGASMIHPNVPAIMITPICPHSLSFRPIVVPAGVELKIMLSPEARNTAWVSFDGRKRQEIRHGDSISITTSCYPLPSICVRDPVSDWFESLAQCLHWNVRKKQAHFEEEEEEEEEG

SEQ ID NO: 54960 - protein, 446 aa, Homo sapiens
  Payload ID: 10854
  Gene Symbol: NADK
  Gene Name: NAD kinase
  Uniprot ID: O95544
  ENSP ID: ENSP00000341679
MEMEQEKMTMNKELSPDAAAYCCSACHGDETWSYNHPIRGRAKSRSLSASPALGSTKEFRRTRSLHGPCPVTTFGPKACVLQNPQTIMHIQDPASQRLTWNKSPKSVLVIKKMRDASLLQPFKELCTHLMEENMIVYVEKKVLEDPAIASDESFGAVKKKFCTFREDYDDISNQIDFIICLGGDGTLLYASSLFQGSVPPVMAFHLGSLGFLTPFSFENFQSQVTQVIEGNAAVVLRSRLKVRVVKELRGKKTAVHNGLGENGSQAAGLDMDVGKQAMQYQVLNEVVIDRGPSSYLSNVDVYLDGHLITTVQGDGVIVSTPTGSTAYAAAAGASMIHPNVPAIMITPICPHSLSFRPIVVPAGVELKIMLSPEARNTAWVSFDGRKRQEIRHGDSISITTSCYPLPSICVRDPVSDWFESLAQCLHWNVRKKQAHFEEEEEEEEEG

SEQ ID NO: 54961 - protein, 446 aa, Homo sapiens; identical to SEQ ID NO: 54960
  Payload ID: 10854
  Gene Symbol: NADK
  Gene Name: NAD kinase
  Uniprot ID: O95544
  ENSP ID: ENSP00000344340

SEQ ID NO: 54962 - protein, 591 aa, Homo sapiens
  Payload ID: 10854
  Gene Symbol: NADK
  Gene Name: NAD kinase
  Uniprot ID: O95544
  ENSP ID: ENSP00000367890
MEMEQEKMTMNKELSPDAAAYCCSACHGDETWSYNHPIRGRAKSRSLSASPALGSTKEFRRTRSLHGPCPVTTFGPKACVLQNPQTIIATPLSLASQLLPSPAVSHSGQGGVTGQVHVLPQPSDQGVLSGPRAARGQTAPQEEAVTQEEVEALVCGHTQRWVPGPVYDAAAGGSGWAQLSLRAGMGVGQATGHIQDPASQRLTWNKSPKSVLVIKKMRDASLLQPFKELCTHLMEARGAGGKGAWGAHGVGGASIHITAPRVGSAGGMSRLALCFQENMIVYVEKKVLEDPAIASDESFGAVKKKFCTFREDYDDISNQIDFIICLGGDGTLLYASSLFQGSVPPVMAFHLGSLGFLTPFSFENFQSQVTQVIEGNAAVVLRSRLKVRVVKELRGKKTAVHNGLGENGSQAAGLDMDVGKQAMQYQVLNEVVIDRGPSSYLSNVDVYLDGHLITTVQGDGVIVSTPTGSTAYAAAAGASMIHPNVPAIMITPICPHSLSFRPIVVPAGVELKIMLSPEARNTAWVSFDGRKRQEIRHGDSISITTSCYPLPSICVRDPVSDWFESLAQCLHWNVRKKQAHFEEEEEEEEEG

SEQ ID NO: 54963 - protein, 44 aa, Homo sapiens
  Payload ID: 10854
  Gene Symbol: NADK
  Gene Name: NAD kinase
  ENSP ID: ENSP00000462589
  MOD_RES (1)..(1): Any amino acid
XSPKSVLVIKKMRDASLLQPFKELCTHLMEKSRRGGCGAQESHS

SEQ ID NO: 54964 - protein, 74 aa, Homo sapiens
  Payload ID: 10854
  Gene Symbol: NADK
  Gene Name: NAD kinase
  ENSP ID: ENSP00000462999
ENMIVYVEKKVLEDPAIASDESFGAVKKKFCTFREDYDDISNQIDFIICLGGDGTLLYASSLFQGTQLLFSGVG

SEQ ID NO: 54965 - protein, 30 aa, Homo sapiens
  Payload ID: 10854
  Gene Symbol: NADK
  Gene Name: NAD kinase
  ENSP ID: ENSP00000464096
ASLLQPFKELCTHLMEKSRRGGCGAQESHS

SEQ ID NO: 54966 - protein, 38 aa, Homo sapiens
  Payload ID: 10854
  Gene Symbol: NADK
  Gene Name: NAD kinase
  ENSP ID: ENSP00000464137
VLNEVVIDRGPSSYLSNVDVYLDGHLITTVQGDDHAVT

SEQ ID NO: 54967 - protein, 279 aa, Homo sapiens
  Payload ID: 10855
  Gene Symbol: NADK2
  Gene Name: NAD kinase 2, mitochondrial
  Uniprot ID: Q4G0N4
  ENSP ID: ENSP00000282512
MLLAASKVLDRLKPVIGVNTDPERSEGHLCLPVRYTHSFPEALQKFYRGEFRWLWRQRIRLYLEGTGINPVPVDLHEQQLSLNQHNRALNIERAHDERSEASGPQLLPVRALNEVFIGESLSSRASYYEISVDDGPWEKQKSSGLNLCTGTGSKAWSFNINRVATQAVEDVLNIAKRQGNLSLPLNRELVEKVTNEYNESLLYSPEEPKILFSIREPIANRVFSSSRQRCFSSKVCVRSRCWDACMVVDGGTSFEFNDGAIASMMINKEDELRTVLLEQ

SEQ ID NO: 54968 - protein, 442 aa, Homo sapiens
  Payload ID: 10855
  Gene Symbol: NADK2
  Gene Name: NAD kinase 2, mitochondrial
  Uniprot ID: Q4G0N4
  ENSP ID: ENSP00000371362
MTCYRGFLLGSCCRVAGGRAAALRGPGAGGPAARPRLGGDGGGRRHLGQGQPRELAGCGSRADGGFRPSRVVVVAKTTRYEFEQQRYRYAELSEEDLKQLLALKGSSYSGLLERHHIHTKNVEHIIDSLRNEGIEVRLVKRREYDEETVRWADAVIAAGGDGTMLLAASKVLDRLKPVIGVNTDPERSEGHLCLPVRYTHSFPEALQKFYRGEFRWLWRQRIRLYLEGTGINPVPVDLHEQQLSLNQHNRALNIERAHDERSEASGPQLLPVRALNEVFIGESLSSRASYYEISVDDGPWEKQKSSGLNLCTGTGSKAWSFNINRVATQAVEDVLNIAKRQGNLSLPLNRELVEKVTNEYNESLLYSPEEPKILFSIREPIANRVFSSSRQRCFSSKVCVRSRCWDACMVVDGGTSFEFNDGAIASMMINKEDELRTVLLEQ

SEQ ID NO: 54969 - protein, 279 aa, Homo sapiens; identical to SEQ ID NO: 54967
  Payload ID: 10855
  Gene Symbol: NADK2
  Gene Name: NAD kinase 2, mitochondrial
  Uniprot ID: Q4G0N4
  ENSP ID: ENSP00000380499

SEQ ID NO: 54970 - protein, 410 aa, Homo sapiens
  Payload ID: 10855
  Gene Symbol: NADK2
  Gene Name: NAD kinase 2, mitochondrial
  Uniprot ID: Q4G0N4
  ENSP ID: ENSP00000421029
MTCYRGFLLGSCCRVAGGRAAALRGPGAGGPAARPRLGGDGGGRRHLGQGQPRELAGCGSRADGGFRPSRVVVVAKTTRYEFEQQRYRYAELSEEDLKQLLALKGSSYSGLLERHHIHTKNVEHIIDSLRNEGIEVRLVKRREYDEETVRWADAVIAAGGDGTMLLAASKVLDRLKPVIGVNTDPERSEGHLCLPVRYTHSFPEALQKFYRGEFRWLWRQRIRLYLEGTGINPVPVDLHEQQLSLNQHNRALNIERAHDERSEASGPQLLPVRALNEVFIGESLSSRSFNINRVATQAVEDVLNIAKRQGNLSLPLNRELVEKVTNEYNESLLYSPEEPKILFSIREPIANRVFSSSRQRCFSSKVCVRSRCWDACMVVDGGTSFEFNDGAIASMMINKEDELRTVLLEQ

SEQ ID NO: 54971 - protein, 301 aa, Homo sapiens
  Payload ID: 10855
  Gene Symbol: NADK2
  Gene Name: NAD kinase 2, mitochondrial
  ENSP ID: ENSP00000422250
MLLAASKVLDRLKPVIGVNTDPERSEGHLCLPVRYTHSFPEALQKFYRGEFRWLWRQRIRLYLEGTGINPVPVDLHEQQLSLNQHNRALNIERAHDERSEASGPQLLPVRALNEVFIGESLSSRMSYSWAVAVDNLRRSIPTLKGLASYYEISVDDGPWEKQKSSGLNLCTGTGSKAWSFNINRVATQAVEDVLNIAKRQGNLSLPLNRELVEKVTNEYNESLLYSPEEPKILFSIREPIANRVFSSSRQRCFSSKVCVRSRCWDACMVVDGGTSFEFNDGAIASMMINKEDELRTVLLEQ

SEQ ID NO: 54972 - protein, 137 aa, Homo sapiens
  Payload ID: 10855
  Gene Symbol: NADK2
  Gene Name: NAD kinase 2, mitochondrial
  ENSP ID: ENSP00000424166
  MOD_RES (1)..(1): Any amino acid
XSYYEISVDDGPWEKQKSSGLNLCTGTGSKAWSFNINRVATQAVEDVLNIVTNEYNESLLYSPEEPKILFSIREPIANRVFSSSRQRCFSSKVCVRSRCWDACMVVDGGTSFEFNDGAIASMMINKEDELRTVLLEQ

SEQ ID NO: 54973 - protein, 82 aa, Homo sapiens
  Payload ID: 10855
  Gene Symbol: NADK2
  Gene Name: NAD kinase 2, mitochondrial
  ENSP ID: ENSP00000426084
MLLAASKVLDRLKPVIGVNTDPERSEGHLCLPVRYTHSFPEALQKFYRGEFRWLWRQRIRLYLEGTGINPVPVDLHEQQLSL

SEQ ID NO: 54974 - protein, 247 aa, Homo sapiens
  Payload ID: 10855
  Gene Symbol: NADK2
  Gene Name: NAD kinase 2, mitochondrial
  ENSP ID: ENSP00000480506
MLLAASKVLDRLKPVIGVNTDPERSEGHLCLPVRYTHSFPEALQKFYRGEFRWLWRQRIRLYLEGTGINPVPVDLHEQQLSLNQHNRALNIERAHDERSEASGPQLLPVRALNEVFIGESLSSRSFNINRVATQAVEDVLNIAKRQGNLSLPLNRELVEKVTNEYNESLLYSPEEPKILFSIREPIANRVFSSSRQRCFSSKVCVRSRCWDACMVVDGGTSFEFNDGAIASMMINKEDELRTVLLEQ

SEQ ID NO: 54975 - protein, 706 aa, Homo sapiens
  Payload ID: 10856
  Gene Symbol: NADSYN1
  Gene Name: NAD synthetase 1
  Uniprot ID: Q6IA69
  ENSP ID: ENSP00000326424
MGRKVTVATCALNQWALDFEGNLQRILKSIEIAKNRGARYRLGPELEICGYGCWDHYYESDTLLHSFQVLAALVESPVTQDIICDVGMPVMHRNVRYNCRVIFLNRKILLIRPKMALANEGNYRELRWFTPWSRSRHTEEYFLPRMIQDLTKQETVPFGDAVLVTWDTCIGSEICEELWTPHSPHIDMGLDGVEIITNASGSHQVLRKANTRVDLVTMVTSKNGGIYLLANQKGCDGDRLYYDGCAMIAMNGSVFAQGSQFSLDDVEVLTATLDLEDVRSYRAEISSRNLAASRASPYPRVKVDFALSCHEDLLAPISEPIEWKYHSPEEEISLGPACWLWDFLRRSQQAGFLLPLSGGVDSAATACLIYSMCCQVCEAVRSGNEEVLADVRTIVNQISYTPQDPRDLCGRILTTCYMASKNSSQETCTRARELAQQIGSHHISLNIDPAVKAVMGIFSLVTGKSPLFAAHGGSSRENLALQNVQARIRMVLAYLFAQLSLWSRGVHGGLLVLGSANVDESLLGYLTKYDCSSADINPIGGISKTDLRAFVQFCIQRFQLPALQSILLAPATAELEPLADGQVSQTDEEDMGMTYAELSVYGKLRKVAKMGPYSMFCKLLGMWRHICTPRQVADKVKRFFSKYSMNRHKMTTLTPAYHAENYSPEDNRFDLRPFLYNTSWPWQFRCIENQVLQLERAEPQSLDGVD

SEQ ID NO: 54976 - protein, 83 aa, Homo sapiens
  Payload ID: 10856
  Gene Symbol: NADSYN1
  Gene Name: NAD synthetase 1
  ENSP ID: ENSP00000431515
  MOD_RES (1)..(1): Any amino acid
XGGQGAVTLGSSQRTTGCVNRSPCLHGHLRPGSPDGHAGSGGRPELQGGDFISKPGGQQGEPLPQSEGGLCPLVPRGLAGTHL

SEQ ID NO: 54977 - protein, 335 aa, Homo sapiens
  Payload ID: 10856
  Gene Symbol: NADSYN1
  Gene Name: NAD synthetase 1
  ENSP ID: ENSP00000431820
MCCQVCEAVRSGNEEVLADVRTIVNQISYTPQDPRDLCGRILTTCYMASKNSSQETCTRARELAQQIGSHHISLNIDPAVKAVMGIFSLVTGKSPLFAAHGGSSRENLALQNVQARIRMVLAYLFAQLSLWSRGVHGGLLVLGSANVDESLLGYLTKYDCSSADINPIGGISKTDLRAFVQFCIQRFQLPALQSILLAPATAELEPLADGQVSQTDEEDMGMTYAELSVYGKLRKVAKMGPYSMFCKLLGMWRHICTPRQVADKVKRFFSKYSMNRHKMTTLTPAYHAENYSPEDNRFDLRPFLYNTSWPWQFRCIENQVLQLERAEPQSLDGVD

SEQ ID NO: 54978 - protein, 259 aa, Homo sapiens
  Payload ID: 10856
  Gene Symbol: NADSYN1
  Gene Name: NAD synthetase 1
  ENSP ID: ENSP00000432129
  MOD_RES (1)..(1): Any amino acid
XNRGARYRLGPELEICGYGCWDHYYESDTLLHSFQVLAALVESPVTQDIICDVGMPVMHRNVRYNCRVIFLNRKILLIRPKMALANEGNYRELRWFTPWSRSRHTEEYFLPRMIQDLTKQETVPFGDAVLVTWDTCIGSEICEELWTPHSPHIDMGLDGVEIITNASGSHQVLRKANTRVDLVTMVTSKNGGIYLLANQKGCDGDRLYYDGCAMIAMNGSVFAQGSQFSLDDVQTRKNGLLLPQMETNPKCTNTTKSNF

SEQ ID NO: 54979 - protein, 294 aa, Homo sapiens
  Payload ID: 10856
  Gene Symbol: NADSYN1
  Gene Name: NAD synthetase 1
  ENSP ID: ENSP00000433472
MGRKVTVATCALNQWALDFEGNLQRILKSIEIAKNRGARYRLGPELEICGYGCWDHYYESDTLLHSFQVLAALVESPVTQDIICDVGMPVMHRNVRYNCRVIFLNRKILLIRPKMALANEGNYRELRWFTPWSRSRHTEEYFLPRMIQDLTKQETVPFGDAVLVTWDTCIGSEICEELWTPHSPHIDMGLDGVEIITNASGSHQVLRKANTRVDLVTMVTSKNGGIYLLANQKGCDGDRLYYDGCAMIAMNGSVFAQGSQFSLDDVVMSGPGHAWGRVLCAETELLALPCKPGA

SEQ ID NO: 54980 - protein, 111 aa, Homo sapiens
  Payload ID: 10856
  Gene Symbol: NADSYN1
  Gene Name: NAD synthetase 1
  ENSP ID: ENSP00000433612
  MOD_RES (1)..(1): Any amino acid
XELSVYGKLRKVAKMGPYSMFCKLLGMWRHICTPRQVADKVKRFFSKYSMNRHKMTTLTPAYHAENYSPEDNRFDLRPFLYNTSWPWQFRCIENQVLQLERAEPQSLDGVD

SEQ ID NO: 54981 - protein, 59 aa, Homo sapiens
  Payload ID: 10856
  Gene Symbol: NADSYN1
  Gene Name: NAD synthetase 1
  ENSP ID: ENSP00000435570
  MOD_RES (1)..(1): Any amino acid
XKMTTLTPAYHAENYSPEDNRFDLRPFLYNTSWPWQFRCIENQVLQLERAEPQSLDGVD

SEQ ID NO: 54982 - protein, 149 aa, Homo sapiens
  Payload ID: 10856
  Gene Symbol: NADSYN1
  Gene Name: NAD synthetase 1
  ENSP ID: ENSP00000437172
MCCQVCEAVRSGNEEVLADVRTIVNQISYTPQDPRDLCGRILTTCYMASKNSSQETCTRARELAQQIGSHHISLNIDPAVKAVMGIFSLVTGKSPLFAAHGGSSRENLALQNVQARIRMVLAYLFAQLSLWSRGVHGGLLVLGSANVDE

SEQ ID NO: 54983 - protein, 88 aa, Homo sapiens
  Payload ID: 10856
  Gene Symbol: NADSYN1
  Gene Name: NAD synthetase 1
  ENSP ID: ENSP00000437220
MGRKVTVATCALNQWALDFEGNLQRILKSIEIAKNRGARYRLGPELEICGYGCWDHYYESDTLLHSFQVLAALVESPVTQDIICDVGM

SEQ ID NO: 54984 - protein, 373 aa, Homo sapiens
  Payload ID: 10857
  Gene Symbol: NSDHL
  Gene Name: NAD(P) dependent steroid dehydrogenase-like
  Uniprot ID: Q15738
  ENSP ID: ENSP00000359297
MEPAVSEPMRDQVARTHLTEDTPKVNADIEKVNQNQAKRCTVIGGSGFLGQHMVEQLLARGYAVNVFDIQQGFDNPQVRFFLGDLCSRQDLYPALKGVNTVFHCASPPPSSNNKELFYRVNYIGTKNVIETCKEAGVQKLILTSSASVIFEGVDIKNGTEDLPYAMKPIDYYTETKILQERAVLGANDPEKNFLTTAIRPHGIFGPRDPQLVPILIEAARNGKMKFVIGNGKNLVDFTFVENVVHGHILAAEQLSRDSTLGGKAFHITNDEPIPFWTFLSRILTGLNYEAPKYHIPYWVAYYLALLLSLLVMVISPVIQLQPTFTPMRVALAGTFHYYSCERAKKAMGYQPLVTMDDAMERTVQSFRHLRRVK

SEQ ID NO: 54985 - protein, 373 aa, Homo sapiens; identical to SEQ ID NO: 54984
  Payload ID: 10857
  Gene Symbol: NSDHL
  Gene Name: NAD(P) dependent steroid dehydrogenase-like
  Uniprot ID: Q15738
  ENSP ID: ENSP00000391854

SEQ ID NO: 54986 - protein, 254 aa, Homo sapiens
  Payload ID: 10857
  Gene Symbol: NSDHL
  Gene Name: NAD(P) dependent steroid dehydrogenase-like
  ENSP ID: ENSP00000396266
MEPAVSEPMRDQVARTHLTEDTPKVNADIEKVNQNQAKRCTVIGGSGFLGQHMVEQLLARGYAVNVFDIQQGFDNPQVRFFLGDLCSRQDLYPALKGVNTVFHCASPPPSSNNKELFYRVNYIGTKNVIETCKEAGVQKLILTSSASVIFEGVDIKNGTEDLPYAMKPIDYYTETKILQERAVLGANDPEKNFLTTAIRPHGIFGPRDPQLVPILIEAARNGKMKFVIGNGKNLVDFTFVENVVHGHILAAEQL

SEQ ID NO: 54987 - protein, 274 aa, Homo sapiens
  Payload ID: 10858
  Gene Symbol: NQO1
  Gene Name: NAD(P)H dehydrogenase, quinone 1
  Uniprot ID: P15559
  ENSP ID: ENSP00000319788
MVGRRALIVLAHSERTSFNYAMKEAAAAALKKKGWEVVESDLYAMNFNPIISRKDITGKLKDPANFQYPAESVLAYKEGHLSPDIVAEQKKLEAADLVIFQFPLQWFGVPAILKGWFERVFIGEFAYTYAAMYDKGPFRSKKAVLSITTGGSGSMYSLQGIHGDMNVILWPIQSGILHFCGFQVLEPQLTYSIGHTPADARIQILEGWKKRLENIWDETPLYFAPSSLFDLNFQAGFLMKKEVQDEEKNKKFGLSVGHHLGKSIPTDNQIKARK

SEQ ID NO: 54988 - protein, 236 aa, Homo sapiens
  Payload ID: 10858
  Gene Symbol: NQO1
  Gene Name: NAD(P)H dehydrogenase, quinone 1
  Uniprot ID: P15559
  ENSP ID: ENSP00000368334
MVGRRALIVLAHSERTSFNYAMKEAAAAALKKKGWEVVESDLYAMNFNPIISRKDITGKLKDPANFQYPAESVLAYKEGHLSPDIVAEQKKLEAADLVIFQSKKAVLSITTGGSGSMYSLQGIHGDMNVILWPIQSGILHFCGFQVLEPQLTYSIGHTPADARIQILEGWKKRLENIWDETPLYFAPSSLFDLNFQAGFLMKKEVQDEEKNKKFGLSVGHHLGKSIPTDNQIKARK

SEQ ID NO: 54989 - protein, 240 aa, Homo sapiens
  Payload ID: 10858
  Gene Symbol: NQO1
  Gene Name: NAD(P)H dehydrogenase, quinone 1
  Uniprot ID: P15559
  ENSP ID: ENSP00000368335
MVGRRALIVLAHSERTSFNYAMKEAAAAALKKKGWEVVESDLYAMNFNPIISRKDITGKLKDPANFQYPAESVLAYKEGHLSPDIVAEQKKLEAADLVIFQFPLQWFGVPAILKGWFERVFIGEFAYTYAAMYDKGPFRSGILHFCGFQVLEPQLTYSIGHTPADARIQILEGWKKRLENIWDETPLYFAPSSLFDLNFQAGFLMKKEVQDEEKNKKFGLSVGHHLGKSIPTDNQIKARK

SEQ ID NO: 54990 - protein, 202 aa, Homo sapiens
  Payload ID: 10858
  Gene Symbol: NQO1
  Gene Name: NAD(P)H dehydrogenase, quinone 1
  ENSP ID: ENSP00000398330
MVGRRALIVLAHSERTSFNYAMKEAAAAALKKKGWEVVESDLYAMNFNPIISRKDITGKLKDPANFQYPAESVLAYKEGHLSPDIVAEQKKLEAADLVIFQSGILHFCGFQVLEPQLTYSIGHTPADARIQILEGWKKRLENIWDETPLYFAPSSLFDLNFQAGFLMKKEVQDEEKNKKFGLSVGHHLGKSIPTDNQIKARK

SEQ ID NO: 54991 - protein, 253 aa, Homo sapiens
  Payload ID: 10858
  Gene Symbol: NQO1
  Gene Name: NAD(P)H dehydrogenase, quinone 1
  ENSP ID: ENSP00000455020
MKEAAAAALKKKGWEVVESDLYAMNFNPIISRKDITGKLKDPANFQYPAESVLAYKEGHLSPDIVAEQKKLEAADLVIFQFPLQWFGVPAILKGWFERVFIGEFAYTYAAMYDKGPFRSKKAVLSITTGGSGSMYSLQGIHGDMNVILWPIQSGILHFCGFQVLEPQLTYSIGHTPADARIQILEGWKKRLENIWDETPLYFAPSSLFDLNFQAGFLMKKEVQDEEKNKKFGLSVGHHLGKSIPTDNQIKARK

SEQ ID NO: 54992 - protein, 269 aa, Homo sapiens
  Payload ID: 10858
  Gene Symbol: NQO1
  Gene Name: NAD(P)H dehydrogenase, quinone 1
  ENSP ID: ENSP00000456282
MVGRRALIVLAHSERTSFNYAMKEAAAAALKKKGWEVVESDLYAMNFNPIISRKDITGKLKDPANFQYPAESVLAYKEGHLSPDIVAEQKKLEAADLVIFQSKKAVLSITTGGSGSMYSLQGIHGDMNVILWPIQSGILHFCGFQVLEPQLTYSIGHTPADARIQILEGWKKRLENIWDETPLYFAPSSLFDLNFQAGFLMKKEFHSVTQVGVHAQPPCRDSLQHLGILGSPHQQEGSHQTQPLHLDFSASMAVRNSFSLYIAQLQVFC

SEQ ID NO: 54993 - protein, 231 aa, Homo sapiens
  Payload ID: 10859
  Gene Symbol: NQO2
  Gene Name: NAD(P)H dehydrogenase, quinone 2
  Uniprot ID: P16083
  ENSP ID: ENSP00000337773
MAGKKVLIVYAHQEPKSFNGSLKNVAVDELSRQGCTVTVSDLYAMNLEPRATDKDITGTLSNPEVFNYGVETHEAYKQRSLASDITDEQKKVREADLVIFQFPLYWFSVPAILKGWMDRVLCQGFAFDIPGFYDSGLLQGKLALLSVTTGGTAEMYTKTGVNGDSRYFLWPLQHGTLHFCGFKVLAPQISFAPEIASEEERKGMVAAWSQRLQTIWKEEPIPCTAHWHFGQ

SEQ ID NO: 54994 - protein, 231 aa, Homo sapiens; identical to SEQ ID NO: 54993
  Payload ID: 10859
  Gene Symbol: NQO2
  Gene Name: NAD(P)H dehydrogenase, quinone 2
  Uniprot ID: P16083
  ENSP ID: ENSP00000369795

SEQ ID NO: 54995 - protein, 193 aa, Homo sapiens
  Payload ID: 10859
  Gene Symbol: NQO2
  Gene Name: NAD(P)H dehydrogenase, quinone 2
  ENSP ID: ENSP00000369806
MAGKKVLIVYAHQEPKSFNGSLKNVAVDELSRQGCTVTVSDLYAMNLEPRATDKDITGTLSNPEVFNYGVETHEAYKQRSLASDITDEQKKVREADLVIFQGKLALLSVTTGGTAEMYTKTGVNGDSRYFLWPLQHGTLHFCGFKVLAPQISFAPEIASEEERKGMVAAWSQRLQTIWKEEPIPCTAHWHFGQ

SEQ ID NO: 54996 - protein, 193 aa, Homo sapiens; identical to SEQ ID NO: 54995
  Payload ID: 10859
  Gene Symbol: NQO2
  Gene Name: NAD(P)H dehydrogenase, quinone 2
  ENSP ID: ENSP00000369821

SEQ ID NO: 54997 - protein, 231 aa, Homo sapiens; identical to SEQ ID NO: 54993
  Payload ID: 10859
  Gene Symbol: NQO2
  Gene Name: NAD(P)H dehydrogenase, quinone 2
  Uniprot ID: P16083
  ENSP ID: ENSP00000369822

SEQ ID NO: 54998 - protein, 139 aa, Homo sapiens
  Payload ID: 10859
  Gene Symbol: NQO2
  Gene Name: NAD(P)H dehydrogenase, quinone 2
  ENSP ID: ENSP00000369839
MAGKKVLIVYAHQEPKSFNGSLKNVAVDELSRQGCTVTVSDLYAMNLEPRATDKDITGTLSNPEVFNYGVETHEAYKQRSLASDITDEQKKVREADLVIFQFPLYWFSVPAILKGWMDRVLCQGFAFDIPGFYDSGLLQ

SEQ ID NO: 54999 - protein, 139 aa, Homo sapiens; identical to SEQ ID NO: 54998
  Payload ID: 10859
  Gene Symbol: NQO2
  Gene Name: NAD(P)H dehydrogenase, quinone 2
  ENSP ID: ENSP00000380829

SEQ ID NO: 55000 - protein, 63 aa, Homo sapiens
  Payload ID: 10859
  Gene Symbol: NQO2
  Gene Name: NAD(P)H dehydrogenase, quinone 2
  ENSP ID: ENSP00000406951
MAGKKVLIVYAHQEPKSFNGSLKNVAVDELSRQGCTVTVSDLYAMNLEPRATDKDITGTLSNP

SEQ ID NO: 55001 - protein, 35 aa, Homo sapiens
  Payload ID: 10859
  Gene Symbol: NQO2
  Gene Name: NAD(P)H dehydrogenase, quinone 2
  ENSP ID: ENSP00000475864
MAEFRFLKSGALPILSLLCLQALKFSLGCSRGSSE

SEQ ID NO: 55002 - protein, 70 aa, Homo sapiens
  Payload ID: 10860
  Gene Symbol: NDUFA1
  Gene Name: NADH dehydrogenase (ubiquinone) 1 alpha subcomplex, 1, 7.5kDa
  Uniprot ID: O15239
  ENSP ID: ENSP00000360492
MWFEILPGLSVMGVCLLIPGLATAYIHRFTNGGKEKRVAHFGYHWSLMERDRRISGVDRYYVSKGLENID

SEQ ID NO: 55003 - protein, 355 aa, Homo sapiens
  Payload ID: 10861
  Gene Symbol: NDUFA10
  Gene Name: NADH dehydrogenase (ubiquinone) 1 alpha subcomplex, 10, 42kDa
  Uniprot ID: O95299
  ENSP ID: ENSP00000252711
MALRLLKLAATSASARVVAAGAQRVRGIHSSVQCKLRYGMWHFLLGDKASKRLTERSRVITVDGNICTGKGKLAKEIAEKLGFKHFPEAGIHYPDSTTGDGKPLATDYNGNCSLEKFYDDPRSNDGNSYRLQSWLYSSRLLQYSDALEHLLTTGQGVVLERSIFSDFVFLEAMYNQGFIRKQCVDHYNEVKSVTICDYLPPHLVIYIDVPVPEVQRRIQKKGDPHEMKITSAYLQDIENAYKKTFLPEMSEKCEVLQYSAREAQDSKKVVEDIEYLKFDKGPWLKQDNRTLYHLRLLVQDKFEVLNYTSIPIFLPEVTIGAHQTDRVLHQFRELPGRKYSPGYNTEVGDKWIWLK

SEQ ID NO: 55004 - protein, 429 aa, Homo sapiens
  Payload ID: 10861
  Gene Symbol: NDUFA10
  Gene Name: NADH dehydrogenase (ubiquinone) 1 alpha subcomplex, 10, 42kDa
  Uniprot ID: O95299
  ENSP ID: ENSP00000302321
MALRLLKLAATSASARVVAAGAQRVRGIHSSVQCKLRYGMWHFLLGDKASKRLTERSRVITVDGNICTGKGKLAKEIAEKLGFKHFPEAGIHYPDSTTGDGKPLATDYNGNCSLEKFYDDPRSNDGNSYRLQSWLYSSRLLQYSDALEHLLTTGQGVVLERSIFSDFVFLEAMYNQGFIRKQCESALQTHFWTGVAGASGKLESGSSEEVLLINERGGRSKPGVDHYNEVKSVTICDYLPPHLVIYIDVPVPEPHEMKITSAYLQDIENAYKKTFLPEMSEKCEVLQYSAREAQDSKKVVEDIEYLKFDKGPWLKQDNRTLYHLRLLVQDKFEVLNYTSIPIFLPEVTIGAHQTDRVLHQFRERLDWTVCFGEESTEVKHQGHLLSVQPGTVALTVGSWLRSCLLGLHWKLLFLFPESPMHTTAFMFLC

SEQ ID NO: 55005 - protein, 201 aa, Homo sapiens
  Payload ID: 10861
  Gene Symbol: NDUFA10
  Gene Name: NADH dehydrogenase (ubiquinone) 1 alpha subcomplex, 10, 42kDa
  ENSP ID: ENSP00000383975
MALRLLKLAATSASARVVAAGAQRVRGIHSSVQCKLRYGMWHFLLGDKASKRLTERSRVITVDGNICTGKGKLAKEIAEKLGFKHFPEAGIHYPDSTTGDGKPLATDYNGNCSLEKFYDDPRSNDGNSYRLQSWLYSSRLLQYSDALEHLLTTGQGVVLERSIFSDFVFLEAMYNQGFIRKQCESALQTHFWVCGATLQGL

SEQ ID NO: 55006 - protein, 390 aa, Homo sapiens
  Payload ID: 10861
  Gene Symbol: NDUFA10
  Gene Name: NADH dehydrogenase (ubiquinone) 1 alpha subcomplex, 10, 42kDa
  ENSP ID: ENSP00000385697
MALRLLKLAATSASARVVAAGAQRVRGIHSSVQCKLRYGMWHFLLGDKASKRLTERSRVITVDGNICTGKGKLAKEIAEKLGFKHFPEAGIHYPDSTTGDGKPLATDYNGNCSLEKFYDDPRSNDGNSYRLQSWLYSSRLLQYSDALEHLLTTGQGVVLERSIFSDFVFLEAMYNQGFIRKQCVDHYNEVKSVTICDYLPPHLVIYIDVPVPEVQRRIQKKGDPHEMKITSAYLQDIENAYKKTFLPEMSEKCEVLQYSAREAQDSKKVVEDIEYLKFDKGPWLKQDNRTLYHLRLLVQDKFEVLNYTSIPIFLPEVTIGAHQTDRVLHQFRELGIPYPQRAVQSTREGPEVLLTGLWRWEDLLIGLQLPGRKYSPGYNTEVGDKWIWLK

SEQ ID NO: 55007 - protein, 94 aa, Homo sapiens
  Payload ID: 10861
  Gene Symbol: NDUFA10
  Gene Name: NADH dehydrogenase (ubiquinone) 1 alpha subcomplex, 10, 42kDa
  ENSP ID: ENSP00000388413
MALRLLKLAATSASARVVAAGAQRVASSTFLKRGFIIQTVPQEMGSPSPPTIMATVVWRNFTMIREAMMATVTACSPGCTAVACCSTQMPWSTC

SEQ ID NO: 55008 - protein, 133 aa, Homo sapiens
  Payload ID: 10861
  Gene Symbol: NDUFA10
  Gene Name: NADH dehydrogenase (ubiquinone) 1 alpha subcomplex, 10, 42kDa
  ENSP ID: ENSP00000403080
  MOD_RES (1)..(1): Any amino acid
XSAYLQDIENAYKKTFLPEMSEKCEVLQYSAREAQDSKKVVEDIEYLKFDKGPWLKQDNRTLYHLRLLVQDKFEVLNYTSIPIFLPEVTIGAHQTDRVLHQFREVFQESEAKRLDVEEVCWKKTPLKDRGEEV

SEQ ID NO: 55009 - protein, 129 aa, Homo sapiens
  Payload ID: 10861
  Gene Symbol: NDUFA10
  Gene Name: NADH dehydrogenase (ubiquinone) 1 alpha subcomplex, 10, 42kDa
  ENSP ID: ENSP00000408055
DIENAYKKTFLPEMSEKCEVLQYSAREAQDSKKVVEDIEYLKFDKGPWLKQDNRTLYHLRLLVQDKFEVLNYTSIPIFLPEVTIGAHQTDRVLHQFREVPADQEHRWVSLLSSPLGSLFSEWSVCGEDS

SEQ ID NO: 55010 - protein, 138 aa, Homo sapiens
  Payload ID: 10861
  Gene Symbol: NDUFA10
  Gene Name: NADH dehydrogenase (ubiquinone) 1 alpha subcomplex, 10, 42kDa
  ENSP ID: ENSP00000408224
ENAYKKTFLPEMSEKCEVLQYSAREAQDSKKVVEDIEYLKFDKGPWLKQDNRTLYHLRLLVQDKFEVLNYTSIPIFLPEVTIGAHQTDRVLHQFREFSLFNGRKPDAVKILCSLLEADRSLLEADRSLLEADRVQDSC

SEQ ID NO: 55011 - protein, 244 aa, Homo sapiens
  Payload ID: 10861
  Gene Symbol: NDUFA10
  Gene Name: NADH dehydrogenase (ubiquinone) 1 alpha subcomplex, 10, 42kDa
  ENSP ID: ENSP00000411527
MALRLLKLAATSASARVVAAGAQRVRGIHSSVQCKLRYGMWHFLLGDKASKRLTERSRVITVDGNICTGKGKLAKEIAEKLGFKHFPEAGIHYPDSTTGDGKPLATDYNGNCSLEKFYDDPRSNDGNSYRLQSWLYSSRLLQYSDALEHLLTTGQGVVLERSIFSDFVFLEAMYNQGFIRKQLKNVRFYNILQGKLKIQKRVQDKFEVLNYTSIPIFLPEVTIGAHQTDRVLHQFRELPGRKYS

SEQ ID NO: 55012 - protein, 355 aa, Homo sapiens
  Payload ID: 10861
  Gene Symbol: NDUFA10
  Gene Name: NADH dehydrogenase (ubiquinone) 1 alpha subcomplex, 10, 42kDa
  ENSP ID: ENSP00000480897
MALRLLKLAATSASARVVARAPSAWRGIHSSVQCKLRYGMWHFLLGDKASKRLTERSRVITVDGNICTGKGKLAKEIAEKLGFKHFPEAGIHYPDSTTGDGKPLATDYNGNCSLEKFYDDPRSNDGNSYRLQSWLYSSRLLQYSDALEHLLTTGQGVVLERSIFSDFVFLEAMYNQGFIRKQCVDHYNEVKSVTICDYLPPHLVIYIDVPVPEVQRRIQKKGDPHEMKITSAYLQDIENAYKKTFLPEMSEKCEVLQYSAREAQDSKKVVEDIEYLKFDKGPWLKQDNRTLYHLRLLVQDKFEVLNYTSIPIFLPEVTIGAHQTDRVLHQFRELPGRKYSPGYNTEVGDKWIWLK

SEQ ID NO: 55013 - protein, 141 aa, Homo sapiens
  Payload ID: 10862
  Gene Symbol: NDUFA11
  Gene Name: NADH dehydrogenase (ubiquinone) 1 alpha subcomplex, 11, 14.7kDa
  Uniprot ID: Q86Y39
  ENSP ID: ENSP00000311740
MAPKVFRQYWDIPDGTDCHRKAYSTTSIASVAGLTAAAYRVTLNPPGTFLEGVAKVGQYTFTAAAVGAVFGLTTCISAHVREKPDDPLNYFLGGCAGGLTLGARTHNYGIGAAACVYFGIAASLVKMGRLEGWEVFAKPKV

SEQ ID NO: 55014 - protein, 228 aa, Homo sapiens
  Payload ID: 10862
  Gene Symbol: NDUFA11
  Gene Name: NADH dehydrogenase (ubiquinone) 1 alpha subcomplex, 11, 14.7kDa
  Uniprot ID: Q86Y39
  ENSP ID: ENSP00000389160
MAPKVFRQYWDIPDGTDCHRKAYSTTSIASVAGLTAAAYRVTLNPPGTFLEGVAKVGQYTFTAAAVGAVFGLTTCISAHVREKPDDPLNYFLGGCAGGLTLGARKTGSHCVVQAGLKLLASSSPHTSASQSAGIIGMSHCVQRFWVPSSSACLEVLSGESTDVHACSSTRGACNSSGSRPLPELGARASGSLRKGGHTHPAPRGAGALTPVQALIESLLNTLGSNPRT

SEQ ID NO: 55015 - protein, 35 aa, Homo sapiens
  Payload ID: 10862
  Gene Symbol: NDUFA11
  Gene Name: NADH dehydrogenase (ubiquinone) 1 alpha subcomplex, 11, 14.7kDa
  ENSP ID: ENSP00000466103
MAPKVFRQYWDIPDGTDCHRKAYSTTSIASVAGRD

SEQ ID NO: 55016 - protein, 120 aa, Homo sapiens
  Payload ID: 10862
  Gene Symbol: NDUFA11
  Gene Name: NADH dehydrogenase (ubiquinone) 1 alpha subcomplex, 11, 14.7kDa
  ENSP ID: ENSP00000467706
MAPKVFRQYWDIPDGTDCHRKAYSTTSIASVAGLTAAAYRVTLNPPGTFLEGVAKVGQYTFTAAAVGAVFGLTTCISAHVREKPDDPLNYFLGGCAGGLTLGARSEWPPPHPHPPPSLAE

SEQ ID NO: 55017 - protein, 145 aa, Homo sapiens
  Payload ID: 10863
  Gene Symbol: NDUFA12
  Gene Name: NADH dehydrogenase (ubiquinone) 1 alpha subcomplex, 12
  Uniprot ID: Q9UI09
  ENSP ID: ENSP00000330737
MELVQVLKRGLQQITGHGGLRGYLRVFFRTNDAKVGTLVGEDKYGNKYYEDNKQFFGRHRWVVYTTEMNGKNTFWDVDGSMVPPEWHRWLHSMTDDPPTTKPLTARKFIWTNHKFNVTGTPEQYVPYSTTRKKIQEWIPPSTPYK

SEQ ID NO: 55018 - protein, 99 aa, Homo sapiens
  Payload ID: 10863
  Gene Symbol: NDUFA12
  Gene Name: NADH dehydrogenase (ubiquinone) 1 alpha subcomplex, 12
  ENSP ID: ENSP00000448545
MELVQVLKRGLQQITGHGGLRGYLRVFFRTNDAKVGTLVGEDKYGNKYYEDNKQFFGRHRWVVYTTEMNGKNTFWDVDGSMVPPEWSLMGFKLNLHEPE

SEQ ID NO: 55019 - protein, 55 aa, Homo sapiens
  Payload ID: 10863
  Gene Symbol: NDUFA12
  Gene Name: NADH dehydrogenase (ubiquinone) 1 alpha subcomplex, 12
  ENSP ID: ENSP00000448846
MELVQVLKRGLQQITGHGGLRGYLRVFFRTNDAKKEDSGVDPTFNTLQVKTMKNS

SEQ ID NO: 55020 - protein, 54 aa, Homo sapiens
  Payload ID: 10863
  Gene Symbol: NDUFA12
  Gene Name: NADH dehydrogenase (ubiquinone) 1 alpha subcomplex, 12
  ENSP ID: ENSP00000449144
  MOD_RES (1)..(1): Any amino acid
XKRGLQQITGHGGLRGYLRVFFRTNDAKVGTLVGEDKYGNKYYEDNKQFFGALL

SEQ ID NO: 55021 - protein, 47 aa, Homo sapiens
  Payload ID: 10863
  Gene Symbol: NDUFA12
  Gene Name: NADH dehydrogenase (ubiquinone) 1 alpha subcomplex, 12
  ENSP ID: ENSP00000450096
RVFFRTNDAKVGTLVGEDKYGNKYYEDNKQFFDEETEAQGSIFTKET

SEQ ID NO: 55022 - protein, 63 aa, Homo sapiens
  Payload ID: 10863
  Gene Symbol: NDUFA12
  Gene Name: NADH dehydrogenase (ubiquinone) 1 alpha subcomplex, 12
  Uniprot ID: Q9UI09
  ENSP ID: ENSP00000450130
MELVQVLKRGLQQITGHGGLRGYLRVFFRTNDAKVGTLVGEDKYGNKYYEDNKQFFGIVGFTV

SEQ ID NO: 55023 - protein, 144 aa, Homo sapiens
  Payload ID: 10864
  Gene Symbol: NDUFA13
  Gene Name: NADH dehydrogenase (ubiquinone) 1 alpha subcomplex, 13
  Uniprot ID: Q9P0J0
  ENSP ID: ENSP00000423673
MAASKVKQDMPPPGGYGPIDYKRNLPRRGLSGYSMLAIGIGTLIYGHWSIMKWNRERRRLQIEDFEARIALLPLLQAETDRRTLQMLRENLEEEAIIMKDVPDWKVGESVFHTTRWVPPLIGELYGLRTTEEALHASHGFMWYT

SEQ ID NO: 55024 - protein, 150 aa, Homo sapiens
  Payload ID: 10864
  Gene Symbol: NDUFA13
  Gene Name: NADH dehydrogenase (ubiquinone) 1 alpha subcomplex, 13
  ENSP ID: ENSP00000465129
MAASKVKQDMPPPGGYGPIDYKRNLPRRGLSGYSMLAIGIGTLIYGHWSIMKWNRERRRLQIEDFEARIALLPLLQAETDRRTLQMLRENLEEEAIIMKDVPDWKVGPGWEGRGASHGRDRAWGWGAPTAFYRNPRTKGVVGARSHKGRL

SEQ ID NO: 55025 - protein, 107 aa, Homo sapiens
  Payload ID: 10864
  Gene Symbol: NDUFA13
  Gene Name: NADH dehydrogenase (ubiquinone) 1 alpha subcomplex, 13
  ENSP ID: ENSP00000467274
MAASKVKQDMPPPGGYGPIDYKRNLPRRGLSENPWHGGRGVTVQAASLLRSRQCPLIAEWAAPGAVEEGVWGRAGPLSSASLHRLQHAGHRDWNPDLRALEHNEVEP

SEQ ID NO: 55026 - protein, 120 aa, Homo sapiens
  Payload ID: 10864
  Gene Symbol: NDUFA13
  Gene Name: NADH dehydrogenase (ubiquinone) 1 alpha subcomplex, 13
  ENSP ID: ENSP00000468317
MAASKVKQDMPPPGGYGPIDYKRNLPRRGLSGYSMLAIGIGTLIYGHWSIMKWNRERRRLQIEDFEARIALLPLLQAETDRRTLQMLRENLEEEAIIMKDVPDWKDYRREPPYLVQPCQL

SEQ ID NO: 55027 - protein, 75 aa, Homo sapiens
  Payload ID: 10864
  Gene Symbol: NDUFA13
  Gene Name: NADH dehydrogenase (ubiquinone) 1 alpha subcomplex, 13
  ENSP ID: ENSP00000476093
  MOD_RES (1)..(1): Any amino acid
XDMPPPGGYGPIDYKRNLPRRGLSGYSMLAIGIGTLIYGHWSIMKWNRERRRLQIEDFEARIALLPLLQAETDRR

SEQ ID NO: 55028 - protein, 99 aa, Homo sapiens
  Payload ID: 10865
  Gene Symbol: NDUFA2
  Gene Name: NADH dehydrogenase (ubiquinone) 1 alpha subcomplex, 2, 8kDa
  Uniprot ID: O43678
  ENSP ID: ENSP00000252102
MAAAAASRGVGAKLGLREIRIHLCQRSPGSQGVRDFIEKRYVELKKANPDLPILIRECSDVQPKLWARYAFGQETNVPLNNFSADQVTRALENVLSGKA

SEQ ID NO: 55029 - protein, 76 aa, Homo sapiens
  Payload ID: 10865
  Gene Symbol: NDUFA2
  Gene Name: NADH dehydrogenase (ubiquinone) 1 alpha subcomplex, 2, 8kDa
  Uniprot ID: O43678
  ENSP ID: ENSP00000427220
MAAAAASRGVGAKLGLREIRIHLCQRSPGSQGVRDFIEKRYVELKKANPDLPILIRECSDVQPKLWARYASRVQNS

SEQ ID NO: 55030 - protein, 72 aa, Homo sapiens
  Payload ID: 10866
  Gene Symbol: NDUFA3
  Gene Name: NADH dehydrogenase (ubiquinone) 1 alpha subcomplex, 3, 9kDa
  ENSP ID: ENSP00000375642
MAARVGAFLKNAWDKEPVLVVSFVVGGLAVILPPLSPYFKYSVMINKATPYNYPVEAGFHRVSQDCLDLLTL

SEQ ID NO: 55031 - protein, 61 aa, Homo sapiens
  Payload ID: 10866
  Gene Symbol: NDUFA3
  Gene Name: NADH dehydrogenase (ubiquinone) 1 alpha subcomplex, 3, 9kDa
  ENSP ID: ENSP00000375643
MAASKCRSRRLPQECLGQGASAGRVLRRRGPRCNSAPIEPLLQVLRHDQQGHALQLPSARP

SEQ ID NO: 55032 - protein, 81 aa, Homo sapiens
  Payload ID: 10866
  Gene Symbol: NDUFA3
  Gene Name: NADH dehydrogenase (ubiquinone) 1 alpha subcomplex, 3, 9kDa
  ENSP ID: ENSP00000375644
MAARVGAFLKNAWDKEPVLVVSFVVGGLAVILPPLSPYFKYSVMINKATPYNYPAAGEKGHRIELSSHSTQRQSCPGARRS

SEQ ID NO: 55033 - protein, 34 aa, Homo sapiens
  Payload ID: 10866
  Gene Symbol: NDUFA3
  Gene Name: NADH dehydrogenase (ubiquinone) 1 alpha subcomplex, 3, 9kDa
  ENSP ID: ENSP00000394383
  MOD_RES (1)..(1): Any amino acid
XKYSVMINKATPYNYPVEAGFHRVSQDCLDLLTL

SEQ ID NO: 55034 - protein, 84 aa, Homo sapiens
  Payload ID: 10866
  Gene Symbol: NDUFA3
  Gene Name: NADH dehydrogenase (ubiquinone) 1 alpha subcomplex, 3, 9kDa
  Uniprot ID: O95167
  ENSP ID: ENSP00000398290
MAARVGAFLKNAWDKEPVLVVSFVVGGLAVILPPLSPYFKYSVMINKATPYNYPVPVRDDGNMPDVPSHPQDPQGPSLEWLKKL

SEQ ID NO: 55035 - protein, 69 aa, Homo sapiens
  Payload ID: 10866
  Gene Symbol: NDUFA3
  Gene Name: NADH dehydrogenase (ubiquinone) 1 alpha subcomplex, 3, 9kDa
  ENSP ID: ENSP00000407335
  MOD_RES (1)..(1): Any amino acid
XVGAFLKNAWDKEPVLVVSFVVGGLAVILPPLSPYFKYSVMINKATPYNYPVEAGFHRVSQDCLDLLTL

SEQ ID NO: 55036 - protein, 65 aa, Homo sapiens
  Payload ID: 10866
  Gene Symbol: NDUFA3
  Gene Name: NADH dehydrogenase (ubiquinone) 1 alpha subcomplex, 3, 9kDa
  ENSP ID: ENSP00000410453
MAARVGAFLKNAWDKEPVLVVSFVVGGLEQSHDTTPRMLHDDPTLKRAHSMTNPTAASSRPHVSL

SEQ ID NO: 55037 - protein, 65 aa, Homo sapiens; identical to SEQ ID NO: 55036
  Payload ID: 10866
  Gene Symbol: NDUFA3
  Gene Name: NADH dehydrogenase (ubiquinone) 1 alpha subcomplex, 3, 9kDa
  ENSP ID: ENSP00000412325

SEQ ID NO: 55038 - protein, 84 aa, Homo sapiens; identical to SEQ ID NO: 55034
  Payload ID: 10866
  Gene Symbol: NDUFA3
  Gene Name: NADH dehydrogenase (ubiquinone) 1 alpha subcomplex, 3, 9kDa
  Uniprot ID: O95167
  ENSP ID: ENSP00000418438

SEQ ID NO: 55039 - protein, 41 aa, Homo sapiens
  Payload ID: 10866
  Gene Symbol: NDUFA3
  Gene Name: NADH dehydrogenase (ubiquinone) 1 alpha subcomplex, 3, 9kDa
  ENSP ID: ENSP00000474408
MINKATPYNYPVPVRDDGNMPDVPSHPQDPQGPSLEWLKKL

SEQ ID NO: 55040 - protein, 73 aa, Homo sapiens
  Payload ID: 10866
  Gene Symbol: NDUFA3
  Gene Name: NADH dehydrogenase (ubiquinone) 1 alpha subcomplex, 3, 9kDa
  ENSP ID: ENSP00000474705
MAARVGAFLKNAWDKEPVLVVSFVVGGLAVILPPLSPYFKYSVMINKATPYNYPGEWGPGRDPRNRPSLPVLA

SEQ ID NO: 55041 - protein, 72 aa, Homo sapiens; identical to SEQ ID NO: 55030
  Payload ID: 10866
  Gene Symbol: NDUFA3
  Gene Name: NADH dehydrogenase (ubiquinone) 1 alpha subcomplex, 3, 9kDa
  ENSP ID: ENSP00000477571

SEQ ID NO: 55042 - protein, 84 aa, Homo sapiens; identical to SEQ ID NO: 55034
  Payload ID: 10866
  Gene Symbol: NDUFA3
  Gene Name: NADH dehydrogenase (ubiquinone) 1 alpha subcomplex, 3, 9kDa
  Uniprot ID: O95167
  ENSP ID: ENSP00000477783

SEQ ID NO: 55043 - protein, 34 aa, Homo sapiens; identical to SEQ ID NO: 55033
  Payload ID: 10866
  Gene Symbol: NDUFA3
  Gene Name: NADH dehydrogenase (ubiquinone) 1 alpha subcomplex, 3, 9kDa
  ENSP ID: ENSP00000479136
  MOD_RES (1)..(1): Any amino acid

SEQ ID NO: 55044 - protein, 73 aa, Homo sapiens; identical to SEQ ID NO: 55040
  Payload ID: 10866
  Gene Symbol: NDUFA3
  Gene Name: NADH dehydrogenase (ubiquinone) 1 alpha subcomplex, 3, 9kDa
  ENSP ID: ENSP00000480972

SEQ ID NO: 55045 - protein, 81 aa, Homo sapiens; identical to SEQ ID NO: 55032
  Payload ID: 10866
  Gene Symbol: NDUFA3
  Gene Name: NADH dehydrogenase (ubiquinone) 1 alpha subcomplex, 3, 9kDa
  ENSP ID: ENSP00000481312

SEQ ID NO: 55046 - protein, 69 aa, Homo sapiens; identical to SEQ ID NO: 55035
  Payload ID: 10866
  Gene Symbol: NDUFA3
  Gene Name: NADH dehydrogenase (ubiquinone) 1 alpha subcomplex, 3, 9kDa
  ENSP ID: ENSP00000481667
  MOD_RES (1)..(1): Any amino acid

SEQ ID NO: 55047 - protein, 65 aa, Homo sapiens; identical to SEQ ID NO: 55036
  Payload ID: 10866
  Gene Symbol: NDUFA3
  Gene Name: NADH dehydrogenase (ubiquinone) 1 alpha subcomplex, 3, 9kDa
  ENSP ID: ENSP00000481990

SEQ ID NO: 55048 - protein, 65 aa, Homo sapiens; identical to SEQ ID NO: 55036
  Payload ID: 10866
  Gene Symbol: NDUFA3
  Gene Name: NADH dehydrogenase (ubiquinone) 1 alpha subcomplex, 3, 9kDa
  ENSP ID: ENSP00000482592

SEQ ID NO: 55049 - protein, 41 aa, Homo sapiens; identical to SEQ ID NO: 55039
  Payload ID: 10866
  Gene Symbol: NDUFA3
  Gene Name: NADH dehydrogenase (ubiquinone) 1 alpha subcomplex, 3, 9kDa
  ENSP ID: ENSP00000483123

SEQ ID NO: 55050 - protein, 84 aa, Homo sapiens; identical to SEQ ID NO: 55034
  Payload ID: 10866
  Gene Symbol: NDUFA3
  Gene Name: NADH dehydrogenase (ubiquinone) 1 alpha subcomplex, 3, 9kDa
  Uniprot ID: O95167
  ENSP ID: ENSP00000483683

SEQ ID NO: 55051 - protein, 61 aa, Homo sapiens; identical to SEQ ID NO: 55031
  Payload ID: 10866
  Gene Symbol: NDUFA3
  Gene Name: NADH dehydrogenase (ubiquinone) 1 alpha subcomplex, 3, 9kDa
  ENSP ID: ENSP00000484034

SEQ ID NO: 55052 - protein, 84 aa, Homo sapiens; identical to SEQ ID NO: 55034
  Payload ID: 10867
  Gene Symbol:
  Gene Name: NADH dehydrogenase (ubiquinone) 1 alpha subcomplex, 3, 9kDa [Source:EntrezGene
  Acc:4696]
  ENSP ID: ENSP00000477919

SEQ ID NO: 55053 - protein, 84 aa, Homo sapiens; identical to SEQ ID NO: 55034
  Payload ID: 10867
  Gene Symbol:
  Gene Name: NADH dehydrogenase (ubiquinone) 1 alpha subcomplex, 3, 9kDa [Source:EntrezGene
  Acc:4696]
  ENSP ID: ENSP00000478119

SEQ ID NO: 55054 - protein, 84 aa, Homo sapiens; identical to SEQ ID NO: 55034
  Payload ID: 10867
  Gene Symbol:
  Gene Name: NADH dehydrogenase (ubiquinone) 1 alpha subcomplex, 3, 9kDa [Source:EntrezGene
  Acc:4696]
  ENSP ID: ENSP00000480437

SEQ ID NO: 55055 - protein, 84 aa, Homo sapiens; identical to SEQ ID NO: 55034
  Payload ID: 10867
  Gene Symbol:
  Gene Name: NADH dehydrogenase (ubiquinone) 1 alpha subcomplex, 3, 9kDa [Source:EntrezGene
  Acc:4696]
  Uniprot ID: O95167
  ENSP ID: ENSP00000481545

SEQ ID NO: 55056 - protein, 84 aa, Homo sapiens; identical to SEQ ID NO: 55034
  Payload ID: 10867
  Gene Symbol:
  Gene Name: NADH dehydrogenase (ubiquinone) 1 alpha subcomplex, 3, 9kDa [Source:EntrezGene
  Acc:4696]
  ENSP ID: ENSP00000482015

SEQ ID NO: 55057 - protein, 84 aa, Homo sapiens; identical to SEQ ID NO: 55034
  Payload ID: 10867
  Gene Symbol:
  Gene Name: NADH dehydrogenase (ubiquinone) 1 alpha subcomplex, 3, 9kDa [Source:EntrezGene
  Acc:4696]
  ENSP ID: ENSP00000483002

SEQ ID NO: 55058 - protein, 84 aa, Homo sapiens; identical to SEQ ID NO: 55034
  Payload ID: 10867
  Gene Symbol:
  Gene Name: NADH dehydrogenase (ubiquinone) 1 alpha subcomplex, 3, 9kDa [Source:EntrezGene
  Acc:4696]
  ENSP ID: ENSP00000483934

SEQ ID NO: 55059 - protein, 84 aa, Homo sapiens; identical to SEQ ID NO: 55034
  Payload ID: 10867
  Gene Symbol:
  Gene Name: NADH dehydrogenase (ubiquinone) 1 alpha subcomplex, 3, 9kDa [Source:EntrezGene
  Acc:4696]
  ENSP ID: ENSP00000484436

SEQ ID NO: 55060 - protein, 87 aa, Homo sapiens
  Payload ID: 10868
  Gene Symbol: NDUFA4L2
  Gene Name: NADH dehydrogenase (ubiquinone) 1 alpha subcomplex, 4-like 2
  Uniprot ID: Q9NRX3
  ENSP ID: ENSP00000377411
MAGASLGARFYRQIKRHPGIIPMIGLICLGMGSAALYLLRLALRSPDVCWDRKNNPEPWNRLSPNDQYKFLAVSTDYKKLKKDRPDF

SEQ ID NO: 55061 - protein, 87 aa, Homo sapiens; identical to SEQ ID NO: 55060
  Payload ID: 10868
  Gene Symbol: NDUFA4L2
  Gene Name: NADH dehydrogenase (ubiquinone) 1 alpha subcomplex, 4-like 2
  Uniprot ID: Q9NRX3
  ENSP ID: ENSP00000450664

SEQ ID NO: 55062 - protein, 93 aa, Homo sapiens
  Payload ID: 10868
  Gene Symbol: NDUFA4L2
  Gene Name: NADH dehydrogenase (ubiquinone) 1 alpha subcomplex, 4-like 2
  ENSP ID: ENSP00000452193
MAGASLGARFYRQIKRHPGIIPMIGLICLGMGSAALYLLRLALRSPDVCWDRKNNPEPWNRLSPNDQYKVPLDGSRVAPHPLISWSWHPQLPY

SEQ ID NO: 55063 - protein, 116 aa, Homo sapiens
  Payload ID: 10869
  Gene Symbol: NDUFA5
  Gene Name: NADH dehydrogenase (ubiquinone) 1 alpha subcomplex, 5
  Uniprot ID: Q16718
  ENSP ID: ENSP00000347988
MAGVLKKTTGLVGLAVCNTPHERLRILYTKILDVLEEIPKNAAYRKYTEQITNEKLAMVKAEPDVKKLEDQLQGGQLEEVILQAEHELNLARKMREWKLWEPLVEEPPADQWKWPI

SEQ ID NO: 55064 - protein, 112 aa, Homo sapiens
  Payload ID: 10869
  Gene Symbol: NDUFA5
  Gene Name: NADH dehydrogenase (ubiquinone) 1 alpha subcomplex, 5
  ENSP ID: ENSP00000368072
  MOD_RES (1)..(1): Any amino acid
XEQTTGLVGLAVCNTPHERLRILYTKILDVLEEIPKNAAYRKYTEQITNEKLAMVKAEPDVKKLEDQLQGGQLEEVILQAEHELNLARKMREWKLWEPLVEEPPADQWKWPI

SEQ ID NO: 55065 - protein, 116 aa, Homo sapiens
  Payload ID: 10869
  Gene Symbol: NDUFA5
  Gene Name: NADH dehydrogenase (ubiquinone) 1 alpha subcomplex, 5
  Uniprot ID: Q16718
  ENSP ID: ENSP00000417142
MPYRVGQTTGLVGLAVCNTPHERLRILYTKILDVLEEIPKNAAYRKYTEQITNEKLAMVKAEPDVKKLEDQLQGGQLEEVILQAEHELNLARKMREWKLWEPLVEEPPADQWKWPI

SEQ ID NO: 55066 - protein, 70 aa, Homo sapiens
  Payload ID: 10869
  Gene Symbol: NDUFA5
  Gene Name: NADH dehydrogenase (ubiquinone) 1 alpha subcomplex, 5
  ENSP ID: ENSP00000417331
MAGVLKKTTGLVGLAVCNTPHERLRILYTKILDVLEEIPKNAAYRKYTEQITNEKLAMVKAPIIMQIISS

SEQ ID NO: 55067 - protein, 93 aa, Homo sapiens
  Payload ID: 10869
  Gene Symbol: NDUFA5
  Gene Name: NADH dehydrogenase (ubiquinone) 1 alpha subcomplex, 5
  ENSP ID: ENSP00000418633
MYGNRSKQHESCFVFEQTTGLVGLAVCNTPHERLRILYTKILDVLEEIPKNAAYRKYTEQITNEKLAMVKAEPDVKKLEDQLQGGQLEEVILQ

SEQ ID NO: 55068 - protein, 77 aa, Homo sapiens
  Payload ID: 10869
  Gene Symbol: NDUFA5
  Gene Name: NADH dehydrogenase (ubiquinone) 1 alpha subcomplex, 5
  ENSP ID: ENSP00000481232
MAGVLKKTTGLVGLAVCNTPHEEPDVKKLEDQLQGGQLEEVILQAEHELNLARKMREWKLWEPLVEEPPADQWKWPI

SEQ ID NO: 55069 - protein, 101 aa, Homo sapiens
  Payload ID: 10869
  Gene Symbol: NDUFA5
  Gene Name: NADH dehydrogenase (ubiquinone) 1 alpha subcomplex, 5
  ENSP ID: ENSP00000484180
MAGVLKKRLRILYTKILDVLEEIPKNAAYRKYTEQITNEKLAMVKAEPDVKKLEDQLQGGQLEEVILQAEHELNLARKMREWKLWEPLVEEPPADQWKWPI

SEQ ID NO: 55070 - protein, 154 aa, Homo sapiens
  Payload ID: 10870
  Gene Symbol: NDUFA6
  Gene Name: NADH dehydrogenase (ubiquinone) 1 alpha subcomplex, 6, 14kDa
  Uniprot ID: P56556
  ENSP ID: ENSP00000418842
MGKDIRPRSARAACKGVGLWSGCFGKMAGSGVRQATSTASTFVKPIFSRDMNEAKRRVRELYRAWYREVPNTVHQFQLDITVKMGRDKVREMFMKNAHVTDPRVVDLLVIKGKIELEETIKVWKQRTHVMRFFHETEAPRPKDFLSKFYVGHDP

SEQ ID NO: 55071 - protein, 128 aa, Homo sapiens
  Payload ID: 10870
  Gene Symbol: NDUFA6
  Gene Name: NADH dehydrogenase (ubiquinone) 1 alpha subcomplex, 6, 14kDa
  ENSP ID: ENSP00000473461
MAGSGVRQATSTASTFVKPIFSRDMNEAKRRVRELYRAWYREVPNTVHQFQLDITVKMGRDKVREMFMKNAHVTDPRVVDLLVIKGKIELEETIKVWKQRTHVMRFFHETEAPRPKDFLSKFYVGHDP

SEQ ID NO: 55072 - protein, 71 aa, Homo sapiens
  Payload ID: 10870
  Gene Symbol: NDUFA6
  Gene Name: NADH dehydrogenase (ubiquinone) 1 alpha subcomplex, 6, 14kDa
  ENSP ID: ENSP00000473478
MGRDKVREMFMKNAHVTDPRVVDLLVIKGKIELEETIKVWKQRTHVMRFFHETEAPRPKDFLSKFYVGHDP

SEQ ID NO: 55073 - protein, 154 aa, Homo sapiens; identical to SEQ ID NO: 55070
  Payload ID: 10870
  Gene Symbol: NDUFA6
  Gene Name: NADH dehydrogenase (ubiquinone) 1 alpha subcomplex, 6, 14kDa
  Uniprot ID: P56556
  ENSP ID: ENSP00000475402

SEQ ID NO: 55074 - protein, 154 aa, Homo sapiens; identical to SEQ ID NO: 55070
  Payload ID: 10870
  Gene Symbol: NDUFA6
  Gene Name: NADH dehydrogenase (ubiquinone) 1 alpha subcomplex, 6, 14kDa
  Uniprot ID: P56556
  ENSP ID: ENSP00000475816

SEQ ID NO: 55075 - protein, 154 aa, Homo sapiens; identical to SEQ ID NO: 55070
  Payload ID: 10870
  Gene Symbol: NDUFA6
  Gene Name: NADH dehydrogenase (ubiquinone) 1 alpha subcomplex, 6, 14kDa
  Uniprot ID: P56556
  ENSP ID: ENSP00000482543

SEQ ID NO: 55076 - protein, 154 aa, Homo sapiens; identical to SEQ ID NO: 55070
  Payload ID: 10870
  Gene Symbol: NDUFA6
  Gene Name: NADH dehydrogenase (ubiquinone) 1 alpha subcomplex, 6, 14kDa
  Uniprot ID: P56556
  ENSP ID: ENSP00000484723

SEQ ID NO: 55077 - protein, 71 aa, Homo sapiens; identical to SEQ ID NO: 55072
  Payload ID: 10870
  Gene Symbol: NDUFA6
  Gene Name: NADH dehydrogenase (ubiquinone) 1 alpha subcomplex, 6, 14kDa
  ENSP ID: ENSP00000485080

SEQ ID NO: 55078 - protein, 154 aa, Homo sapiens; identical to SEQ ID NO: 55070
  Payload ID: 10870
  Gene Symbol: NDUFA6
  Gene Name: NADH dehydrogenase (ubiquinone) 1 alpha subcomplex, 6, 14kDa
  Uniprot ID: P56556
  ENSP ID: ENSP00000485713

SEQ ID NO: 55079 - protein, 71 aa, Homo sapiens; identical to SEQ ID NO: 55072
  Payload ID: 10870
  Gene Symbol: NDUFA6
  Gene Name: NADH dehydrogenase (ubiquinone) 1 alpha subcomplex, 6, 14kDa
  ENSP ID: ENSP00000485795

SEQ ID NO: 55080 - protein, 71 aa, Homo sapiens; identical to SEQ ID NO: 55072
  Payload ID: 10870
  Gene Symbol: NDUFA6
  Gene Name: NADH dehydrogenase (ubiquinone) 1 alpha subcomplex, 6, 14kDa
  ENSP ID: ENSP00000485886

SEQ ID NO: 55081 - protein, 71 aa, Homo sapiens; identical to SEQ ID NO: 55072
  Payload ID: 10870
  Gene Symbol: NDUFA6
  Gene Name: NADH dehydrogenase (ubiquinone) 1 alpha subcomplex, 6, 14kDa
  ENSP ID: ENSP00000486423

SEQ ID NO: 55082 - protein, 128 aa, Homo sapiens; identical to SEQ ID NO: 55071
  Payload ID: 10870
  Gene Symbol: NDUFA6
  Gene Name: NADH dehydrogenase (ubiquinone) 1 alpha subcomplex, 6, 14kDa
  ENSP ID: ENSP00000486643

SEQ ID NO: 55083 - protein, 128 aa, Homo sapiens; identical to SEQ ID NO: 55071
  Payload ID: 10870
  Gene Symbol: NDUFA6
  Gene Name: NADH dehydrogenase (ubiquinone) 1 alpha subcomplex, 6, 14kDa
  ENSP ID: ENSP00000486781

SEQ ID NO: 55084 - protein, 154 aa, Homo sapiens; identical to SEQ ID NO: 55070
  Payload ID: 10870
  Gene Symbol: NDUFA6
  Gene Name: NADH dehydrogenase (ubiquinone) 1 alpha subcomplex, 6, 14kDa
  Uniprot ID: P56556
  ENSP ID: ENSP00000487431

SEQ ID NO: 55085 - protein, 128 aa, Homo sapiens; identical to SEQ ID NO: 55071
  Payload ID: 10870
  Gene Symbol: NDUFA6
  Gene Name: NADH dehydrogenase (ubiquinone) 1 alpha subcomplex, 6, 14kDa
  ENSP ID: ENSP00000487462

SEQ ID NO: 55086 - protein, 113 aa, Homo sapiens
  Payload ID: 10871
  Gene Symbol: NDUFA7
  Gene Name: NADH dehydrogenase (ubiquinone) 1 alpha subcomplex, 7, 14.5kDa
  Uniprot ID: O95182
  ENSP ID: ENSP00000301457
MASATRLIQRLRNWASGHDLQGKLQLRYQEISKRTQPPPKLPVGPSHKLSNNYYCTRDGRRESVPPSIIMSSQKALVSGKPAESSAVAATEKKAVTPAPPIKRWELSSDQPYL

SEQ ID NO: 55087 - protein, 113 aa, Homo sapiens; identical to SEQ ID NO: 55086
  Payload ID: 10871
  Gene Symbol: NDUFA7
  Gene Name: NADH dehydrogenase (ubiquinone) 1 alpha subcomplex, 7, 14.5kDa
  Uniprot ID: O95182
  ENSP ID: ENSP00000470962

SEQ ID NO: 55088 - protein, 63 aa, Homo sapiens
  Payload ID: 10871
  Gene Symbol: NDUFA7
  Gene Name: NADH dehydrogenase (ubiquinone) 1 alpha subcomplex, 7, 14.5kDa
  ENSP ID: ENSP00000471333
MASATRLIQRLRNWASGHDLQGKLQLRYQEISKRSAVAATEKKAVTPAPPIKRWELSSDQPYL

SEQ ID NO: 55089 - protein, 76 aa, Homo sapiens
  Payload ID: 10871
  Gene Symbol: NDUFA7
  Gene Name: NADH dehydrogenase (ubiquinone) 1 alpha subcomplex, 7, 14.5kDa
  ENSP ID: ENSP00000471943
MASATRLIQRLRNWASGHDLQGKLQLRYQEISKRRNGVSPCWPVWSRTPDFIIRLPRPPKVLGLQNSASSQAPCGS

SEQ ID NO: 55090 - protein, 172 aa, Homo sapiens
  Payload ID: 10872
  Gene Symbol: NDUFA8
  Gene Name: NADH dehydrogenase (ubiquinone) 1 alpha subcomplex, 8, 19kDa
  Uniprot ID: P51970
  ENSP ID: ENSP00000362873
MPGIVELPTLEELKVDEVKISSAVLKAAAHHYGAQCDKPNKEFMLCRWEEKDPRRCLEEGKLVNKCALDFFRQIKRHCAEPFTEYWTCIDYTGQQLFRHCRKQQAKFDECVLDKLGWVRPDLGELSKVTKVKTDRPLPENPYHSRPRPDPSPEIEGDLQPATHGSRFYFWTK

SEQ ID NO: 55091 - protein, 377 aa, Homo sapiens
  Payload ID: 10873
  Gene Symbol: NDUFA9
  Gene Name: NADH dehydrogenase (ubiquinone) 1 alpha subcomplex, 9, 39kDa
  Uniprot ID: Q16795
  ENSP ID: ENSP00000266544
MAAAAQSRVVRVLSMSRSAITAIATSVCHGPPCRQLHHALMPHGKGGRSSVSGIVATVFGATGFLGRYVVNHLGRMGSQVIIPYRCDKYDIMHLRPMGDLGQLLFLEWDARDKDSIRRVVQHSNVVINLIGRDWETKNFDFEDVFVKIPQAIAQLSKEAGVEKFIHVSHLNANIKSSSRYLRNKAVGEKVVRDAFPEAIIVKPSDIFGREDRFLNSFASMHRFGPIPLGSLGWKTVKQPVYVVDVSKGIVNAVKDPDANGKSFAFVGPSRYLLFHLVKYIFAVAHRLFLPFPLPLFAYRWVARVFEISPFEPWITRDKVERMHITDMKLPHLPGLEDLGIQATPLELKAIEVLRRHRTYRWLSAEIEDVKPAKTVNI

SEQ ID NO: 55092 - protein, 136 aa, Homo sapiens
  Payload ID: 10873
  Gene Symbol: NDUFA9
  Gene Name: NADH dehydrogenase (ubiquinone) 1 alpha subcomplex, 9, 39kDa
  ENSP ID: ENSP00000439818
MDQKAEVASQVEVVIFLKKKNQFRLLYSGLSSCSSHRLAYILGREMLITCAICISLSRWVARVFEISPFEPWITRDKVERMHITDMKLPHLPGLEDLGIQATPLELKAIEVLRRHRTYRWLSAEIEDVKPAKTVNI

SEQ ID NO: 55093 - protein, 149 aa, Homo sapiens
  Payload ID: 10873
  Gene Symbol: NDUFA9
  Gene Name: NADH dehydrogenase (ubiquinone) 1 alpha subcomplex, 9, 39kDa
  ENSP ID: ENSP00000440305
MVECLTSLLLLNFLKVRISFLKHFTPFIIICDVLQWFYSSAITAIATSVCHGPPCRQLHHALMPHGKGGRSSVSGIVATVFGATGFLGRYVVNHLGRMGSQVIIPYRCDKYDIMHLRPMGDLGQLLFLEWDARDKDSIRRVVQHSNVVI

SEQ ID NO: 55094 - protein, 105 aa, Homo sapiens
  Payload ID: 10874
  Gene Symbol: NDUFB1
  Gene Name: NADH dehydrogenase (ubiquinone) 1 beta subcomplex, 1, 7kDa
  Uniprot ID: O75438
  ENSP ID: ENSP00000330787
MICWRHPSAPCGRGEWQVPRSQLPLARVEFPVALGLGVAVGAEAAAIMVNLLQIVRDHWVHVLVPMGFVIGCYLDRKSDERLTAFRNKSMLFKRELQPSEEVTWK

SEQ ID NO: 55095 - protein, 58 aa, Homo sapiens
  Payload ID: 10874
  Gene Symbol: NDUFB1
  Gene Name: NADH dehydrogenase (ubiquinone) 1 beta subcomplex, 1, 7kDa
  Uniprot ID: O75438
  ENSP ID: ENSP00000450776
MVNLLQIVRDHWVHVLVPMGFVIGCYLDRKSDERLTAFRNKSMLFKRELQPSEEVTWK

SEQ ID NO: 55096 - protein, 58 aa, Homo sapiens; identical to SEQ ID NO: 55095
  Payload ID: 10874
  Gene Symbol: NDUFB1
  Gene Name: NADH dehydrogenase (ubiquinone) 1 beta subcomplex, 1, 7kDa
  Uniprot ID: O75438
  ENSP ID: ENSP00000451090

SEQ ID NO: 55097 - protein, 58 aa, Homo sapiens; identical to SEQ ID NO: 55095
  Payload ID: 10874
  Gene Symbol: NDUFB1
  Gene Name: NADH dehydrogenase (ubiquinone) 1 beta subcomplex, 1, 7kDa
  Uniprot ID: O75438
  ENSP ID: ENSP00000475170

SEQ ID NO: 55098 - protein, 105 aa, Homo sapiens; identical to SEQ ID NO: 55094
  Payload ID: 10874
  Gene Symbol: NDUFB1
  Gene Name: NADH dehydrogenase (ubiquinone) 1 beta subcomplex, 1, 7kDa
  Uniprot ID: O75438
  ENSP ID: ENSP00000483888

SEQ ID NO: 55099 - protein, 172 aa, Homo sapiens
  Payload ID: 10875
  Gene Symbol: NDUFB10
  Gene Name: NADH dehydrogenase (ubiquinone) 1 beta subcomplex, 10, 22kDa
  Uniprot ID: O96000
  ENSP ID: ENSP00000268668
MPDSWDKDVYPEPPRRTPVQPNPIVYMMKAFDLIVDRPVTLVREFIERQHAKNRYYYYHRQYRRVPDITECKEEDIMCMYEAEMQWKRDYKVDQEIINIMQDRLKACQQREGQNYQQNCIKEVEQFTQVAKAYQDRYQDLGAYSSARKCLAKQRQRMLQERKAAKEAAAATS

SEQ ID NO: 55100 - protein, 168 aa, Homo sapiens
  Payload ID: 10875
  Gene Symbol: NDUFB10
  Gene Name: NADH dehydrogenase (ubiquinone) 1 beta subcomplex, 10, 22kDa
  Uniprot ID: O96000
  ENSP ID: ENSP00000445086
MPDSWDKDVYPEPPRRTPVQPNPIVYMMKAFDLIVDRPVTLVREFIERQHAKNRYYYYHRQYRRVPDITECKEEDIMCMYEAEMQWKRDYKVDQEIINIMQDRLKACQQREGQNYQQNCIKEVEQFTQVAKAYQDRCACPTHPQPPTILLRPGGQNHCKSSLPSLVLT

SEQ ID NO: 55101 - protein, 161 aa, Homo sapiens
  Payload ID: 10875
  Gene Symbol: NDUFB10
  Gene Name: NADH dehydrogenase (ubiquinone) 1 beta subcomplex, 10, 22kDa
  ENSP ID: ENSP00000455348
MPDSWDKDVYPEPPRRTPVQPNPIVYMMKAFDLIVDRPVTLVREFIERQHAKNRYYYYHRQYRRVPDITECKEEDIMCIKVDQEIINIMQDRLKACQQREGQNYQQNCIKEVEQFTQVAKAYQDRYQDLGAYSSARKCLAKQRQRMLQERKAAKEAAAATS

SEQ ID NO: 55102 - protein, 142 aa, Homo sapiens
  Payload ID: 10875
  Gene Symbol: NDUFB10
  Gene Name: NADH dehydrogenase (ubiquinone) 1 beta subcomplex, 10, 22kDa
  ENSP ID: ENSP00000457908
MPDSWDKDVYPEPPRRTPVQPNPIVYMMKAFDLIVDRPVTLVREFIERQHAKNRYYYYHRQYRRVPDITECKEEDIMCMYEAEMQWKRDYKVDQEIINIMQDRLKACQQREGQNYQQNCIKEVEQFTQIRTWGPTVLPGSAW

SEQ ID NO: 55103 - protein, 163 aa, Homo sapiens
  Payload ID: 10876
  Gene Symbol: NDUFB11
  Gene Name: NADH dehydrogenase (ubiquinone) 1 beta subcomplex, 11, 17.3kDa
  Uniprot ID: Q9NX14
  ENSP ID: ENSP00000276062
MAAGLFGLSARRLLAAAATRGLPAARVRWESSFSRTVVAPSAVAGKRPPEPTTPWQEDPEPEDENLYEKNPDSHGYDKDPVLDVWNMRLVFFFGVSIILVLGSTFVAYLPDYRCTGCPRAWDGMKEWSRREAERLVKYREANGLPIMESNCFDPSKIQLPEDE

SEQ ID NO: 55104 - protein, 153 aa, Homo sapiens
  Payload ID: 10876
  Gene Symbol: NDUFB11
  Gene Name: NADH dehydrogenase (ubiquinone) 1 beta subcomplex, 11, 17.3kDa
  Uniprot ID: Q9NX14
  ENSP ID: ENSP00000367042
MAAGLFGLSARRLLAAAATRGLPAARVRWESSFSRTVVAPSAVAGKRPPEPTTPWQEDPEPEDENLYEKNPDSHGYDKDPVLDVWNMRLVFFFGVSIILVLGSTFVAYLPDYRMKEWSRREAERLVKYREANGLPIMESNCFDPSKIQLPEDE

SEQ ID NO: 55105 - protein, 105 aa, Homo sapiens
  Payload ID: 10877
  Gene Symbol: NDUFB2
  Gene Name: NADH dehydrogenase (ubiquinone) 1 beta subcomplex, 2, 8kDa
  Uniprot ID: O95178
  ENSP ID: ENSP00000247866
MSALTRLASFARVGGRLFRSGCARTAGDGGVRHAGGGVHIEPRYRQFPQLTRSQVFQSEFFSGLMWFWILWRFWHDSEEVLGHFPYPDPSQWTDEELGIPPDDED

SEQ ID NO: 55106 - protein, 34 aa, Homo sapiens
  Payload ID: 10877
  Gene Symbol: NDUFB2
  Gene Name: NADH dehydrogenase (ubiquinone) 1 beta subcomplex, 2, 8kDa
  ENSP ID: ENSP00000418347
MSALTRLASFARVGGRLFRSGCARTAGDGGVRQN

SEQ ID NO: 55107 - protein, 41 aa, Homo sapiens
  Payload ID: 10877
  Gene Symbol: NDUFB2
  Gene Name: NADH dehydrogenase (ubiquinone) 1 beta subcomplex, 2, 8kDa
  ENSP ID: ENSP00000418573
MWFWILWRFWHDSEEVLGHFPYPDPSQWTDEELGIPPDDED

SEQ ID NO: 55108 - protein, 41 aa, Homo sapiens; identical to SEQ ID NO: 55107
  Payload ID: 10877
  Gene Symbol: NDUFB2
  Gene Name: NADH dehydrogenase (ubiquinone) 1 beta subcomplex, 2, 8kDa
  ENSP ID: ENSP00000418953

SEQ ID NO: 55109 - protein, 78 aa, Homo sapiens
  Payload ID: 10877
  Gene Symbol: NDUFB2
  Gene Name: NADH dehydrogenase (ubiquinone) 1 beta subcomplex, 2, 8kDa
  ENSP ID: ENSP00000418981
MHFSYSAGGGVHIEPRYRQFPQLTRSQVFQSEFFSGLMWFWILWRFWHDSEEVLGHFPYPDPSQWTDEELGIPPDDED

SEQ ID NO: 55110 - protein, 105 aa, Homo sapiens; identical to SEQ ID NO: 55105
  Payload ID: 10877
  Gene Symbol: NDUFB2
  Gene Name: NADH dehydrogenase (ubiquinone) 1 beta subcomplex, 2, 8kDa
  Uniprot ID: O95178
  ENSP ID: ENSP00000419087

SEQ ID NO: 55111 - protein, 105 aa, Homo sapiens; identical to SEQ ID NO: 55105
  Payload ID: 10877
  Gene Symbol: NDUFB2
  Gene Name: NADH dehydrogenase (ubiquinone) 1 beta subcomplex, 2, 8kDa
  Uniprot ID: O95178
  ENSP ID: ENSP00000419357

SEQ ID NO: 55112 - protein, 41 aa, Homo sapiens; identical to SEQ ID NO: 55107
  Payload ID: 10877
  Gene Symbol: NDUFB2
  Gene Name: NADH dehydrogenase (ubiquinone) 1 beta subcomplex, 2, 8kDa
  ENSP ID: ENSP00000419392

SEQ ID NO: 55113 - protein, 104 aa, Homo sapiens
  Payload ID: 10877
  Gene Symbol: NDUFB2
  Gene Name: NADH dehydrogenase (ubiquinone) 1 beta subcomplex, 2, 8kDa
  ENSP ID: ENSP00000419479
SALTRLASFARVGGRLFRSGCARTAGDGGVRHAGGGVHIEPRYRQFPQLTRSQVFQSEFFSGLMWFWILWRFWHDSEEVLGHFPYPDPSQWTDEELGIPPDDED

SEQ ID NO: 55114 - protein, 93 aa, Homo sapiens
  Payload ID: 10877
  Gene Symbol: NDUFB2
  Gene Name: NADH dehydrogenase (ubiquinone) 1 beta subcomplex, 2, 8kDa
  ENSP ID: ENSP00000419983
MLKNHSGCREWRLSPRESAVGAGGGVHIEPRYRQFPQLTRSQVFQSEFFSGLMWFWILWRFWHDSEEVLGHFPYPDPSQWTDEELGIPPDDED

SEQ ID NO: 55115 - protein, 96 aa, Homo sapiens
  Payload ID: 10877
  Gene Symbol: NDUFB2
  Gene Name: NADH dehydrogenase (ubiquinone) 1 beta subcomplex, 2, 8kDa
  ENSP ID: ENSP00000420062
MSALTRLASFARVGGRLFRSGCARTAGDGGVRQASNMDHRYTGDSALLWPSYKSSPEAEMLLPSSGAQLPMGISNPSQYNISRMCWRQYMDFLFQW

SEQ ID NO: 55116 - protein, 41 aa, Homo sapiens; identical to SEQ ID NO: 55107
  Payload ID: 10877
  Gene Symbol: NDUFB2
  Gene Name: NADH dehydrogenase (ubiquinone) 1 beta subcomplex, 2, 8kDa
  ENSP ID: ENSP00000420377

SEQ ID NO: 55117 - protein, 98 aa, Homo sapiens
  Payload ID: 10878
  Gene Symbol: NDUFB3
  Gene Name: NADH dehydrogenase (ubiquinone) 1 beta subcomplex, 3, 12kDa
  Uniprot ID: O43676
  ENSP ID: ENSP00000237889
MAHEHGHEHGHHKMELPDYRQWKIEGTPLETIQKKLAAKGLRDPWGRNEAWRYMGGFAKSVSFSDVFFKGFKWGFAAFVVAVGAEYYLESLNKDKKHH

SEQ ID NO: 55118 - protein, 65 aa, Homo sapiens
  Payload ID: 10878
  Gene Symbol: NDUFB3
  Gene Name: NADH dehydrogenase (ubiquinone) 1 beta subcomplex, 3, 12kDa
  ENSP ID: ENSP00000401834
MAHEHGHEHGHHKMELPDYRQWKIEGTPLETIQKKLAAKGLRDPWGRNEAWRYMGGFAKSVSFSD

SEQ ID NO: 55119 - protein, 98 aa, Homo sapiens; identical to SEQ ID NO: 55117
  Payload ID: 10878
  Gene Symbol: NDUFB3
  Gene Name: NADH dehydrogenase (ubiquinone) 1 beta subcomplex, 3, 12kDa
  Uniprot ID: O43676
  ENSP ID: ENSP00000407336

SEQ ID NO: 55120 - protein, 98 aa, Homo sapiens; identical to SEQ ID NO: 55117
  Payload ID: 10878
  Gene Symbol: NDUFB3
  Gene Name: NADH dehydrogenase (ubiquinone) 1 beta subcomplex, 3, 12kDa
  Uniprot ID: O43676
  ENSP ID: ENSP00000410600

SEQ ID NO: 55121 - protein, 129 aa, Homo sapiens
  Payload ID: 10879
  Gene Symbol: NDUFB4
  Gene Name: NADH dehydrogenase (ubiquinone) 1 beta subcomplex, 4, 15kDa
  Uniprot ID: O95168
  ENSP ID: ENSP00000184266
MSFPKYKPSSLRTLPETLDPAEYNISPETRRAQAERLAIRAQLKREYLLQYNDPNRRGLIENPALLRWAYARTINVYPNFRPTPKNSLMGALCGFGPLIFIYYIIKTERDRKEKLIQEGKLDRTFHLSY

SEQ ID NO: 55122 - protein, 69 aa, Homo sapiens
  Payload ID: 10879
  Gene Symbol: NDUFB4
  Gene Name: NADH dehydrogenase (ubiquinone) 1 beta subcomplex, 4, 15kDa
  ENSP ID: ENSP00000417714
MSFPKYKPSSLRTLPETLDPAEYNISPETRRAQAERLAIRAQLKREYLLQYNDPNRRGLIVSVGPPRRE

SEQ ID NO: 55123 - protein, 69 aa, Homo sapiens; identical to SEQ ID NO: 55122
  Payload ID: 10879
  Gene Symbol: NDUFB4
  Gene Name: NADH dehydrogenase (ubiquinone) 1 beta subcomplex, 4, 15kDa
  ENSP ID: ENSP00000417755

SEQ ID NO: 55124 - protein, 80 aa, Homo sapiens
  Payload ID: 10879
  Gene Symbol: NDUFB4
  Gene Name: NADH dehydrogenase (ubiquinone) 1 beta subcomplex, 4, 15kDa
  ENSP ID: ENSP00000419128
MSFPKYKPSSLRTLPETLDPAEYNISPETRRAQAERLAIRAQLKREYLLQYNDPNRRGLIDRKEKLIQEGKLDRTFHLSY

SEQ ID NO: 55125 - protein, 120 aa, Homo sapiens
  Payload ID: 10879
  Gene Symbol: NDUFB4
  Gene Name: NADH dehydrogenase (ubiquinone) 1 beta subcomplex, 4, 15kDa
  Uniprot ID: O95168
  ENSP ID: ENSP00000419578
MSFPKYKPSSLRTLPETLDPAEYNISPETRRAQAERLAIRAQLKREYLLQYNDPNRRGLIENPALLRWAYARTINVYPNFRPTPKNSLMGALCGFGPLIFIYYIIKTERVSIQTRCLVFE

SEQ ID NO: 55126 - protein, 189 aa, Homo sapiens
  Payload ID: 10880
  Gene Symbol: NDUFB5
  Gene Name: NADH dehydrogenase (ubiquinone) 1 beta subcomplex, 5, 16kDa
  Uniprot ID: O43674
  ENSP ID: ENSP00000259037
MAAMSLLRRVSVTAVAALSGRPLGTRLGFGGFLTRGFPKAAAPVRHSGDHGKRLFVIRPSRFYDRRFLKLLRFYIALTGIPVAIFITLVNVFIGQAELAEIPEGYVPEHWEYYKHPISRWIARNFYDSPEKIYERTMAVLQIEAEKAELRVKELEVRKLMHVRGDGPWYYYETIDKELIDHSPKATPDN

SEQ ID NO: 55127 - protein, 42 aa, Homo sapiens
  Payload ID: 10880
  Gene Symbol: NDUFB5
  Gene Name: NADH dehydrogenase (ubiquinone) 1 beta subcomplex, 5, 16kDa
  ENSP ID: ENSP00000353026
MAAMSLLRRVSVTAVAALSGRPLGTRLGFGGFLTRGFPKAAG

SEQ ID NO: 55128 - protein, 206 aa, Homo sapiens
  Payload ID: 10880
  Gene Symbol: NDUFB5
  Gene Name: NADH dehydrogenase (ubiquinone) 1 beta subcomplex, 5, 16kDa
  ENSP ID: ENSP00000418354
  MOD_RES (1)..(1): Any amino acid
XSLLRRVSVTAVAALSGRPLGTRLGFGGFLTRGFPKAAAPVRHSGDHGKRLFVIRPSRFYDRRFLKLLALYEQSRGLENGRLSGPSATRFYIALTGIPVAIFITLVNVFIGQAELAEIPEGYVPEHWEYYKHPISRWIARNFYDSPEKIYERTMAVLQIEAEKAELRVKELEVRKLMHVRGDGPWYYYETIDKELIDHSPKATPDN

SEQ ID NO: 55129 - protein, 100 aa, Homo sapiens
  Payload ID: 10880
  Gene Symbol: NDUFB5
  Gene Name: NADH dehydrogenase (ubiquinone) 1 beta subcomplex, 5, 16kDa
  ENSP ID: ENSP00000419099
GFRLLRWQLCLAGPLALASDLGASSLVAFRRLLGNSIFPAPVRHSGDHGKRLFVIRPSRFYDRRFLKLLRFYIALTGIPVAIFITLVNVFIASHIKMDCP

SEQ ID NO: 55130 - protein, 177 aa, Homo sapiens
  Payload ID: 10880
  Gene Symbol: NDUFB5
  Gene Name: NADH dehydrogenase (ubiquinone) 1 beta subcomplex, 5, 16kDa
  ENSP ID: ENSP00000419248
MAAMSLLRRVSVTAVAALSGRPLGTRLGFGGFLTRGFPKAAAPGNHHSAVFMILTTLFLIFYIALTGIPVAIFITLVNVFIGQAELAEIPEGYVPEHWEYYKHPISRWIARNFYDSPEKIYERTMAVLQIEAEKAELRVKELEVRKLMHVRGDGPWYYYETIDKELIDHSPKATPDN

SEQ ID NO: 55131 - protein, 56 aa, Homo sapiens
  Payload ID: 10880
  Gene Symbol: NDUFB5
  Gene Name: NADH dehydrogenase (ubiquinone) 1 beta subcomplex, 5, 16kDa
  ENSP ID: ENSP00000419501
IPVAIFITLVNVFIGQAELAEIPEGYVPEHWEYYKGKGAGSAKIDACERRWTLVLL

SEQ ID NO: 55132 - protein, 137 aa, Homo sapiens
  Payload ID: 10880
  Gene Symbol: NDUFB5
  Gene Name: NADH dehydrogenase (ubiquinone) 1 beta subcomplex, 5, 16kDa
  Uniprot ID: O43674
  ENSP ID: ENSP00000419656
MAAMSLLRRVSVTAVAALSGRPLGTRLGFGGFLTRGFPKAAGQAELAEIPEGYVPEHWEYYKHPISRWIARNFYDSPEKIYERTMAVLQIEAEKAELRVKELEVRKLMHVRGDGPWYYYETIDKELIDHSPKATPDN

SEQ ID NO: 55133 - protein, 66 aa, Homo sapiens
  Payload ID: 10880
  Gene Symbol: NDUFB5
  Gene Name: NADH dehydrogenase (ubiquinone) 1 beta subcomplex, 5, 16kDa
  ENSP ID: ENSP00000420538
MAAMSLLRRVSVTAVAALSGRPLGTRLGFGGFLTRGFPKAAEILHCIDWDSSSNFHNSGECIHWSS

SEQ ID NO: 55134 - protein, 135 aa, Homo sapiens
  Payload ID: 10880
  Gene Symbol: NDUFB5
  Gene Name: NADH dehydrogenase (ubiquinone) 1 beta subcomplex, 5, 16kDa
  ENSP ID: ENSP00000481703
MAAMSLLRRVSVTAVAALSGRPLGTRLGFGGFLTRGFPKAAAPVRHSGDHGKRLFVIRPSRFYDRRFLKLLRFYIALTGIPVAIFITLVNVFIGQAELAEIPEGYVPEHWEYYKGKGAGSAKIDACERRWTLVLL

SEQ ID NO: 55135 - protein, 113 aa, Homo sapiens
  Payload ID: 10881
  Gene Symbol: NDUFB6
  Gene Name: NADH dehydrogenase (ubiquinone) 1 beta subcomplex, 6, 17kDa
  Uniprot ID: O95139
  ENSP ID: ENSP00000297983
MTGYTPDEKLRLQQLRELRRRWLKDQELSPREPVLPPQKMGPMEKFWNKFLENKSPWRKMVHGVYKKSIFVFTHVLVPVWIIHYYMKYHVSGDTILETGEVIPPMKEFPDQHH

SEQ ID NO: 55136 - protein, 128 aa, Homo sapiens
  Payload ID: 10881
  Gene Symbol: NDUFB6
  Gene Name: NADH dehydrogenase (ubiquinone) 1 beta subcomplex, 6, 17kDa
  Uniprot ID: O95139
  ENSP ID: ENSP00000369176
MTGYTPDEKLRLQQLRELRRRWLKDQELSPREPVLPPQKMGPMEKFWNKFLENKSPWRKMVHGVYKKSIFVFTHVLVPVWIIHYYMKYHVSEKPYGIVEKKSRIFPGDTILETGEVIPPMKEFPDQHH

SEQ ID NO: 55137 - protein, 97 aa, Homo sapiens
  Payload ID: 10881
  Gene Symbol: NDUFB6
  Gene Name: NADH dehydrogenase (ubiquinone) 1 beta subcomplex, 6, 17kDa
  ENSP ID: ENSP00000482941
MTGYTPDEKLRLQQLRELRRRWLKDQELSPREPVLPPQKMGPMEKFWNKFLENKSPWRKMEKPYGIVEKKSRIFPGDTILETGEVIPPMKEFPDQHH

SEQ ID NO: 55138 - protein, 137 aa, Homo sapiens
  Payload ID: 10882
  Gene Symbol: NDUFB7
  Gene Name: NADH dehydrogenase (ubiquinone) 1 beta subcomplex, 7, 18kDa
  Uniprot ID: P17568
  ENSP ID: ENSP00000215565
MGAHLVRRYLGDASVEPDPLQMPTFPPDYGFPERKEREMVATQQEMMDAQLRLQLRDYCAHHLIRLLKCKRDSFPNFLACKQERHDWDYCEHRDYVMRMKEFERERRLLQRKKRREKKAAELAKGQGPGEVDPKVAL

SEQ ID NO: 55139 - protein, 70 aa, Homo sapiens
  Payload ID: 10882
  Gene Symbol: NDUFB7
  Gene Name: NADH dehydrogenase (ubiquinone) 1 beta subcomplex, 7, 18kDa
  ENSP ID: ENSP00000473120
MGAHLVRRYLGDASVEPDPLQMPTFPPDYGFPERKERDGGHTAGDDGRAAEAPAAGLLRPPPHPAAQVQA

SEQ ID NO: 55140 - protein, 186 aa, Homo sapiens
  Payload ID: 10883
  Gene Symbol: NDUFB8
  Gene Name: NADH dehydrogenase (ubiquinone) 1 beta subcomplex, 8, 19kDa
  Uniprot ID: O95169
  ENSP ID: ENSP00000299166
MAVARAGVLGVQWLQRASRNVMPLGARTASHMTKDMFPGPYPRTPEERAAAAKKYNMRVEDYEPYPDDGMGYGDYPKLPDRSQHERDPWYSWDQPGLRLNWGEPMHWHLDMYNRNRVDTSPTPVSWHVMCMQLFGFLAFMIFMCWVGDVYPVYQPVGPKQYPYNNLYLERGGDPSKEPERVVHYEI

SEQ ID NO: 55141 - protein, 172 aa, Homo sapiens
  Payload ID: 10883
  Gene Symbol: NDUFB8
  Gene Name: NADH dehydrogenase (ubiquinone) 1 beta subcomplex, 8, 19kDa
  Uniprot ID: O95169
  ENSP ID: ENSP00000359344
MAVARAGVLGVQWLQRASRNVMPLGARTASHMTKDMFPGPYPRTPEERAAAAKKYNMRVEDYEPYPDDGMGYGDYPKLPDRSQHERDPWYSWDQPGLRLNWGEPMHWHLDMYNRNRVDTSPTPVSWHVMCMQLFGFLAFMIFMCWVGDVYPVYQPVCRHHFSYNLGFLSALG

SEQ ID NO: 55142 - protein, 155 aa, Homo sapiens
  Payload ID: 10883
  Gene Symbol: NDUFB8
  Gene Name: NADH dehydrogenase (ubiquinone) 1 beta subcomplex, 8, 19kDa
  Uniprot ID: O95169
  ENSP ID: ENSP00000359346
MTKDMFPGPYPRTPEERAAAAKKYNMRVEDYEPYPDDGMGYGDYPKLPDRSQHERDPWYSWDQPGLRLNWGEPMHWHLDMYNRNRVDTSPTPVSWHVMCMQLFGFLAFMIFMCWVGDVYPVYQPVGPKQYPYNNLYLERGGDPSKEPERVVHYEI

SEQ ID NO: 55143 - protein, 71 aa, Homo sapiens
  Payload ID: 10883
  Gene Symbol: NDUFB8
  Gene Name: NADH dehydrogenase (ubiquinone) 1 beta subcomplex, 8, 19kDa
  ENSP ID: ENSP00000434072
MAVARAGVLGVQWLQRASRNVMPLGARTASHMTKDMFPGPYPRTPEERAAAAKKYNMRVEDYEPYPDDGMG

SEQ ID NO: 55144 - protein, 179 aa, Homo sapiens
  Payload ID: 10884
  Gene Symbol: NDUFB9
  Gene Name: NADH dehydrogenase (ubiquinone) 1 beta subcomplex, 9, 22kDa
  Uniprot ID: Q9Y6M9
  ENSP ID: ENSP00000276689
MAFLASGPYLTHQQKVLRLYKRALRHLESWCVQRDKYRYFACLMRARFEEHKNEKDMAKATQLLKEAEEEFWYRQHPQPYIFPDSPGGTSYERYDCYKVPEWCLDDWHPSEKAMYPDYFAKREQWKKLRRESWEREVKQLQEETPPGGPLTEALPPARKEGDLPPLWWYIVTRPRERPM

SEQ ID NO: 55145 - protein, 178 aa, Homo sapiens
  Payload ID: 10884
  Gene Symbol: NDUFB9
  Gene Name: NADH dehydrogenase (ubiquinone) 1 beta subcomplex, 9, 22kDa
  ENSP ID: ENSP00000428282
MAFLASGPYLTHQQKVLRLYKRALRHLESWCVQRDKYRYFACLMRARFEEHKNEKDMAKATQLLKEAEEEFWYRQHPQPYIFPDSPGGTSYERYDCYKVPEWCLDDWHPSEKAMYPDYFAKREQWKKLRRESWEREVRSTCTSLFLSYVDGVKFCSPQAEVQIPAMTVTLGPCFSDIL

SEQ ID NO: 55146 - protein, 168 aa, Homo sapiens
  Payload ID: 10884
  Gene Symbol: NDUFB9
  Gene Name: NADH dehydrogenase (ubiquinone) 1 beta subcomplex, 9, 22kDa
  ENSP ID: ENSP00000430322
MAFLASGPYLTHQQKVLRLYKRALRHLESWCVQRARFEEHKNEKDMAKATQLLKEAEEEFWYRQHPQPYIFPDSPGGTSYERYDCYKVPEWCLDDWHPSEKAMYPDYFAKREQWKKLRRESWEREVKQLQEETPPGGPLTEALPPARKEGDLPPLWWYIVTRPRERPM

SEQ ID NO: 55147 - protein, 221 aa, Homo sapiens
  Payload ID: 10884
  Gene Symbol: NDUFB9
  Gene Name: NADH dehydrogenase (ubiquinone) 1 beta subcomplex, 9, 22kDa
  ENSP ID: ENSP00000431115
MAFLASGPYLTHQQKVLRLYKRALRHLESWCVQRDKYRYFACLMRARFEEHKNEKDMAKATQLLKEAEEEFWYRQHPQPYIFPDSPGGTSYERYDCYKVPEWCLDDWHPSEKAMYPDYFAKREQWKKLRRESWEREQLSKRQVRQELGTMEETSHVLYRSAKLGPRAGLERSMEKFCAQGNNSNSDILLGLREMSWYLRISFQNACSASSQLRHANDFLKN

SEQ ID NO: 55148 - protein, 156 aa, Homo sapiens
  Payload ID: 10885
  Gene Symbol: NDUFAB1
  Gene Name: NADH dehydrogenase (ubiquinone) 1, alpha/beta subcomplex, 1, 8kDa
  Uniprot ID: O14561
  ENSP ID: ENSP00000007516
MASRVLSAYVSRLPAAFAPLPRVRMLAVARPLSTALCSAGTQTRLGTLQPALVLAQVPGRVTQLCRQYSDMPPLTLEGIQDRVLYVLKLYDKIDPEKLSVNSHFMKDLGLDSLDQVEIIMAMEDEFGFEIPDIDAEKLMCPQEIVDYIADKKDVYE

SEQ ID NO: 55149 - protein, 74 aa, Homo sapiens
  Payload ID: 10885
  Gene Symbol: NDUFAB1
  Gene Name: NADH dehydrogenase (ubiquinone) 1, alpha/beta subcomplex, 1, 8kDa
  ENSP ID: ENSP00000454812
MASRVLSAYVSRLPAAFAPLPRVRMLAVARPLSTALCSAGTQTRLGTLQPALVLAQHLLPVSRTPGSNSRKQAK

SEQ ID NO: 55150 - protein, 111 aa, Homo sapiens
  Payload ID: 10885
  Gene Symbol: NDUFAB1
  Gene Name: NADH dehydrogenase (ubiquinone) 1, alpha/beta subcomplex, 1, 8kDa
  ENSP ID: ENSP00000454891
  MOD_RES (1)..(1): Any amino acid
XLSAYVSRLPAAFAPLPRVRMLAVARPLSTALCSAGTQTRLGTLQPALVLAQLSVNSHFMKDLGLDSLDQVEIIMAMEDEFGFEIPDIDAEKLMCPQEIVDYIADKKDVYE

SEQ ID NO: 55151 - protein, 156 aa, Homo sapiens; identical to SEQ ID NO: 55148
  Payload ID: 10885
  Gene Symbol: NDUFAB1
  Gene Name: NADH dehydrogenase (ubiquinone) 1, alpha/beta subcomplex, 1, 8kDa
  Uniprot ID: O14561
  ENSP ID: ENSP00000458770

SEQ ID NO: 55152 - protein, 70 aa, Homo sapiens
  Payload ID: 10885
  Gene Symbol: NDUFAB1
  Gene Name: NADH dehydrogenase (ubiquinone) 1, alpha/beta subcomplex, 1, 8kDa
  ENSP ID: ENSP00000461693
MPPLTLEGIQDRVLYVLKLYDKIDPEKLSVNSHFMKDLGLDSLDQVEIIMAMEDEFGFEIPDIDAEKLMC

SEQ ID NO: 55153 - protein, 76 aa, Homo sapiens
  Payload ID: 10886
  Gene Symbol: NDUFC1
  Gene Name: NADH dehydrogenase (ubiquinone) 1, subcomplex unknown, 1, 6kDa
  Uniprot ID: O43677
  ENSP ID: ENSP00000377770
MAPSALLRPLSRLLAPARLPSGPSVRSKFYVREPPNAKPDWLKVGFTLGTTVFLWIYLIKQHNEDILEYKRRNGLE

SEQ ID NO: 55154 - protein, 76 aa, Homo sapiens; identical to SEQ ID NO: 55153
  Payload ID: 10886
  Gene Symbol: NDUFC1
  Gene Name: NADH dehydrogenase (ubiquinone) 1, subcomplex unknown, 1, 6kDa
  Uniprot ID: O43677
  ENSP ID: ENSP00000377775

SEQ ID NO: 55155 - protein, 76 aa, Homo sapiens; identical to SEQ ID NO: 55153
  Payload ID: 10886
  Gene Symbol: NDUFC1
  Gene Name: NADH dehydrogenase (ubiquinone) 1, subcomplex unknown, 1, 6kDa
  Uniprot ID: O43677
  ENSP ID: ENSP00000421195

SEQ ID NO: 55156 - protein, 76 aa, Homo sapiens; identical to SEQ ID NO: 55153
  Payload ID: 10886
  Gene Symbol: NDUFC1
  Gene Name: NADH dehydrogenase (ubiquinone) 1, subcomplex unknown, 1, 6kDa
  Uniprot ID: O43677
  ENSP ID: ENSP00000425882

SEQ ID NO: 55157 - protein, 76 aa, Homo sapiens; identical to SEQ ID NO: 55153
  Payload ID: 10886
  Gene Symbol: NDUFC1
  Gene Name: NADH dehydrogenase (ubiquinone) 1, subcomplex unknown, 1, 6kDa
  Uniprot ID: O43677
  ENSP ID: ENSP00000439882

SEQ ID NO: 55158 - protein, 76 aa, Homo sapiens; identical to SEQ ID NO: 55153
  Payload ID: 10886
  Gene Symbol: NDUFC1
  Gene Name: NADH dehydrogenase (ubiquinone) 1, subcomplex unknown, 1, 6kDa
  Uniprot ID: O43677
  ENSP ID: ENSP00000440133

SEQ ID NO: 55159 - protein, 76 aa, Homo sapiens; identical to SEQ ID NO: 55153
  Payload ID: 10886
  Gene Symbol: NDUFC1
  Gene Name: NADH dehydrogenase (ubiquinone) 1, subcomplex unknown, 1, 6kDa
  Uniprot ID: O43677
  ENSP ID: ENSP00000441126

SEQ ID NO: 55160 - protein, 119 aa, Homo sapiens
  Payload ID: 10887
  Gene Symbol: NDUFC2
  Gene Name: NADH dehydrogenase (ubiquinone) 1, subcomplex unknown, 2, 14.5kDa
  Uniprot ID: O95298
  ENSP ID: ENSP00000281031
MIARRNPEPLRFLPDEARSLPPPKLTDPRLLYIGFLGYCSGLIDNLIRRRPIATAGLHRQLLYITAFFFAGYYLVKREDYLYAVRDREMFGYMKLHPEDFPEEDKKTYGEIFEKFHPIR

SEQ ID NO: 55161 - protein, 71 aa, Homo sapiens
  Payload ID: 10887
  Gene Symbol: NDUFC2
  Gene Name: NADH dehydrogenase (ubiquinone) 1, subcomplex unknown, 2, 14.5kDa
  ENSP ID: ENSP00000432253
MIARRNPEPLRFLPDEARSLPPPKLTDPRLLYIGFLGYCSGLIDNLIRRRPIATADKKTYGEIFEKFHPIR

SEQ ID NO: 55162 - protein, 88 aa, Homo sapiens
  Payload ID: 10887
  Gene Symbol: NDUFC2
  Gene Name: NADH dehydrogenase (ubiquinone) 1, subcomplex unknown, 2, 14.5kDa
  Uniprot ID: O95298
  ENSP ID: ENSP00000432739
MIARRNPEPLRFLPDEARSLPPPKLTDPRLLYIGFLGYCSGLIDNLIRRRPIATAGLHRQLLYITAFFFAGYYLVKLEAYANLYVDTL

SEQ ID NO: 55163 - protein, 96 aa, Homo sapiens
  Payload ID: 10887
  Gene Symbol: NDUFC2
  Gene Name: NADH dehydrogenase (ubiquinone) 1, subcomplex unknown, 2, 14.5kDa
  Uniprot ID: O95298
  ENSP ID: ENSP00000434262
MIARRNPEPLRFLPDEARSLPPPKLTDPRLLYIGFLGYCSGLIDNLIRRRPIATADYLYAVRDREMFGYMKLHPEDFPEEDKKTYGEIFEKFHPIR

SEQ ID NO: 55164 - protein, 107 aa, Homo sapiens
  Payload ID: 10887
  Gene Symbol: NDUFC2
  Gene Name: NADH dehydrogenase (ubiquinone) 1, subcomplex unknown, 2, 14.5kDa
  ENSP ID: ENSP00000435017
MIARRNPEPLRFLPDEARSLPPPKLTDPRLLYIGFLGYCSGLIDNLIRRRPIATAGLHRQLLYITAFFFAGYYLVKREDYLYAVRDREMFGYMKLHPEDFPEEGISS

SEQ ID NO: 55165 - protein, 327 aa, Homo sapiens
  Payload ID: 10888
  Gene Symbol: NDUFAF1
  Gene Name: NADH dehydrogenase (ubiquinone) complex I, assembly factor 1
  Uniprot ID: Q9Y375
  ENSP ID: ENSP00000260361
MALVHKLLRGTYFLRKFSKPTSALYPFLGIRFAEYSSSLQKPVASPGKASSQRKTEGDLQGDHQKEVALDITSSEEKPDVSFDKAIRDEAIYHFRLLKDEIVDHWRGPEGHPLHEVLLEQAKVVWQFRGKEDLDKWTVTSDKTIGGRSEVFLKMGKNNQSALLYGTLSSEAPQDGESTRSGYCAMISRIPRGAFERKMSYDWSQFNTLYLRVRGDGRPWMVNIKEDTDFFQRTNQMYSYFMFTRGGPYWQEVKIPFSKFFFSNRGRIRDVQHELPLDKISSIGFTLADKVDGPFFLEIDFIGVFTDPAHTEEFAYENSPELNPRLFK

SEQ ID NO: 55166 - protein, 261 aa, Homo sapiens
  Payload ID: 10888
  Gene Symbol: NDUFAF1
  Gene Name: NADH dehydrogenase (ubiquinone) complex I, assembly factor 1
  ENSP ID: ENSP00000453027
MALVHKLLRGTYFLRKFSKPTSALYPFLGIRFAEYSSSLQKPVASPGKASSQRKTEGDLQGDHQKEVALDITSSEEKPDVSFDKAIRDEAIYHFRLLKDEIVDHWRGPEGHPLHEVLLEQAKVVWQFRGKEDLDKWTVTSDKTIGGRSEVFLKMGKNNQSALLYGTLSSEAPQDGESTRSGYCAMISRIPRGAFERKMSYDWSQFNTLYLRVRGDGRPWMVNIKEDTDFFQRTNQMYSYFMFTRGGPYWQEVKATLLKLVS

SEQ ID NO: 55167 - protein, 209 aa, Homo sapiens
  Payload ID: 10888
  Gene Symbol: NDUFAF1
  Gene Name: NADH dehydrogenase (ubiquinone) complex I, assembly factor 1
  ENSP ID: ENSP00000453944
MALVHKLLRGTYFLRKFSKPTSALYPFLGIRFAEYSSSLQKPVASPGKASSQRKTEGDLQGDHQKEVALDITSSEEKPDVSFDKAIRDEAIYHFRLLKDEIVDHWRGPEGHPLHEVLLEQAKVVWQFRGKEDLDKWTVTSDKTIGGRSEVFLKMGKNNQSALLYGTLSSEAPQDGESTRSGYCAMISRIPRGAFERKMSYDWSQFNTLY

SEQ ID NO: 55168 - protein, 191 aa, Homo sapiens
  Payload ID: 10888
  Gene Symbol: NDUFAF1
  Gene Name: NADH dehydrogenase (ubiquinone) complex I, assembly factor 1
  ENSP ID: ENSP00000454083
MALVHKLLRGTYFLRKFSKPTSALYPFLGIRFAEYSSSLQKPVASPGKASSQRKTEGDLQGDHQKEVALDITSSEEKPDVSFDKAIRDEAIYHFRLLKDEIVDHWRGPEGHPLHEVLLEQAKVVWQFRGKEDLDKWTVTSDKTIGGRSEVFLKMGKNNQSALLYGTLSSEAPQDGESTRSGYCAMISRIPR

SEQ ID NO: 55169 - protein, 169 aa, Homo sapiens
  Payload ID: 10889
  Gene Symbol: NDUFAF2
  Gene Name: NADH dehydrogenase (ubiquinone) complex I, assembly factor 2
  Uniprot ID: Q8N183
  ENSP ID: ENSP00000296597
MGWSQDLFRALWRSLSREVKEHVGTDQFGNKYYYIPQYKNWRGQTIREKRIVEAANKKEVDYEAGDIPTEWEAWIRRTRKTPPTMEEILKNEKHREEIKIKSQDFYEKEKLLSKETSEELLPPPVQTQIKGHASAPYFGKEEPSVAPSSTGKTFQPGSWMPRDGKSHNQ

SEQ ID NO: 55170 - protein, 60 aa, Homo sapiens
  Payload ID: 10889
  Gene Symbol: NDUFAF2
  Gene Name: NADH dehydrogenase (ubiquinone) complex I, assembly factor 2
  ENSP ID: ENSP00000423377
MGWSQDLFRALWRSLSREVKEHVGTDQFGNKYYYIPQYKNWRGEVAAWAAIAWSVIASLD

SEQ ID NO: 55171 - protein, 51 aa, Homo sapiens
  Payload ID: 10889
  Gene Symbol: NDUFAF2
  Gene Name: NADH dehydrogenase (ubiquinone) complex I, assembly factor 2
  ENSP ID: ENSP00000426149
  MOD_RES (1)..(1): Any amino acid
XFGNKYYYIPQYKNWRGQTIREKRIVEAANKKEVDYEAGDIPTEWEGNTKE

SEQ ID NO: 55172 - protein, 127 aa, Homo sapiens
  Payload ID: 10890
  Gene Symbol: NDUFAF3
  Gene Name: NADH dehydrogenase (ubiquinone) complex I, assembly factor 3
  Uniprot ID: Q9BU61
  ENSP ID: ENSP00000323003
MYIDSYNSRGFMINGNRVLGPCALLPHSVVQWNVGSHQDITEDSFSLFWLLEPRIEIVVVGTGDRTERLQSQVLQAMRQRGIAVEVQDTPNACATFNFLCHEGRVTGAALIPPPGGTSLTSLGQAAQ

SEQ ID NO: 55173 - protein, 184 aa, Homo sapiens
  Payload ID: 10890
  Gene Symbol: NDUFAF3
  Gene Name: NADH dehydrogenase (ubiquinone) complex I, assembly factor 3
  Uniprot ID: Q9BU61
  ENSP ID: ENSP00000323076
MATALALRSLYRARPSLRCPPVELPWAPRRGHRLSPADDELYQRTRISLLQREAAQAMYIDSYNSRGFMINGNRVLGPCALLPHSVVQWNVGSHQDITEDSFSLFWLLEPRIEIVVVGTGDRTERLQSQVLQAMRQRGIAVEVQDTPNACATFNFLCHEGRVTGAALIPPPGGTSLTSLGQAAQ

SEQ ID NO: 55174 - protein, 127 aa, Homo sapiens; identical to SEQ ID NO: 55172
  Payload ID: 10890
  Gene Symbol: NDUFAF3
  Gene Name: NADH dehydrogenase (ubiquinone) complex I, assembly factor 3
  Uniprot ID: Q9BU61
  ENSP ID: ENSP00000378843

SEQ ID NO: 55175 - protein, 127 aa, Homo sapiens; identical to SEQ ID NO: 55172
  Payload ID: 10890
  Gene Symbol: NDUFAF3
  Gene Name: NADH dehydrogenase (ubiquinone) complex I, assembly factor 3
  Uniprot ID: Q9BU61
  ENSP ID: ENSP00000402465

SEQ ID NO: 55176 - protein, 175 aa, Homo sapiens
  Payload ID: 10891
  Gene Symbol: NDUFAF4
  Gene Name: NADH dehydrogenase (ubiquinone) complex I, assembly factor 4
  Uniprot ID: Q9P032
  ENSP ID: ENSP00000358272
MGALVIRGIRNFNLENRAEREISKMKPSVAPRHPSTNSLLREQISLYPEVKGEIARKDEKLLSFLKDVYVDSKDPVSSLQVKAAETCQEPKEFRLPKDHHFDMINIKSIPKGKISIVEALTLLNNHKLFPETWTAEKIMQEYQLEQKDVNSLLKYFVTFEVEIFPPEDKKAIRSK

SEQ ID NO: 55177 - protein, 345 aa, Homo sapiens
  Payload ID: 10892
  Gene Symbol: NDUFAF5
  Gene Name: NADH dehydrogenase (ubiquinone) complex I, assembly factor 5
  Uniprot ID: Q5TEU4
  ENSP ID: ENSP00000367346
MLRPAGLWRLCRRPWAARVPAENLGRREVTSGVSPRGSTSPRTLNIFDRDLKRKQKNWAARQPEPTKFDYLKEEVGSRIADRVYDIPRNFPLALDLGCGRGYIAQYLNKETIGKFFQADIAENALKNSSETEIPTVSVLADEEFLPFKENTFDLVVSSLSLHWVNDLPRALEQIHYILKPDGVFIGAMFGGDTLYELRCSLQLAETEREGGFSPHISPFTAVNDLGHLLGRAGFNTLTVDTDEIQVNYPGMFELMEDLQGMGESNCAWNRKALLHRDTMLAAAAVYREMYRNEDGSVPATYQIYYMIGWKYHESQARPAERGSATVSFGELGKINNLMPPGKKSQ

SEQ ID NO: 55178 - protein, 317 aa, Homo sapiens
  Payload ID: 10892
  Gene Symbol: NDUFAF5
  Gene Name: NADH dehydrogenase (ubiquinone) complex I, assembly factor 5
  Uniprot ID: Q5TEU4
  ENSP ID: ENSP00000420497
MLRPAGLWRLCRRPWAARVPAENLGRREVTSGVSPRGSTSPRTLNIFDRDLKRKQKNWAARQPEPTKFDYLKEEVGSRIADRVYDIPRNFPLALDLGCGRGYIAQYLNKLQLFHCRKLLESFSKLTLQKMLCLHWVNDLPRALEQIHYILKPDGVFIGAMFGGDTLYELRCSLQLAETEREGGFSPHISPFTAVNDLGHLLGRAGFNTLTVDTDEIQVNYPGMFELMEDLQGMGESNCAWNRKALLHRDTMLAAAAVYREMYRNEDGSVPATYQIYYMIGWKYHESQARPAERGSATVSFGELGKINNLMPPGKKSQ

SEQ ID NO: 55179 - protein, 267 aa, Homo sapiens
  Payload ID: 10892
  Gene Symbol: NDUFAF5
  Gene Name: NADH dehydrogenase (ubiquinone) complex I, assembly factor 5
  ENSP ID: ENSP00000437325
MLRPAGLWRLCRRPWAARVPAENLGRREVTSGVSPRGSTSPRTLNIFDRDLKRKQKNWAARQPEPTKFDYLKEEVGSRIADRVYDIPRNFPLALDLGCGRGYIAQYLNKETIGKFFQADIAENALKNSSETEIPTVSVLADEEFLPFKENTFDLVVSSLSLHWVNDLPRALEQIHYILKPDGVFIGAMFGGDTLYELRCSLQLAETEREGGFSPHISPFTAVNDLGHLLGRAGFNTLTVDTDEIQVNYPGMFELMEDLQEQKSRMLT

SEQ ID NO: 55180 - protein, 241 aa, Homo sapiens
  Payload ID: 10893
  Gene Symbol: NDUFAF6
  Gene Name: NADH dehydrogenase (ubiquinone) complex I, assembly factor 6
  ENSP ID: ENSP00000379417
MWNWLRLVKDSVSEKTIGLMRMQFWKKTVEDIYCDNPPHQPVAIELWKAVKRHNLTKRWLMKIVDEREKNLDDKAYRNIKELENYAENTQSSLLYLTLEILGIKDLHADHAASHIGKAQGIVTCLRATPYHGSRRKVFLPMDICMLHGVSQEDFLRRNQDKNVRDVIYDIASQAHLHLKHARSFHKTVPVKAFPAFLQTVSLEDFLKKIQRVDFDIFHPSLQQKNTLLPLYLYIQSWRKTY

SEQ ID NO: 55181 - protein, 241 aa, Homo sapiens; identical to SEQ ID NO: 55180
  Payload ID: 10893
  Gene Symbol: NDUFAF6
  Gene Name: NADH dehydrogenase (ubiquinone) complex I, assembly factor 6
  ENSP ID: ENSP00000379419

SEQ ID NO: 55182 - protein, 333 aa, Homo sapiens
  Payload ID: 10893
  Gene Symbol: NDUFAF6
  Gene Name: NADH dehydrogenase (ubiquinone) complex I, assembly factor 6
  Uniprot ID: Q330K2
  ENSP ID: ENSP00000379430
MAASAHGSVWGPLRLGIPGLCCRRPPLGLYARMRRLPGPEVSGRSVAAASGPGAWGTDHYCLELLRKRDYEGYLCSLLLPAESRSSVFALRAFNVELAQVKDSVSEKTIGLMRMQFWKKTVEDIYCDNPPHQPVAIELWKAVKRHNLTKRWLMKIVDEREKNLDDKAYRNIKELENYAENTQSSLLYLTLEILGIKDLHADHAASHIGKAQGIVTCLRATPYHGSRRKVFLPMDICMLHGVSQEDFLRRNQDKNVRDVIYDIASQAHLHLKHARSFHKTVPVKAFPAFLQTVSLEDFLKKIQRVDFDIFHPSLQQKNTLLPLYLYIQSWRKTY

SEQ ID NO: 55183 - protein, 82 aa, Homo sapiens
  Payload ID: 10893
  Gene Symbol: NDUFAF6
  Gene Name: NADH dehydrogenase (ubiquinone) complex I, assembly factor 6
  ENSP ID: ENSP00000404060
  MOD_RES (1)..(1): Any amino acid
XCCRRPPLGLYARMRRLPGPEVSGRSVAAASGPGAWGTDHYCLELLRKRDYEGYLCSLLLPAESRSSVFALRAFNVELAQAG

SEQ ID NO: 55184 - protein, 133 aa, Homo sapiens
  Payload ID: 10893
  Gene Symbol: NDUFAF6
  Gene Name: NADH dehydrogenase (ubiquinone) complex I, assembly factor 6
  ENSP ID: ENSP00000428034
MWNWLRLVKDSVSEKTIGLMRMQFWKKTVEDIYCDNPPHQPVAIELWKAVKRHNLTKRWLMKIVDEREKNLDDKAYRNIKELENYAENTQSSLLYLTLEILGIKDLHADHAASHIGKAQGIVTCLRATPYHGS

SEQ ID NO: 55185 - protein, 58 aa, Homo sapiens
  Payload ID: 10893
  Gene Symbol: NDUFAF6
  Gene Name: NADH dehydrogenase (ubiquinone) complex I, assembly factor 6
  ENSP ID: ENSP00000428410
  MOD_RES (1)..(1): Any amino acid
XCCRRPPLGLYARMRRLPGPEVSGRSVAAASGPGAWGTDHYCLELLRLKTQSLRKQLD

SEQ ID NO: 55186 - protein, 93 aa, Homo sapiens
  Payload ID: 10893
  Gene Symbol: NDUFAF6
  Gene Name: NADH dehydrogenase (ubiquinone) complex I, assembly factor 6
  ENSP ID: ENSP00000428666
VWGPLRLGIPGLCCRRPPLGLYARMRRLPGPEVSGRSVAAASGPGAWGTDHYCLELLRKRDYEGYLCSLLLPAESRSSVFALRAFNVELAQAG

SEQ ID NO: 55187 - protein, 121 aa, Homo sapiens
  Payload ID: 10893
  Gene Symbol: NDUFAF6
  Gene Name: NADH dehydrogenase (ubiquinone) complex I, assembly factor 6
  Uniprot ID: Q330K2
  ENSP ID: ENSP00000428788
MAASAHGSVWGPLRLGIPGLCCRRPPLGLYARMRRLPGPEVSGRSVAAASGPGAWGTDHYCLELLRKRDYEGYLCSLLLPAESRSSVFALRAFNVELAQAGLLLLLSCCTVCHWDLNTKHC

SEQ ID NO: 55188 - protein, 121 aa, Homo sapiens; identical to SEQ ID NO: 55187
  Payload ID: 10893
  Gene Symbol: NDUFAF6
  Gene Name: NADH dehydrogenase (ubiquinone) complex I, assembly factor 6
  Uniprot ID: Q330K2
  ENSP ID: ENSP00000429038

SEQ ID NO: 55189 - protein, 95 aa, Homo sapiens
  Payload ID: 10893
  Gene Symbol: NDUFAF6
  Gene Name: NADH dehydrogenase (ubiquinone) complex I, assembly factor 6
  ENSP ID: ENSP00000429585
MRMQFWKKTVEDIYCDNPPHQPVAIELWKAVKRHNLTKRWLMKIVDEREKNLDDKAYRNIKELENYAENTQSSLLYLTLEILGIKDLHADHAASH

SEQ ID NO: 55190 - protein, 97 aa, Homo sapiens
  Payload ID: 10893
  Gene Symbol: NDUFAF6
  Gene Name: NADH dehydrogenase (ubiquinone) complex I, assembly factor 6
  ENSP ID: ENSP00000430099
AHGSVWGPLRLGIPGLCCRRPPLGLYARMRRLPGPEVSGRSVAAASGPGAWGTDHYCLELLRKRDYEGYLCSLLLPAESRSSVFALRAFNVELAQAG

SEQ ID NO: 55191 - protein, 102 aa, Homo sapiens
  Payload ID: 10893
  Gene Symbol: NDUFAF6
  Gene Name: NADH dehydrogenase (ubiquinone) complex I, assembly factor 6
  ENSP ID: ENSP00000430230
MRMQFWKKTVEDIYCDNPPHQPVAIELWKAVKRHNLTKRWLMKIVDEREKNLDDKAYRNIKELENYAENTQSSLLYLTLEILGIKDLHADHAASHIGKAQGI

SEQ ID NO: 55192 - protein, 142 aa, Homo sapiens
  Payload ID: 10893
  Gene Symbol: NDUFAF6
  Gene Name: NADH dehydrogenase (ubiquinone) complex I, assembly factor 6
  ENSP ID: ENSP00000430311
  MOD_RES (1)..(1): Any amino acid
XCCRRPPLGLYARMRRLPGPEVSGRSVAAASGPGAWGTDHYCLELLRKRDYEGYLCSLLLPAESRSSVFALRAFNVELAQVKDSVSEKTIGLMRMQFWKKTVEDIYCDNPPHQPVAIELWKVCTPAEAGPVSGPQIDFTEPQ

SEQ ID NO: 55193 - protein, 102 aa, Homo sapiens
  Payload ID: 10893
  Gene Symbol: NDUFAF6
  Gene Name: NADH dehydrogenase (ubiquinone) complex I, assembly factor 6
  ENSP ID: ENSP00000430991
LCCRRPPLGLYARMRRLPGPEVSGRSVAAASGPGAWGTDHYCLELLRKRDYEGYLCSLLLPAESRSSVFALRAFNVELAQAGLLLLLSCCTVCHWDLNTKHC

SEQ ID NO: 55194 - protein, 441 aa, Homo sapiens
  Payload ID: 10894
  Gene Symbol: NDUFAF7
  Gene Name: NADH dehydrogenase (ubiquinone) complex I, assembly factor 7
  Uniprot ID: Q7L592
  ENSP ID: ENSP00000002125
MSVLLRSGLGPLCAVARAAIPFIWRGKYFSSGNEPAENPVTPMLRHLMYKIKSTGPITVAEYMKEVLTNPAKGYYVYRDMLGEKGDFITSPEISQIFGELLGIWFISEWMATGKSTAFQLVELGPGRGTLVGDILRVFTQLGSVLKNCDISVHLVEVSQKLSEIQALTLTKEKVPLERNAGSPVYMKGVTKSGIPISWYRDLHDVPKGYSFYLAHEFFDVLPVHKFQKTPQGWREVFVDIDPQVSDKLRFVLAPSATPAEAFIQHDETRDHVEVCPDAGVIIEELSQRIALTGGAALVADYGHDGTKTDTFRGFCDHKLHDVLIAPGTADLTADVDFSYLRRMAQGKVASLGPIKQHTFLKNMGIDVRLKVLLDKSNEPSVRQQLLQGYDMLMNPKKMGERFNFFALLPHQRLQGGRYQRNARQSKPFASVVAGFSELAWQ

SEQ ID NO: 55195 - protein, 343 aa, Homo sapiens
  Payload ID: 10894
  Gene Symbol: NDUFAF7
  Gene Name: NADH dehydrogenase (ubiquinone) complex I, assembly factor 7
  Uniprot ID: Q7L592
  ENSP ID: ENSP00000337431
MSVLLRSGLGPLCAVARAAIPFIWRGKYFSSGNEPAENPVTPMLRHLMYKIKSTGPITVAEYMKEVLTNPAKLLGIWFISEWMATGKSTAFQLVELGPGRGTLVGDILRVFTQLGSVLKNCDISVHLVEKTPQGWREVFVDIDPQVSDKLRFVLAPSATPAEAFIQHDETRDHVEVCPDAGVIIEELSQRIALTGGAALVADYGHDGTKTDTFRGFCDHKLHDVLIAPGTADLTADVDFSYLRRMAQGKVASLGPIKQHTFLKNMGIDVRLKVLLDKSNEPSVRQQLLQGYDMLMNPKKMGERFNFFALLPHQRLQGGRYQRNARQSKPFASVVAGFSELAWQ

SEQ ID NO: 55196 - protein, 267 aa, Homo sapiens
  Payload ID: 10894
  Gene Symbol: NDUFAF7
  Gene Name: NADH dehydrogenase (ubiquinone) complex I, assembly factor 7
  ENSP ID: ENSP00000394436
MLRHLMYKIKSTGPITVAEYMKEVLTNPAKGYYVYRDMLGEKGDFITSPEISQIFGELLGIWFISEWMATGKSTAFQLVELGPGRGTLVGDILRVFTQLGSVLKNCDISVHLVEVSQKLSEIQALTLTKEKVPLERNAGSPVYMKGVTKSGIPISWYRDLHDVPKGYSFYLAHEFFDVLPVHKFQKTPQGWREVFVDIDPQVSDKLRFVLAPSATPAEAFIQHDETRDHVEVCPDAGVIIEELSQRIALTGGAALVADYGHDGTKTD

SEQ ID NO: 55197 - protein, 230 aa, Homo sapiens
  Payload ID: 10894
  Gene Symbol: NDUFAF7
  Gene Name: NADH dehydrogenase (ubiquinone) complex I, assembly factor 7
  ENSP ID: ENSP00000399207
MLGEKGDFITSPEISQIFGELLGIWFISEWMATGKSTAFQLVELGPGRGTLVGDILRVFTQLGSVLKNCDISVHLVEVSQKLSEIQALTLTKEKVPLERNAGSPVYMKGVTKSGIPISWYRDLHDVPKGYSFYLAHEFFDVLPVHKFQKTPQGWREVFVDIDPQVSDKLRFVLAPSATPAEAFIQHDETRDHVEVCPDAGVIIEELSQRIALTGGAALVADYGHDGTKTD

SEQ ID NO: 55198 - protein, 148 aa, Homo sapiens
  Payload ID: 10894
  Gene Symbol: NDUFAF7
  Gene Name: NADH dehydrogenase (ubiquinone) complex I, assembly factor 7
  ENSP ID: ENSP00000402959
MLRHLMYKIKSTGPITVAEYMKEVLTNPAKGYYVYRDMLGEKGDFITSPEISQIFGELLGIWFISEWMATGKSTAFQLVELGPGRGTLVGDILRVFTQLGSVLKNCDISVHLVEVSQKLSEIQALTLTKEKVPLERNAGSPVYMKGVT

SEQ ID NO: 55199 - protein, 111 aa, Homo sapiens
  Payload ID: 10894
  Gene Symbol: NDUFAF7
  Gene Name: NADH dehydrogenase (ubiquinone) complex I, assembly factor 7
  ENSP ID: ENSP00000410181
MLRHLMYKIKSTGPITVAEYMKEVLTNPAKGYYVYRDMLGEKGDFITSPEISQIFGELLGIWFISEWMATGKSTAFQLVELGPGRGTLVGDILRVFTQLGSVLKNCDISVH

SEQ ID NO: 55200 - protein, 88 aa, Homo sapiens
  Payload ID: 10894
  Gene Symbol: NDUFAF7
  Gene Name: NADH dehydrogenase (ubiquinone) complex I, assembly factor 7
  ENSP ID: ENSP00000412942
GFCDHKLHDVLIAPGTADLTADVDFSYLRRMAQGKVASLGPIKQHTFLKNMGIDVRLKRLQGGRYQRNARQSKPFASVVAGFSELAWQ

SEQ ID NO: 55201 - protein, 137 aa, Homo sapiens
  Payload ID: 10894
  Gene Symbol: NDUFAF7
  Gene Name: NADH dehydrogenase (ubiquinone) complex I, assembly factor 7
  ENSP ID: ENSP00000416594
MSVLLRSGLGPLCAVARAAIPFIWRGKYFSSGNEPAENPVTPMLRHLMYKIKSTGPITVAEYMKEVLTNPAKGYYVYRDMLGEKGDFITSPEISQIFGELLGIWFISEWMATGKSTAFQLVELGPGVHSTWICAEKL

SEQ ID NO: 55202 - protein, 727 aa, Homo sapiens
  Payload ID: 10895
  Gene Symbol: NDUFS1
  Gene Name: NADH dehydrogenase (ubiquinone) Fe-S protein 1, 75kDa (NADH-coenzyme Q reductase)
  Uniprot ID: P28331
  ENSP ID: ENSP00000233190
MLRIPVRKALVGLSKSPKGCVRTTATAASNLIEVFVDGQSVMVEPGTTVLQACEKVGMQIPRFCYHERLSVAGNCRMCLVEIEKAPKVVAACAMPVMKGWNILTNSEKSKKAREGVMEFLLANHPLDCPICDQGGECDLQDQSMMFGNDRSRFLEGKRAVEDKNIGPLVKTIMTRCIQCTRCIRFASEIAGVDDLGTTGRGNDMQVGTYIEKMFMSELSGNIIDICPVGALTSKPYAFTARPWETRKTESIDVMDAVGSNIVVSTRTGEVMRILPRMHEDINEEWISDKTRFAYDGLKRQRLTEPMVRNEKGLLTYTSWEDALSRVAGMLQSFQGKDVAAIAGGLVDAEALVALKDLLNRVDSDTLCTEEVFPTAGAGTDLRSNYLLNTTIAGVEEADVVLLVGTNPRFEAPLFNARIRKSWLHNDLKVALIGSPVDLTYTYDHLGDSPKILQDIASGSHPFSQVLKEAKKPMVVLGSSALQRNDGAAILAAVSSIAQKIRMTSGVTGDWKVMNILHRIASQVAALDLGYKPGVEAIRKNPPKVLFLLGADGGCITRQDLPKDCFIIYQGHHGDVGAPIADVILPGAAYTEKSATYVNTEGRAQQTKVAVTPPGLAREDWKIIRALSEIAGMTLPYDTLDQVRNRLEEVSPNLVRYDDIEGANYFQQANELSKLVNQQLLADPLVPPQLTIKDFYMTDSISRASQTMAKCVKAVTEGAQAVEEPSIC

SEQ ID NO: 55203 - protein, 130 aa, Homo sapiens
  Payload ID: 10895
  Gene Symbol: NDUFS1
  Gene Name: NADH dehydrogenase (ubiquinone) Fe-S protein 1, 75kDa (NADH-coenzyme Q reductase)
  ENSP ID: ENSP00000389413
MLRIPVRKALVGLSKSPKGCVRTTATAASNLIEVFVDGQSVMVEPGTTVLQACEKVGMQIPRFCYHERLSVAGNCRMCLVEIEKAPKVVAACAMPVMKGWNILTNSEKSKKAREGVMEFLLANHPLDCPI

SEQ ID NO: 55204 - protein, 741 aa, Homo sapiens
  Payload ID: 10895
  Gene Symbol: NDUFS1
  Gene Name: NADH dehydrogenase (ubiquinone) Fe-S protein 1, 75kDa (NADH-coenzyme Q reductase)
  Uniprot ID: P28331
  ENSP ID: ENSP00000392709
MRIRGSSGTLSRINMLRIPVRKALVGLSKSPKGCVRTTATAASNLIEVFVDGQSVMVEPGTTVLQACEKVGMQIPRFCYHERLSVAGNCRMCLVEIEKAPKVVAACAMPVMKGWNILTNSEKSKKAREGVMEFLLANHPLDCPICDQGGECDLQDQSMMFGNDRSRFLEGKRAVEDKNIGPLVKTIMTRCIQCTRCIRFASEIAGVDDLGTTGRGNDMQVGTYIEKMFMSELSGNIIDICPVGALTSKPYAFTARPWETRKTESIDVMDAVGSNIVVSTRTGEVMRILPRMHEDINEEWISDKTRFAYDGLKRQRLTEPMVRNEKGLLTYTSWEDALSRVAGMLQSFQGKDVAAIAGGLVDAEALVALKDLLNRVDSDTLCTEEVFPTAGAGTDLRSNYLLNTTIAGVEEADVVLLVGTNPRFEAPLFNARIRKSWLHNDLKVALIGSPVDLTYTYDHLGDSPKILQDIASGSHPFSQVLKEAKKPMVVLGSSALQRNDGAAILAAVSSIAQKIRMTSGVTGDWKVMNILHRIASQVAALDLGYKPGVEAIRKNPPKVLFLLGADGGCITRQDLPKDCFIIYQGHHGDVGAPIADVILPGAAYTEKSATYVNTEGRAQQTKVAVTPPGLAREDWKIIRALSEIAGMTLPYDTLDQVRNRLEEVSPNLVRYDDIEGANYFQQANELSKLVNQQLLADPLVPPQLTIKDFYMTDSISRASQTMAKCVKAVTEGAQAVEEPSIC

SEQ ID NO: 55205 - protein, 91 aa, Homo sapiens
  Payload ID: 10895
  Gene Symbol: NDUFS1
  Gene Name: NADH dehydrogenase (ubiquinone) Fe-S protein 1, 75kDa (NADH-coenzyme Q reductase)
  ENSP ID: ENSP00000395553
MLRIPVRKALVGLSKSPKGCVRTTATAASNLIEVFVDGQSVMVEPGTTVLQACEKVGMQIPRFCYHERLSVAGNCRMCLVEIEKAPKVLDT

SEQ ID NO: 55206 - protein, 670 aa, Homo sapiens
  Payload ID: 10895
  Gene Symbol: NDUFS1
  Gene Name: NADH dehydrogenase (ubiquinone) Fe-S protein 1, 75kDa (NADH-coenzyme Q reductase)
  Uniprot ID: P28331
  ENSP ID: ENSP00000397760
MQIPRFCYHERLSVAGNCRMCLVEIEKAPKVVAACAMPVMKGWNILTNSEKSKKAREGVMEFLLANHPLDCPICDQGGECDLQDQSMMFGNDRSRFLEGKRAVEDKNIGPLVKTIMTRCIQCTRCIRFASEIAGVDDLGTTGRGNDMQVGTYIEKMFMSELSGNIIDICPVGALTSKPYAFTARPWETRKTESIDVMDAVGSNIVVSTRTGEVMRILPRMHEDINEEWISDKTRFAYDGLKRQRLTEPMVRNEKGLLTYTSWEDALSRVAGMLQSFQGKDVAAIAGGLVDAEALVALKDLLNRVDSDTLCTEEVFPTAGAGTDLRSNYLLNTTIAGVEEADVVLLVGTNPRFEAPLFNARIRKSWLHNDLKVALIGSPVDLTYTYDHLGDSPKILQDIASGSHPFSQVLKEAKKPMVVLGSSALQRNDGAAILAAVSSIAQKIRMTSGVTGDWKVMNILHRIASQVAALDLGYKPGVEAIRKNPPKVLFLLGADGGCITRQDLPKDCFIIYQGHHGDVGAPIADVILPGAAYTEKSATYVNTEGRAQQTKVAVTPPGLAREDWKIIRALSEIAGMTLPYDTLDQVRNRLEEVSPNLVRYDDIEGANYFQQANELSKLVNQQLLADPLVPPQLTIKDFYMTDSISRASQTMAKCVKAVTEGAQAVEEPSIC

SEQ ID NO: 55207 - protein, 727 aa, Homo sapiens; identical to SEQ ID NO: 55202
  Payload ID: 10895
  Gene Symbol: NDUFS1
  Gene Name: NADH dehydrogenase (ubiquinone) Fe-S protein 1, 75kDa (NADH-coenzyme Q reductase)
  Uniprot ID: P28331
  ENSP ID: ENSP00000399912

SEQ ID NO: 55208 - protein, 611 aa, Homo sapiens
  Payload ID: 10895
  Gene Symbol: NDUFS1
  Gene Name: NADH dehydrogenase (ubiquinone) Fe-S protein 1, 75kDa (NADH-coenzyme Q reductase)
  ENSP ID: ENSP00000400976
MEFLLANHPLDCPICDQGGECDLQDQSMMFGNDRSRFLEGKRAVEDKNIGPLVKTIMTRCIQCTRCIRFASEIAGVDDLGTTGRGNDMQVGTYIEKMFMSELSGNIIDICPVGALTSKPYAFTARPWETRKTESIDVMDAVGSNIVVSTRTGEVMRILPRMHEDINEEWISDKTRFAYDGLKRQRLTEPMVRNEKGLLTYTSWEDALSRVAGMLQSFQGKDVAAIAGGLVDAEALVALKDLLNRVDSDTLCTEEVFPTAGAGTDLRSNYLLNTTIAGVEEADVVLLVGTNPRFEAPLFNARIRKSWLHNDLKVALIGSPVDLTYTYDHLGDSPKILQDIASGSHPFSQVLKEAKKPMVVLGSSALQRNDGAAILAAVSSIAQKIRMTSGVTGDWKVMNILHRIASQVAALDLGYKPGVEAIRKNPPKVLFLLGADGGCITRQDLPKDCFIIYQGHHGDVGAPIADVILPGAAYTEKSATYVNTEGRAQQTKVAVTPPGLAREDWKIIRALSEIAGMTLPYDTLDQVRNRLEEVSPNLVRYDDIEGANYFQQANELSKLVNQQLLADPLVPPQLTIKDFYMTDSISRASQTMAKCVKAVTEGAQAVEEPSIC

SEQ ID NO: 55209 - protein, 616 aa, Homo sapiens
  Payload ID: 10895
  Gene Symbol: NDUFS1
  Gene Name: NADH dehydrogenase (ubiquinone) Fe-S protein 1, 75kDa (NADH-coenzyme Q reductase)
  Uniprot ID: P28331
  ENSP ID: ENSP00000409689
MWEGVMEFLLANHPLDCPICDQGGECDLQDQSMMFGNDRSRFLEGKRAVEDKNIGPLVKTIMTRCIQCTRCIRFASEIAGVDDLGTTGRGNDMQVGTYIEKMFMSELSGNIIDICPVGALTSKPYAFTARPWETRKTESIDVMDAVGSNIVVSTRTGEVMRILPRMHEDINEEWISDKTRFAYDGLKRQRLTEPMVRNEKGLLTYTSWEDALSRVAGMLQSFQGKDVAAIAGGLVDAEALVALKDLLNRVDSDTLCTEEVFPTAGAGTDLRSNYLLNTTIAGVEEADVVLLVGTNPRFEAPLFNARIRKSWLHNDLKVALIGSPVDLTYTYDHLGDSPKILQDIASGSHPFSQVLKEAKKPMVVLGSSALQRNDGAAILAAVSSIAQKIRMTSGVTGDWKVMNILHRIASQVAALDLGYKPGVEAIRKNPPKVLFLLGADGGCITRQDLPKDCFIIYQGHHGDVGAPIADVILPGAAYTEKSATYVNTEGRAQQTKVAVTPPGLAREDWKIIRALSEIAGMTLPYDTLDQVRNRLEEVSPNLVRYDDIEGANYFQQANELSKLVNQQLLADPLVPPQLTIKDFYMTDSISRASQTMAKCVKAVTEGAQAVEEPSIC

SEQ ID NO: 55210 - protein, 691 aa, Homo sapiens
  Payload ID: 10895
  Gene Symbol: NDUFS1
  Gene Name: NADH dehydrogenase (ubiquinone) Fe-S protein 1, 75kDa (NADH-coenzyme Q reductase)
  Uniprot ID: P28331
  ENSP ID: ENSP00000409766
MLRIPVRKALVGLSKSPKGCVRTTATAASNLIEVFVDGQSVMVEPGTTVLQVVAACAMPVMKGWNILTNSEKSKKAREGVMEFLLANHPLDCPICDQGGECDLQDQSMMFGNDRSRFLEGKRAVEDKNIGPLVKTIMTRCIQCTRCIRFASEIAGVDDLGTTGRGNDMQVGTYIEKMFMSELSGNIIDICPVGALTSKPYAFTARPWETRKTESIDVMDAVGSNIVVSTRTGEVMRILPRMHEDINEEWISDKTRFAYDGLKRQRLTEPMVRNEKGLLTYTSWEDALSRVAGMLQSFQGKDVAAIAGGLVDAEALVALKDLLNRVDSDTLCTEEVFPTAGAGTDLRSNYLLNTTIAGVEEADVVLLVGTNPRFEAPLFNARIRKSWLHNDLKVALIGSPVDLTYTYDHLGDSPKILQDIASGSHPFSQVLKEAKKPMVVLGSSALQRNDGAAILAAVSSIAQKIRMTSGVTGDWKVMNILHRIASQVAALDLGYKPGVEAIRKNPPKVLFLLGADGGCITRQDLPKDCFIIYQGHHGDVGAPIADVILPGAAYTEKSATYVNTEGRAQQTKVAVTPPGLAREDWKIIRALSEIAGMTLPYDTLDQVRNRLEEVSPNLVRYDDIEGANYFQQANELSKLVNQQLLADPLVPPQLTIKDFYMTDSISRASQTMAKCVKAVTEGAQAVEEPSIC

SEQ ID NO: 55211 - protein, 463 aa, Homo sapiens
  Payload ID: 10896
  Gene Symbol: NDUFS2
  Gene Name: NADH dehydrogenase (ubiquinone) Fe-S protein 2, 49kDa (NADH-coenzyme Q reductase)
  Uniprot ID: O75306
  ENSP ID: ENSP00000356972
MAALRALCGFRGVAAQVLRPGAGVRLPIQPSRGVRQWQPDVEWAQQFGGAVMYPSKETAHWKPPPWNDVDPPKDTIVKNITLNFGPQHPAAHGVLRLVMELSGEMVRKCDPHIGLLHRGTEKLIEYKTYLQALPYFDRLDYVSMMCNEQAYSLAVEKLLNIRPPPRAQWIRVLFGEITRLLNHIMAVTTHALDLGAMTPFFWLFEEREKMFEFYERVSGARMHAAYIRPGGVHQDLPLGLMDDIYQFSKNFSLRLDELEELLTNNRIWRNRTIDIGVVTAEEALNYGFSGVMLRGSGIQWDLRKTQPYDVYDQVEFDVPVGSRGDCYDRYLCRVEEMRQSLRIIAQCLNKMPPGEIKVDDAKVSPPKRAEMKTSMESLIHHFKLYTEGYQVPPGATYTAIEAPKGEFGVYLVSDGSSRPYRCKIKAPGFAHLAGLDKMSKGHMLADVVAIIGTQDIVFGEVDR

SEQ ID NO: 55212 - protein, 457 aa, Homo sapiens
  Payload ID: 10896
  Gene Symbol: NDUFS2
  Gene Name: NADH dehydrogenase (ubiquinone) Fe-S protein 2, 49kDa (NADH-coenzyme Q reductase)
  Uniprot ID: O75306
  ENSP ID: ENSP00000376018
MAALRALCGFRGVAAQVLRPGAGVRLPIQPSRGVRQWQPDVEWAQQFGGAVMYPSKETAHWKPPPWNDVDPPKDTIVKNITLNFGPQHPAAHGVLRLVMELSGEMVRKCDPHIGLLHRGTEKLIEYKTYLQALPYFDRLDYVSMMCNEQAYSLAVEKLLNIRPPPRAQWIRVLFGEITRLLNHIMAVTTHALDLGAMTPFFWLFEEREKMFEFYERVSGARMHAAYIRPGGVHQDLPLGLMDDIYQFSKNFSLRLDELEELLTNNRIWRNRTIDIGVVTAEEALNYGFSGVMLRGSGIQWDLRKTQPYDVYDQVEFDVPVGSRGDCYDRYLCRVEEMRQSLRIIAQCLNKMPPGEIKVDDAKVSPPKRAEMKTSMESLIHHFKLYTEGYQVPPGATYTAIEAPKGEFGVYLVSDGSSRPYRCKIKAPGFAHLAGLDKMSKGHMLADVVAIIGTRPIV

SEQ ID NO: 55213 - protein, 264 aa, Homo sapiens
  Payload ID: 10897
  Gene Symbol: NDUFS3
  Gene Name: NADH dehydrogenase (ubiquinone) Fe-S protein 3, 30kDa (NADH-coenzyme Q reductase)
  Uniprot ID: O75489
  ENSP ID: ENSP00000263774
MAAAAVARLWWRGILGASALTRGTGRPSVLLLPVRRESAGADTRPTVRPRNDVAHKQLSAFGEYVAEILPKYVQQVQVSCFNELEVCIHPDGVIPVLTFLRDHTNAQFKSLVDLTAVDVPTRQNRFEIVYNLLSLRFNSRIRVKTYTDELTPIESAVSVFKAANWYEREIWDMFGVFFANHPDLRRILTDYGFEGHPFRKDFPLSGYVELRYDDEVKRVVAEPVELAQEFRKFDLNSPWEAFPVYRQPPESLKLEAGDKKPDAK

SEQ ID NO: 55214 - protein, 77 aa, Homo sapiens
  Payload ID: 10897
  Gene Symbol: NDUFS3
  Gene Name: NADH dehydrogenase (ubiquinone) Fe-S protein 3, 30kDa (NADH-coenzyme Q reductase)
  ENSP ID: ENSP00000431588
MAAAAVARLWWRGILGASALTRATVRPRNDVAHKQLSAFGEYVAEILPKYVQQVQVSCFNELEVCIHPDGVIPVLTF

SEQ ID NO: 55215 - protein, 161 aa, Homo sapiens
  Payload ID: 10897
  Gene Symbol: NDUFS3
  Gene Name: NADH dehydrogenase (ubiquinone) Fe-S protein 3, 30kDa (NADH-coenzyme Q reductase)
  ENSP ID: ENSP00000432099
MAAAAVARLWWRGILGASALTRGTGRPSVLLLPVRRESAGADTRPTVRPRNDVAHKQLSAFGEYVAEILPKYVQQVQVSCFNELEVCIHPDGVIPVLTFLRDHTNAQFKSLVDLTAVDVPTRQNRFETESCSVARLECSGMILAHCNLRLPGSSDSPASAP

SEQ ID NO: 55216 - protein, 121 aa, Homo sapiens
  Payload ID: 10897
  Gene Symbol: NDUFS3
  Gene Name: NADH dehydrogenase (ubiquinone) Fe-S protein 3, 30kDa (NADH-coenzyme Q reductase)
  ENSP ID: ENSP00000433405
MAAAAVARLWWRGILGASALTRGTGRPSVLLLPVRRESAGADTRPTVRPRNDVAHKQLSAFGEYVAEILPKYVQQVQVILTNVIWVWVKKEPCSQGMWEWADLFQRNYRFLHPKLGLFSQH

SEQ ID NO: 55217 - protein, 67 aa, Homo sapiens
  Payload ID: 10897
  Gene Symbol: NDUFS3
  Gene Name: NADH dehydrogenase (ubiquinone) Fe-S protein 3, 30kDa (NADH-coenzyme Q reductase)
  ENSP ID: ENSP00000433753
MAAAAVARLWWRGILGASALTRGTGRPSVLLLPVRRESAGADTRREYVRAALFSELSAGPLRCLSLP

SEQ ID NO: 55218 - protein, 132 aa, Homo sapiens
  Payload ID: 10897
  Gene Symbol: NDUFS3
  Gene Name: NADH dehydrogenase (ubiquinone) Fe-S protein 3, 30kDa (NADH-coenzyme Q reductase)
  Uniprot ID: O75489
  ENSP ID: ENSP00000434970
MAAAAVARLWWRGILGASALTRGTGRPSVLLLPVRRESAGADTRPTVRPRNDVAHKQLSAFGEYVAEILPKYVQQVQVSCFNELEVCIHPDGVIPVLTFLRDHTNAQFKSLVDLTAVDVPTRQNRFEVSWEI

SEQ ID NO: 55219 - protein, 175 aa, Homo sapiens
  Payload ID: 10898
  Gene Symbol: NDUFS4
  Gene Name: NADH dehydrogenase (ubiquinone) Fe-S protein 4, 18kDa (NADH-coenzyme Q reductase)
  Uniprot ID: O43181
  ENSP ID: ENSP00000296684
MAAVSMSVVLRQTLWRRRAVAVAALSVSRVPTRSLRTSTWRLAQDQTQDTQLITVDEKLDITTLTGVPEEHIKTRKVRIFVPARNNMQSGVNNTKKWKMEFDTRERWENPLMGWASTADPLSNMVLTFSTKEDAVSFAEKNGWSYDIEERKVPKPKSKSYGANFSWNKRTRVSTK

SEQ ID NO: 55220 - protein, 73 aa, Homo sapiens
  Payload ID: 10898
  Gene Symbol: NDUFS4
  Gene Name: NADH dehydrogenase (ubiquinone) Fe-S protein 4, 18kDa (NADH-coenzyme Q reductase)
  ENSP ID: ENSP00000422177
MAAVSMSVVLRQTLWRRRAVAVAALSVSRVPTRSLRTSTWRLAQDQTQDTQLITVDEKLAFGVPVHSTWMHFN

SEQ ID NO: 55221 - protein, 116 aa, Homo sapiens
  Payload ID: 10898
  Gene Symbol: NDUFS4
  Gene Name: NADH dehydrogenase (ubiquinone) Fe-S protein 4, 18kDa (NADH-coenzyme Q reductase)
  ENSP ID: ENSP00000424570
SMSVVLRQTLWRRRAVAVAALSVSRVPTRSLRTSTWRLAQDQTQDTQLITVDEKLDITTLTGVPEEHIKTRKVRIFVPARNNMQSGVNNTKKWKMEFDTRERWENPLMGWASTMEL

SEQ ID NO: 55222 - protein, 49 aa, Homo sapiens
  Payload ID: 10898
  Gene Symbol: NDUFS4
  Gene Name: NADH dehydrogenase (ubiquinone) Fe-S protein 4, 18kDa (NADH-coenzyme Q reductase)
  ENSP ID: ENSP00000424993
MAAVSMSVVLRQTLWRRRAVAVAALSVSRVPTRDRALLCHPGWSAVVQS

SEQ ID NO: 55223 - protein, 131 aa, Homo sapiens
  Payload ID: 10898
  Gene Symbol: NDUFS4
  Gene Name: NADH dehydrogenase (ubiquinone) Fe-S protein 4, 18kDa (NADH-coenzyme Q reductase)
  ENSP ID: ENSP00000425967
MAAVSMSVVLRQTLWRRRAVAVAALSVSRVPTRSLRTSTWRLAQDQTQDTQLITVDEKLVYLVPLCFTFCGLATPSLELATLFPASRHLEFLFTLPGCILTNPEDFIRSPSTYSSNGYHYFNWSSRRAYKN

SEQ ID NO: 55224 - protein, 106 aa, Homo sapiens
  Payload ID: 10899
  Gene Symbol: NDUFS5
  Gene Name: NADH dehydrogenase (ubiquinone) Fe-S protein 5, 15kDa (NADH-coenzyme Q reductase)
  Uniprot ID: O43920
  ENSP ID: ENSP00000362058
MPFLDIQKRFGLNIDRWLTIQSGEQPYKMAGRCHAFEKEWIECAHGIGYTRAEKECKIEYDDFVECLLRQKTMRRAGTIRKQRDKLIKEGKYTPPPHHIGKGEPRP

SEQ ID NO: 55225 - protein, 106 aa, Homo sapiens; identical to SEQ ID NO: 55224
  Payload ID: 10899
  Gene Symbol: NDUFS5
  Gene Name: NADH dehydrogenase (ubiquinone) Fe-S protein 5, 15kDa (NADH-coenzyme Q reductase)
  Uniprot ID: O43920
  ENSP ID: ENSP00000362060

SEQ ID NO: 55226 - protein, 124 aa, Homo sapiens
  Payload ID: 10900
  Gene Symbol: NDUFS6
  Gene Name: NADH dehydrogenase (ubiquinone) Fe-S protein 6, 13kDa (NADH-coenzyme Q reductase)
  Uniprot ID: O75380
  ENSP ID: ENSP00000274137
MAAAMTFCRLLNRCGEAARSLPLGARCFGVRVSPTGEKVTHTGQVYDDKDYRRIRFVGRQKEVNENFAIDLIAEQPVSEVETRVIACDGGGGALGHPKVYINLDKETKTGTCGYCGLQFRQHHH

SEQ ID NO: 55227 - protein, 172 aa, Homo sapiens
  Payload ID: 10900
  Gene Symbol: NDUFS6
  Gene Name: NADH dehydrogenase (ubiquinone) Fe-S protein 6, 13kDa (NADH-coenzyme Q reductase)
  ENSP ID: ENSP00000422557
MAAAMTFCRLLNRCGEAARSLPLGARCFGVRVSPTGEKVTHTGQVYDDKDYRRIRFVGRQKEVNENFAIDLIAEQPVSEVETRVIACDGGGGALGHPKVYINLVRSWPPVHMLGQPARPHTPLHSQCLFFLSSSLPAPEAALTGFTLLAHSPYSATLQGLHRAACPKTPFQL

SEQ ID NO: 55228 - protein, 213 aa, Homo sapiens
  Payload ID: 10901
  Gene Symbol: NDUFS7
  Gene Name: NADH dehydrogenase (ubiquinone) Fe-S protein 7, 20kDa (NADH-coenzyme Q reductase)
  Uniprot ID: O75251
  ENSP ID: ENSP00000233627
MAVLSAPGLRGFRILGLRSSVGPAVQARGVHQSVATDGPSSTQPALPKARAVAPKPSSRGEYVVAKLDDLVNWARRSSLWPMTFGLACCAVEMMHMAAPRYDMDRFGVVFRASPRQSDVMIVAGTLTNKMAPALRKVYDQMPEPRYVVSMGSCANGGGYYHYSYSVVRGCDRIVPVDIYIPGCPPTAEALLYGILQLQRKIKRERRLQIWYRR

SEQ ID NO: 55229 - protein, 206 aa, Homo sapiens
  Payload ID: 10901
  Gene Symbol: NDUFS7
  Gene Name: NADH dehydrogenase (ubiquinone) Fe-S protein 7, 20kDa (NADH-coenzyme Q reductase)
  Uniprot ID: O75251
  ENSP ID: ENSP00000364262
MAVLSAPGLRGFRILGLRSSVGPAVQARGVHQSVATDGPSSTQPALPKARAVAPKPSSRGEYVVAKLDDLVNWARRSSLWPMTFGLACCAVEMMHMAAPRYDMDRFGVVFRASPRQSDVMIVAGTLTNKMAPALRKVYDQMPEPRYVVSMGSCANGGGYYHYSYSVVRGCDRIVPVDIYIPGRAGTAPPTRELETGPAPHGARRPL

SEQ ID NO: 55230 - protein, 236 aa, Homo sapiens
  Payload ID: 10901
  Gene Symbol: NDUFS7
  Gene Name: NADH dehydrogenase (ubiquinone) Fe-S protein 7, 20kDa (NADH-coenzyme Q reductase)
  ENSP ID: ENSP00000406630
MAVLSAPGLRGFRILGLRSSVGPAVQARGVHQSVATDGPSRPLAAAVGARIRLWEAPAWLTPPVPVCLCASTQPALPKARAVAPKPSSRGEYVVAKLDDLVNWARRSSLWPMTFGLACCAVEMMHMAAPRYDMDRFGVVFRASPRQSDVMIVAGTLTNKMAPALRKVYDQMPEPRYVVSMGSCANGGGYYHYSYSVVRGCDRIVPVDIYIPGRAGTAPPTRELETGPAPHGARRPL

SEQ ID NO: 55231 - protein, 206 aa, Homo sapiens; identical to SEQ ID NO: 55229
  Payload ID: 10901
  Gene Symbol: NDUFS7
  Gene Name: NADH dehydrogenase (ubiquinone) Fe-S protein 7, 20kDa (NADH-coenzyme Q reductase)
  Uniprot ID: O75251
  ENSP ID: ENSP00000440348

SEQ ID NO: 55232 - protein, 66 aa, Homo sapiens
  Payload ID: 10901
  Gene Symbol: NDUFS7
  Gene Name: NADH dehydrogenase (ubiquinone) Fe-S protein 7, 20kDa (NADH-coenzyme Q reductase)
  ENSP ID: ENSP00000442822
MAVLSWPARLPDPWSALQRGPGCAGTRCPSERGHRWPKQHPACPAKGQSRGSQTQQPGRVCGGQAG

SEQ ID NO: 55233 - protein, 182 aa, Homo sapiens
  Payload ID: 10901
  Gene Symbol: NDUFS7
  Gene Name: NADH dehydrogenase (ubiquinone) Fe-S protein 7, 20kDa (NADH-coenzyme Q reductase)
  ENSP ID: ENSP00000443273
MAVLSAPGLRGFRILGLRSSVGPAVQARGVHQSVATDGPSSTQPALPKARAVAPKPSSRGEYVVAKLDDLVNWARRSSLWPMTFGLACCAVEMMHMAAPRYDMDRFGVVFRASPRQSDVMIVAGTLTNKMAPALRKVYDQMPEPRYVVSMGSCANGGGYYHYSYSVVRGCDRIVPVDIYIPD

SEQ ID NO: 55234 - protein, 41 aa, Homo sapiens
  Payload ID: 10901
  Gene Symbol: NDUFS7
  Gene Name: NADH dehydrogenase (ubiquinone) Fe-S protein 7, 20kDa (NADH-coenzyme Q reductase)
  ENSP ID: ENSP00000467094
MAVLSDGVSLCHPSWSAVAQPLLTATSTSRVQVILLPQPLE

SEQ ID NO: 55235 - protein, 214 aa, Homo sapiens
  Payload ID: 10901
  Gene Symbol: NDUFS7
  Gene Name: NADH dehydrogenase (ubiquinone) Fe-S protein 7, 20kDa (NADH-coenzyme Q reductase)
  ENSP ID: ENSP00000477895
MAVLSAPGLRGFRILGLRSSVGPAVQARGVHQSVATDGPSSTQPALPKARAVAPKPSSRGEYVVAKLDDLVNWARRSSLWPMTFGLACCAVEMMHMAAPRYDMDRFGVVFRASPRQSDVMIVAGTLTNKMAPALRKPPSRPQNAGAALRGLHGELRQRRRLLPLFLLGGEGLRPHRARGHLHPRLPTAEALLYGILQLQRKIKRERRLQIWYRR

SEQ ID NO: 55236 - protein, 214 aa, Homo sapiens
  Payload ID: 10901
  Gene Symbol: NDUFS7
  Gene Name: NADH dehydrogenase (ubiquinone) Fe-S protein 7, 20kDa (NADH-coenzyme Q reductase)
  ENSP ID: ENSP00000480984
MAVLSAPGLRGFRILGLRSSVGPAVQARGVHQSVATDGPSSTQPALPKARAVAPKPSSRGEYVVAKLDDLVNWARRSSLWPMTFGLACCAVEMMHMAAPRYDMDRFGVVFRASPRQSDVMIVAGTLTNKMAPALRKSSLRPDAGAALRGLHGELRQRRRLLPLFLLGGEGLRPHRARGHLHPRLPTTAEALLYGILQLQRKIKRERRLQIWYRR

SEQ ID NO: 55237 - protein, 210 aa, Homo sapiens
  Payload ID: 10902
  Gene Symbol: NDUFS8
  Gene Name: NADH dehydrogenase (ubiquinone) Fe-S protein 8, 23kDa (NADH-coenzyme Q reductase)
  Uniprot ID: O00217
  ENSP ID: ENSP00000315774
MRCLTTPMLLRALAQAARAGPPGGRSLHSSAVAATYKYVNMQDPEMDMKSVTDRAARTLLWTELFRGLGMTLSYLFREPATINYPFEKGPLSPRFRGEHALRRYPSGEERCIACKLCEAICPAQAITIEAEPRADGSRRTTRYDIDMTKCIYCGFCQEACPVDAIVEGPNFEFSTETHEELLYNKEKLLNNGDKWEAEIAANIQADYLYR

SEQ ID NO: 55238 - protein, 124 aa, Homo sapiens
  Payload ID: 10902
  Gene Symbol: NDUFS8
  Gene Name: NADH dehydrogenase (ubiquinone) Fe-S protein 8, 23kDa (NADH-coenzyme Q reductase)
  ENSP ID: ENSP00000403972
MRCLTTPMLLRALAQAARAGPPGGRSLHSSAVAATYKYVNMQDPEMDMKSVTDRAARTLLWTELFRGLGMTLSYLFREPATINYPFEKGPLSPRFRGEHALRRYPSGEERCIACKLCEAICPAQ

SEQ ID NO: 55239 - protein, 40 aa, Homo sapiens
  Payload ID: 10902
  Gene Symbol: NDUFS8
  Gene Name: NADH dehydrogenase (ubiquinone) Fe-S protein 8, 23kDa (NADH-coenzyme Q reductase)
  ENSP ID: ENSP00000431293
LTTPMLLRALAQAARAGPPGGRSLHSSAVAATYSEYLGGL

SEQ ID NO: 55240 - protein, 64 aa, Homo sapiens
  Payload ID: 10902
  Gene Symbol: NDUFS8
  Gene Name: NADH dehydrogenase (ubiquinone) Fe-S protein 8, 23kDa (NADH-coenzyme Q reductase)
  ENSP ID: ENSP00000432848
MTKCIYCGFCQEACPVDAIVEGPNFEFSTETHEELLYNKEKLLNNGDKWEAEIAANIQADYLYR

SEQ ID NO: 55241 - protein, 110 aa, Homo sapiens
  Payload ID: 10902
  Gene Symbol: NDUFS8
  Gene Name: NADH dehydrogenase (ubiquinone) Fe-S protein 8, 23kDa (NADH-coenzyme Q reductase)
  ENSP ID: ENSP00000432968
MRCLTTPMLLRALAQAARAGPPGGRSLHSSAVAATYKYVNMQDPEMDMKSVTDRAARTLLWTELFRGLGMTLSYLFREPATINYPFEKGPLSPRFRGEHALRRYPSGEER

SEQ ID NO: 55242 - protein, 70 aa, Homo sapiens
  Payload ID: 10902
  Gene Symbol: NDUFS8
  Gene Name: NADH dehydrogenase (ubiquinone) Fe-S protein 8, 23kDa (NADH-coenzyme Q reductase)
  ENSP ID: ENSP00000433054
MRRPLCATGLVRVGDHWEDALPDHAYAAAGPGPGCTCRTSWWPEPPQQCSGSHLQVCEHAGSRDGHEVSD

SEQ ID NO: 55243 - protein, 138 aa, Homo sapiens
  Payload ID: 10902
  Gene Symbol: NDUFS8
  Gene Name: NADH dehydrogenase (ubiquinone) Fe-S protein 8, 23kDa (NADH-coenzyme Q reductase)
  ENSP ID: ENSP00000433521
MRRPLCATGLVRVGDHWEEYVNMQDPEMDMKSVTDRAARTLLWTELFRGLGMTLSYLFREPATINYPFEKGPLSPRFRGEHALRRYPSGEERCIACKLCEAICPAQAITIEAEPRADGSRRTTRYDIDMTKCIYCGFC

SEQ ID NO: 55244 - protein, 43 aa, Homo sapiens
  Payload ID: 10902
  Gene Symbol: NDUFS8
  Gene Name: NADH dehydrogenase (ubiquinone) Fe-S protein 8, 23kDa (NADH-coenzyme Q reductase)
  ENSP ID: ENSP00000433645
MRCLTTPMLLRALAQAARAGPPGGRSLHSSAVAATYSEYLGGL

SEQ ID NO: 55245 - protein, 93 aa, Homo sapiens
  Payload ID: 10902
  Gene Symbol: NDUFS8
  Gene Name: NADH dehydrogenase (ubiquinone) Fe-S protein 8, 23kDa (NADH-coenzyme Q reductase)
  ENSP ID: ENSP00000434283
  MOD_RES (1)..(1): Any amino acid
XEPATINYPFEKGPLSPRFRGEHALRRYPSGEERCIACKLCEAICPAQGETLRAAGATLNKAVNSPLVRGGSWQMTPAADKQARQAGHGGSRL

SEQ ID NO: 55246 - protein, 184 aa, Homo sapiens
  Payload ID: 10902
  Gene Symbol: NDUFS8
  Gene Name: NADH dehydrogenase (ubiquinone) Fe-S protein 8, 23kDa (NADH-coenzyme Q reductase)
  ENSP ID: ENSP00000436287
MRCLTTPMLLRALAQAARAGPPGGRSLHSSAVAATYKYVNMQDPEMDMKSVTDRAARTLLWTELFRGLGMTLSYLFREPATINYPFEKGPLSPRFRGEHALRRYPSGEERCIACKLCEAICPAQAITIEAEPRADGSRRTTRYDIDMTKCIYCGFCQEACPVDAIVEGPNFEFSTETHEELLYN

SEQ ID NO: 55247 - protein, 464 aa, Homo sapiens
  Payload ID: 10903
  Gene Symbol: NDUFV1
  Gene Name: NADH dehydrogenase (ubiquinone) flavoprotein 1, 51kDa
  Uniprot ID: P49821
  ENSP ID: ENSP00000322450
MLATRRLLGWSLPARVSVRFSGDTTAPKKTSFGSLKDEDRIFTNLYGRHDWRLKGSLSRGDWYKTKEILLKGPDWILGEIKTSGLRGRGGAGFPTGLKWSFMNKPSDGRPKYLVVNADEGEPGTCKDREILRHDPHKLLEGCLVGGRAMGARAAYIYIRGEFYNEASNLQVAIREAYEAGLIGKNACGSGYDFDVFVVRGAGAYICGEETALIESIEGKQGKPRLKPPFPADVGVFGCPTTVANVETVAVSPTICRRGGTWFAGFGRERNSGTKLFNISGHVNHPCTVEEEMSVPLKELIEKHAGGVTGGWDNLLAVIPGGSSTPLIPKSVCETVLMDFDALVQAQTGLGTAAVIVMDRSTDIVKAIARLIEFYKHESCGQCTPCREGVDWMNKVMARFVRGDARPAEIDSLWEISKQIEGHTICALGDGAAWPVQGLIRHFRPELEERMQRFAQQHQARQAAS

SEQ ID NO: 55248 - protein, 457 aa, Homo sapiens
  Payload ID: 10903
  Gene Symbol: NDUFV1
  Gene Name: NADH dehydrogenase (ubiquinone) flavoprotein 1, 51kDa
  ENSP ID: ENSP00000395368
MLATRRLLGWSLPARVSTAPKKTSFGSLKDEDRIFTNLYGRHDWRLKGSLSRGDWYKTKEILLKGPDWILGEIKTSGLRGRGGAGFPTGLKWSFMNKPSDGRPKYLVVNADEGEPGTCKDREILRHDPHKLLEGCLVGGRAMGARAAYIYIRGEFYNEASNLQVAIREAYEAGLIGKNACGSGYDFDVFVVRGAGAYICGEETALIESIEGKQGKPRLKPPFPADVGVFGCPTTVANVETVAVSPTICRRGGTWFAGFGRERNSGTKLFNISGHVNHPCTVEEEMSVPLKELIEKHAGGVTGGWDNLLAVIPGGSSTPLIPKSVCETVLMDFDALVQAQTGLGTAAVIVMDRSTDIVKAIARLIEFYKHESCGQCTPCREGVDWMNKVMARFVRGDARPAEIDSLWEISKQIEGHTICALGDGAAWPVQGLIRHFRPELEERMQRFAQQHQARQAAS

SEQ ID NO: 55249 - protein, 95 aa, Homo sapiens
  Payload ID: 10903
  Gene Symbol: NDUFV1
  Gene Name: NADH dehydrogenase (ubiquinone) flavoprotein 1, 51kDa
  ENSP ID: ENSP00000431751
MNKPSDGRPKYLVVNADEGEPGTCKDREILRHDPHKLLEGCLVGGRAMGARAAYIYIRGEFYNEASNLQVAIREAYEAGLIGKNACGSGYDFDVF

SEQ ID NO: 55250 - protein, 363 aa, Homo sapiens
  Payload ID: 10903
  Gene Symbol: NDUFV1
  Gene Name: NADH dehydrogenase (ubiquinone) flavoprotein 1, 51kDa
  ENSP ID: ENSP00000432015
MNKPSDGRPKYLVVNADEGEPGTCKDREILRHDPHKLLEGCLVGGRAMGARAAYIYIRGEFYNEASNLQVAIREAYEAGLIGKNACGSGYDFDVFVVRGAGAYICGEETALIESIEGKQGKPRLKPPFPADVGVFGCPTTVANVETVAVSPTICRRGGTWFAGFGRERNSGTKLFNISGHVNHPCTVEEEMSVPLKELIEKHAGGVTGGWDNLLAVIPGGSSTPLIPKSVCETVLMDFDALVQAQTGLGTAAVIVMDRSTDIVKAIARLIEFYKHESCGQCTPCREGVDWMNKVMARFVRGDARPAEIDSLWEISKQIEGHTICALGDGAAWPVQGLIRHFRPELEERMQRFAQQHQARQAAS

SEQ ID NO: 55251 - protein, 127 aa, Homo sapiens
  Payload ID: 10903
  Gene Symbol: NDUFV1
  Gene Name: NADH dehydrogenase (ubiquinone) flavoprotein 1, 51kDa
  ENSP ID: ENSP00000432637
CPTTVANVETVAVSPTICRRGGTWFAGFGRERNSGTKLFNISGHVNHPCTVEEEMSVPLKELIEKHAGGVTGGWDNLLAVIPGGSSTPLIPKSVCETVLMDFDALVQAQTGLGTAAVIVMDRSVWTG

SEQ ID NO: 55252 - protein, 178 aa, Homo sapiens
  Payload ID: 10903
  Gene Symbol: NDUFV1
  Gene Name: NADH dehydrogenase (ubiquinone) flavoprotein 1, 51kDa
  ENSP ID: ENSP00000434438
MLATRRLLGWSLPARVSVRFSGDTDEDRIFTNLYGRHDWRLKGSLSRGDWYKTKEILLKGPDWILGEIKTSGLRGRGGAGFPTGLKWSFMNKPSDGRPKYLVVNADEGEPGTCKDREILRHDPHKLLEGCLVGGRAMGARAAYIYIRGEFYNEASNLQVAIREAYEAGLIGKNACGSG

SEQ ID NO: 55253 - protein, 43 aa, Homo sapiens
  Payload ID: 10903
  Gene Symbol: NDUFV1
  Gene Name: NADH dehydrogenase (ubiquinone) flavoprotein 1, 51kDa
  ENSP ID: ENSP00000434575
MLATRRLLGWSLPARVSVRFSGDTSSAWRKFCRQHPRKPHLAR

SEQ ID NO: 55254 - protein, 52 aa, Homo sapiens
  Payload ID: 10903
  Gene Symbol: NDUFV1
  Gene Name: NADH dehydrogenase (ubiquinone) flavoprotein 1, 51kDa
  ENSP ID: ENSP00000434581
MNKPSDGRPKYLVVNADEGEPGTCKDREILRHDPHKLLEGCLVGGRAMGARA

SEQ ID NO: 55255 - protein, 133 aa, Homo sapiens
  Payload ID: 10903
  Gene Symbol: NDUFV1
  Gene Name: NADH dehydrogenase (ubiquinone) flavoprotein 1, 51kDa
  ENSP ID: ENSP00000435199
EAYEAGLIGKNACGSGYDFDVFVVRGAGAYICGEETALIESIEGKQGKPRLKPPFPADVGVFGCPTTVANVETVAVSPTICRRGGTWFAGFGRERNSGTKLFNISGHVNHPCTVEEEMSVPLKELIEKHAVCV

SEQ ID NO: 55256 - protein, 136 aa, Homo sapiens
  Payload ID: 10903
  Gene Symbol: NDUFV1
  Gene Name: NADH dehydrogenase (ubiquinone) flavoprotein 1, 51kDa
  ENSP ID: ENSP00000435202
MNKPSDGRPKYLVVNADEGEPGTCKDREILRHDPHKLLEGCLVGGRAMGARAAYIYIRGEFYNEASNLQVAIREAYEAGLIGKNACGSGYDFDVFVVRGAGAYICGEETALIESIEGKQGKPRLKPPFPADVGKAW

SEQ ID NO: 55257 - protein, 455 aa, Homo sapiens
  Payload ID: 10903
  Gene Symbol: NDUFV1
  Gene Name: NADH dehydrogenase (ubiquinone) flavoprotein 1, 51kDa
  Uniprot ID: P49821
  ENSP ID: ENSP00000436766
MLATRRLLGWSLPARTAPKKTSFGSLKDEDRIFTNLYGRHDWRLKGSLSRGDWYKTKEILLKGPDWILGEIKTSGLRGRGGAGFPTGLKWSFMNKPSDGRPKYLVVNADEGEPGTCKDREILRHDPHKLLEGCLVGGRAMGARAAYIYIRGEFYNEASNLQVAIREAYEAGLIGKNACGSGYDFDVFVVRGAGAYICGEETALIESIEGKQGKPRLKPPFPADVGVFGCPTTVANVETVAVSPTICRRGGTWFAGFGRERNSGTKLFNISGHVNHPCTVEEEMSVPLKELIEKHAGGVTGGWDNLLAVIPGGSSTPLIPKSVCETVLMDFDALVQAQTGLGTAAVIVMDRSTDIVKAIARLIEFYKHESCGQCTPCREGVDWMNKVMARFVRGDARPAEIDSLWEISKQIEGHTICALGDGAAWPVQGLIRHFRPELEERMQRFAQQHQARQAAS

SEQ ID NO: 55258 - protein, 75 aa, Homo sapiens
  Payload ID: 10903
  Gene Symbol: NDUFV1
  Gene Name: NADH dehydrogenase (ubiquinone) flavoprotein 1, 51kDa
  ENSP ID: ENSP00000436906
MGIPSPSAAPKKTSFGSLKDEDRIFTNLYGRHDWRLKGSLSRGDWYKTKEILLKGPDWILGEIKTSGLRGRGGAG

SEQ ID NO: 55259 - protein, 144 aa, Homo sapiens
  Payload ID: 10903
  Gene Symbol: NDUFV1
  Gene Name: NADH dehydrogenase (ubiquinone) flavoprotein 1, 51kDa
  ENSP ID: ENSP00000436936
MKTGFSPTCTAAMTGGSLSRGDWYKTKEILLKGPDWILGEIKTSGLRGRGGAGFPTGLKWSFMNKPSDGRPKYLVVNADEGEPGTCKDREILRHDPHKLLEGCLVGGRAMGARAAYIYIRGEFYNEASNLQVAIREAYEAGLIG

SEQ ID NO: 55260 - protein, 178 aa, Homo sapiens
  Payload ID: 10903
  Gene Symbol: NDUFV1
  Gene Name: NADH dehydrogenase (ubiquinone) flavoprotein 1, 51kDa
  ENSP ID: ENSP00000437267
MLATRRLLGWSLPARVSVRFSGDTTAPKKTSFGSLKDEDRIFTNLLKGSLSRGDWYKTKEILLKGPDWILGEIKTSGLRGRGGAGFPTGLKWSFMNKPSDGRPKYLVVNADEGEPGTCKDREILRHDPHKLLEGCLVGGRAMGARAAYIYIRGEFYNEASNLQVAIREAYEAGLIGKN

SEQ ID NO: 55261 - protein, 249 aa, Homo sapiens
  Payload ID: 10904
  Gene Symbol: NDUFV2
  Gene Name: NADH dehydrogenase (ubiquinone) flavoprotein 2, 24kDa
  Uniprot ID: P19404
  ENSP ID: ENSP00000327268
MFFSAALRARAAGLTAHWGRHVRNLHKTVMQNGAGGALFVHRDTPENNPDTPFDFTPENYKRIEAIVKNYPEGHKAAAVLPVLDLAQRQNGWLPISAMNKVAEVLQVPPMRVYEVATFYTMYNRKPVGKYHIQVCTTTPCMLRNSDSILEAIQKKLGIKVGETTPDKLFTLIEVECLGACVNAPMVQINDNYYEDLTAKDIEEIIDELKAGKIPKPGPRSGRFSCEPAGGLTSLTEPPKGPGFGVQAGL

SEQ ID NO: 55262 - protein, 252 aa, Homo sapiens
  Payload ID: 10904
  Gene Symbol: NDUFV2
  Gene Name: NADH dehydrogenase (ubiquinone) flavoprotein 2, 24kDa
  ENSP ID: ENSP00000382908
MRSHPLLLETLQTICFYKNGKGRHVRNLHKTVMQNGAGGALFVHRDTPENNPDTPFDFTPENYKRIEAIVKNYPEGHKAAAVLPVLDLAQRQNGWLPISAMNKVAEVLQVPPMRVYEVATFYTMYNRKPVGKYHIQVCTTTPCMLRNSDSILEAIQKKLGIKVGETTPDKLFTLIEVECLGACVNAPMVQINDNYYEDLTAKDIEEIIDELKAGKIPKPGPRSGRFSCEPAGGLTSLTEPPKGPGFGVQAGL

SEQ ID NO: 55263 - protein, 39 aa, Homo sapiens
  Payload ID: 10904
  Gene Symbol: NDUFV2
  Gene Name: NADH dehydrogenase (ubiquinone) flavoprotein 2, 24kDa
  ENSP ID: ENSP00000461911
MFFSAALRARAAGLTAHWVRRLKLSPALPPPFSCSPCLP

SEQ ID NO: 55264 - protein, 21 aa, Homo sapiens
  Payload ID: 10904
  Gene Symbol: NDUFV2
  Gene Name: NADH dehydrogenase (ubiquinone) flavoprotein 2, 24kDa
  ENSP ID: ENSP00000464504
MFFSAALRARAAGLTAHWRRI

SEQ ID NO: 55265 - protein, 108 aa, Homo sapiens
  Payload ID: 10905
  Gene Symbol: NDUFV3
  Gene Name: NADH dehydrogenase (ubiquinone) flavoprotein 3, 10kDa
  Uniprot ID: P56181
  ENSP ID: ENSP00000342895
MAAPCLLRQGRAGALKTMLQEAQVFRGLASTVSLSAESGKSEKGQPQNSKKQSPPKKPAPVPAEPFDNTTYKNLQHHDYSTYTFLDLNLELSKFRMPQPSSGRESPRH

SEQ ID NO: 55266 - protein, 473 aa, Homo sapiens
  Payload ID: 10905
  Gene Symbol: NDUFV3
  Gene Name: NADH dehydrogenase (ubiquinone) flavoprotein 3, 10kDa
  Uniprot ID: P56181
  ENSP ID: ENSP00000346196
MAAPCLLRQGRAGALKTMLQEAQVFRGLASTVSLSAESGKSEKGQPQNSKKQSPPKNVVEPKERGKLLATQTAAELSKNLSSPSSYPPAVNKGRKVASPSPSGSVLFTDEGVPKFLSRKTLVEFPQKVLSPFRKQGSDSEARQVGRKVTSPSSSSSSSSSDSESDDEADVSEVTPRVVSKGRGGLRKPEASHSFENRAPRVTVSAKEKTLLQKPHVDITDPEKPHQPKKKGSPAKPSEGRENARPKTTMPRSQVDEEFLKQSLKEKQLQKTFRLNEIDKESQKPFEVKGPLPVHTKSGLSAPPKGSPAPAVLAEEARAEGQLQASPPGAAEGHLEKPVPEPQRKAAPPLPRKETSGTQGIEGHLKGGQAIVEDQIPPSNLETVPVENNHGFHEKTAALKLEAEGEAMEDAAAPGDDRGGTQEPAPVPAEPFDNTTYKNLQHHDYSTYTFLDLNLELSKFRMPQPSSGRESPRH

SEQ ID NO: 55267 - protein, 133 aa, Homo sapiens; identical to SEQ ID NO: 55008
  Payload ID: 10906
  Gene Symbol: NDUFA10
  Gene Name: NADH dehydrogenase [ubiquinone] 1 alpha subcomplex subunit 10, mitochondrial
  ENSP ID: ENSP00000485694
  MOD_RES (1)..(1): Any amino acid

SEQ ID NO: 55268 - protein, 355 aa, Homo sapiens; identical to SEQ ID NO: 55012
  Payload ID: 10906
  Gene Symbol: NDUFA10
  Gene Name: NADH dehydrogenase [ubiquinone] 1 alpha subcomplex subunit 10, mitochondrial
  ENSP ID: ENSP00000485839

SEQ ID NO: 55269 - protein, 244 aa, Homo sapiens; identical to SEQ ID NO: 55011
  Payload ID: 10906
  Gene Symbol: NDUFA10
  Gene Name: NADH dehydrogenase [ubiquinone] 1 alpha subcomplex subunit 10, mitochondrial
  ENSP ID: ENSP00000486057

SEQ ID NO: 55270 - protein, 390 aa, Homo sapiens; identical to SEQ ID NO: 55006
  Payload ID: 10906
  Gene Symbol: NDUFA10
  Gene Name: NADH dehydrogenase [ubiquinone] 1 alpha subcomplex subunit 10, mitochondrial
  ENSP ID: ENSP00000486091

SEQ ID NO: 55271 - protein, 129 aa, Homo sapiens; identical to SEQ ID NO: 55009
  Payload ID: 10906
  Gene Symbol: NDUFA10
  Gene Name: NADH dehydrogenase [ubiquinone] 1 alpha subcomplex subunit 10, mitochondrial
  ENSP ID: ENSP00000486296

SEQ ID NO: 55272 - protein, 201 aa, Homo sapiens; identical to SEQ ID NO: 55005
  Payload ID: 10906
  Gene Symbol: NDUFA10
  Gene Name: NADH dehydrogenase [ubiquinone] 1 alpha subcomplex subunit 10, mitochondrial
  ENSP ID: ENSP00000486593

SEQ ID NO: 55273 - protein, 355 aa, Homo sapiens; identical to SEQ ID NO: 55003
  Payload ID: 10906
  Gene Symbol: NDUFA10
  Gene Name: NADH dehydrogenase [ubiquinone] 1 alpha subcomplex subunit 10, mitochondrial
  ENSP ID: ENSP00000486639

SEQ ID NO: 55274 - protein, 138 aa, Homo sapiens; identical to SEQ ID NO: 55010
  Payload ID: 10906
  Gene Symbol: NDUFA10
  Gene Name: NADH dehydrogenase [ubiquinone] 1 alpha subcomplex subunit 10, mitochondrial
  ENSP ID: ENSP00000486728

SEQ ID NO: 55275 - protein, 94 aa, Homo sapiens; identical to SEQ ID NO: 55007
  Payload ID: 10906
  Gene Symbol: NDUFA10
  Gene Name: NADH dehydrogenase [ubiquinone] 1 alpha subcomplex subunit 10, mitochondrial
  ENSP ID: ENSP00000487201

SEQ ID NO: 55276 - protein, 429 aa, Homo sapiens; identical to SEQ ID NO: 55004
  Payload ID: 10906
  Gene Symbol: NDUFA10
  Gene Name: NADH dehydrogenase [ubiquinone] 1 alpha subcomplex subunit 10, mitochondrial
  ENSP ID: ENSP00000487517

SEQ ID NO: 55277 - protein, 113 aa, Homo sapiens; identical to SEQ ID NO: 55086
  Payload ID: 10907
  Gene Symbol:
  Gene Name: NADH dehydrogenase [ubiquinone] 1 alpha subcomplex subunit 7  [Source:UniProtKB/Swiss-Prot
  Acc:O95182]
  Uniprot ID: O95182
  ENSP ID: ENSP00000470609

SEQ ID NO: 55278 - protein, 359 aa, Homo sapiens
  Payload ID: 10908
  Gene Symbol: NOXRED1
  Gene Name: NADP-dependent oxidoreductase domain containing 1
  Uniprot ID: Q6NXP6
  ENSP ID: ENSP00000370215
MDMLQDLESLQFEYGVPEEDRIWLYLQGRSRGLMIEACAHATFFCKLLYNLRASLNKNQSSRHLSIGSLNSATPEEFKVGIIGGGHLGKQLAGTLLQLGPIPAESLRISTRRPETLGELQKLGIKCFYHNADLVSWADVIFLCCLPSQLPNICVEIYTSLEKASIVYSFVAAIPLPRLKLLLNHTNILRPQYQYDEDSVSVWGANKGVIAALQDPTILQATCPYSPAGGIILNIKWLEGVFYAALNICTARNMAHSQVLQLLSELFLSVHFEDCGKDTASCPKLQLTDFVSKAYGKNLSQERPFPWFDLTAVQLKETPFSQHLSSSPVLQDHLTHLYCASFGISLTKEQPVISTGFPSQ

SEQ ID NO: 55279 - protein, 223 aa, Homo sapiens
  Payload ID: 10908
  Gene Symbol: NOXRED1
  Gene Name: NADP-dependent oxidoreductase domain containing 1
  ENSP ID: ENSP00000450597
MDMLQDLESLQFEYGVPEEDRIWLYLQGRSRGLMIEACAHATFFCKLLYNLRASLNKNQSSRHLSIGSLNSATPEEFKVGIIGGGHLGKQLAGTLLQLGPIPAESLRISTRRPETLGELQKLGIKCFYHNADLVSWADVIFLCCLPSQLPNICVEIYTSLEKASIVYSFVAAIPLPRLKLLLNHTNILRPQYQYDEDSVSVWGANKGVIAALQDPTILQATCP

SEQ ID NO: 55280 - protein, 597 aa, Homo sapiens
  Payload ID: 10909
  Gene Symbol: NDOR1
  Gene Name: NADPH dependent diflavin oxidoreductase 1
  Uniprot ID: Q9UHB4
  ENSP ID: ENSP00000343344
MPSPQLLVLFGSQTGTAQDVSERLGREARRRRLGCRVQALDSYPVVNLINEPLVIFVCATTGQGDPPDNMKNFWRFIFRKNLPSTALCQMDFAVLGLGDSSYAKFNFVAKKLHRRLLQLGGSALLPVCLGDDQHELGPDAAVDPWLRDLWDRVLGLYPPPPGLTEIPPGVPLPSKFTLLFLQEAPSTGSEGQRVAHPGSQEPPSESKPFLAPMISNQRVTGPSHFQDVRLIEFDILGSGISFAAGDVVLIQPSNSAAHVQRFCQVLGLDPDQLFMLQPREPDVSSPTRLPQPCSMRHLVSHYLDIASVPRRSFFELLACLSLHELEREKLLEFSSAQGQEELFEYCNRPRRTILEVLCDFPHTAAAIPPDYLLDLIPVIRPRAFSIASSLLTHPSRLQILVAVVQFQTRLKEPRRGLCSSWLASLDPGQGPVRVPLWVRPGSLAFPETPDTPVIMVGPGTGVAPFRAAIQERVAQGQTGNFLFFGCRWRDQDFYWEAEWQELEKRDCLTLIPAFSREQEQKVYVQHRLRELGSLVWELLDRQGAYFYLAGNAKSMPADVSEALMSIFQEEGGLCSPDAAAYLARLQQTRRFQTETWA

SEQ ID NO: 55281 - protein, 606 aa, Homo sapiens
  Payload ID: 10909
  Gene Symbol: NDOR1
  Gene Name: NADPH dependent diflavin oxidoreductase 1
  Uniprot ID: Q9UHB4
  ENSP ID: ENSP00000360576
MPSPQLLVLFGSQTGTAQDVSERLGREARRRRLGCRVQALDSYPVVNLINEPLVIFVCATTGQGDPPDNMKNFWRFIFRKNLPSTALCQMDFAVLGLGDSSYAKFNFVAKKLHRRLLQLGGSALLPVCLGDDQHELGPDAAVDPWLRDLWDRVLGLYPPPPGLTEIPPGVPLPSKFTLLFLQEAPSTGSEGQRVAHPGSQEPPSESKPFLAPMISNQRVTGPSHFQDVRLIEFDILGSGISFAAGDVVLIQPSNSAAHVQRFCQVLGLDPDQLFMLQPREPDVSSPTRLPQPCSMRHLVSHYLDIASVPRRSFFELLACLSLHELEREKLLEFSSAQGQEELFEYCNRPRRTILEVLCDFPHTAAAIPPDYLLDLIPVIRPRAFSIASSLLTHPSRLQILVAVVQFQTRLKEPRRGLCSSWLASLDPGQGPVRVPLWVRPGSLAFPETPDTPVIMVGPGTGVAPFRAAIQERVAQGQTGNFLFFGCRWRDQDFYWEAEWQELEKRDCLTLIPAFSREQPPALFSALQEQKVYVQHRLRELGSLVWELLDRQGAYFYLAGNAKSMPADVSEALMSIFQEEGGLCSPDAAAYLARLQQTRRFQTETWA

SEQ ID NO: 55282 - protein, 590 aa, Homo sapiens
  Payload ID: 10909
  Gene Symbol: NDOR1
  Gene Name: NADPH dependent diflavin oxidoreductase 1
  Uniprot ID: Q9UHB4
  ENSP ID: ENSP00000389905
MPSPQLLVLFGSQTGTAQDVSERLGREARRRRLGCRVQALDSYPVVNLINEPLVIFVCATTGQGDPPDNMKNFWRFIFRKNLPSTALCQMDFAVLGLGDSSYAKFNFVAKKLHRRLLQLGGSALLPVCLGDDQHELGPDAAVDPWLRDLWDRVLGLYPPPPGLTEIPPGVPLPSKFTLLFLQEAPSTGSEGQRVAHPGSQEPPSESKPFLAPMISNQRVTGPSHFQDVRLIEFDILGSGISFAAGDVVLIQPSNSAAHVQRFCQVLGLDPDQLFMLQPREPDVSSPTRLPQPCSMRHLVSHYLDIASVPRRSFFELLACLSLHELEREKLLEFSSAQGQEELFEYCNRPRRTILEVLCDFPHTAAAIPPDYLLDLIPVIRPRAFSIASSLLILVAVVQFQTRLKEPRRGLCSSWLASLDPGQGPVRVPLWVRPGSLAFPETPDTPVIMVGPGTGVAPFRAAIQERVAQGQTGNFLFFGCRWRDQDFYWEAEWQELEKRDCLTLIPAFSREQEQKVYVQHRLRELGSLVWELLDRQGAYFYLAGNAKSMPADVSEALMSIFQEEGGLCSPDAAAYLARLQQTRRFQTETWA

SEQ ID NO: 55283 - protein, 521 aa, Homo sapiens
  Payload ID: 10909
  Gene Symbol: NDOR1
  Gene Name: NADPH dependent diflavin oxidoreductase 1
  Uniprot ID: Q9UHB4
  ENSP ID: ENSP00000394309
MPSPQLLVLFGSQTGTAQDVSERLGREARRRRLGCRVQALDSYPVVNLINEPLVIFVCATTGQGDPPDNMKNFWRFIFRKNLPSTALCQMDFAVLGLGDSSYAKFNFVAKKLHRRLLQLGGSALLPVCLGDDQHELGLPSKFTLLFLQEAPSTGSEGQRVAHPGSQEPPSESKPFLAPMISNQRVTGPSHFQDVRLIEFDILGSGISFAAGDVVLIQPSNSAAHVQRFCQVLGLDPDQLFMLQPREPDVSSPTRLPQPCSMRHLVSHYLDIASVPRRSFFELLACLSLHELEREKLLEFSSAQGQEELFEYCNRPRRTILEVLCDFPHTAAAIPPDYLLDLIPVIRPRAFSIASSLLTHPSRLQILVAVVQFQTRLKEPRRGLCSSWLASLDPGQGPVRVPLWVRPGSLAFPETPDTPVIMVGPGTGVAPFRAAIQERVAQGQTGNFLFFGCRWRDQDFYWEAEWQELEKRDCLTLIPAFSREQEQKVYVQHRLRELGSLVWELLDRQATPSPCQRTSRKP

SEQ ID NO: 55284 - protein, 515 aa, Homo sapiens
  Payload ID: 10910
  Gene Symbol: NOX1
  Gene Name: NADPH oxidase 1
  Uniprot ID: Q9Y5S8
  ENSP ID: ENSP00000217885
MGNWVVNHWFSVLFLVVWLGLNVFLFVDAFLKYEKADKYYYTRKILGSTLACARASALCLNFNSTLILLPVCRNLLSFLRGTCSFCSRTLRKQLDHNLTFHKLVAYMICLHTAIHIIAHLFNFDCYSRSRQATDGSLASILSSLSHDEKKGGSWLNPIQSRNTTVEYVTFTSIAGLTGVIMTIALILMVTSATEFIRRSYFEVFWYTHHLFIFYILGLGIHGIGGIVRGQTEESMNESHPRKCAESFEMWDDRDSHCRRPKFEGHPPESWKWILAPVILYICERILRFYRSQQKVVITKVVMHPSKVLELQMNKRGFSMEVGQYIFVNCPSISLLEWHPFTLTSAPEEDFFSIHIRAAGDWTENLIRAFEQQYSPIPRIEVDGPFGTASEDVFQYEVAVLVGAGIGVTPFASILKSIWYKFQCADHNLKTKKVGHAALNFDKATDIVTGLKQKTSFGRPMWDNEFSTIATSHPKSVVGVFLCGPRTLAKSLRKCCHRYSSLDPRKVQFYFNKENF

SEQ ID NO: 55285 - protein, 527 aa, Homo sapiens
  Payload ID: 10910
  Gene Symbol: NOX1
  Gene Name: NADPH oxidase 1
  ENSP ID: ENSP00000362051
MGNWVVNHWFSVLFLVVWLGLNVFLFVDAFLKYEKADKYYYTRKILGFCSRTLRKQLDHNLTFHKLVAYMICLHTAIHIIAHLFNFDCYSRSRQATDGSLASILSSLSHDEKKGGSWLNPIQSRNTTVEYVTFTSIAGLTGVIMTIALILMVTSATEFIRRSYFEVFWYTHHLFIFYILGLGIHGIGGIVRGQTEESMNESHPRKCAESFEMWDDRDSHCRRPKFEGHPPESWKWILAPVILYICERILRFYRSQQKVVITKVVMHPSKVLELQMNKRGFSMEVGQYIFVNCPSISLLEWHPFTLTSAPEEDFFSIHIRAAGDWTENLIRAFEQQYSPIPRIEVDGPFGTASEDVFQYEVAVLVGAGIGVTPFASILKSIWYKFQCADHNLKTKKIYFYWICRETGAFSWFNNLLTSLEQEMEELGKVGFLNYRLFLTGWDSNIVGHAALNFDKATDIVTGLKQKTSFGRPMWDNEFSTIATSHPKSVVGVFLCGPRTLAKSLRKCCHRYSSLDPRKVQFYFNKENF

SEQ ID NO: 55286 - protein, 192 aa, Homo sapiens
  Payload ID: 10910
  Gene Symbol: NOX1
  Gene Name: NADPH oxidase 1
  ENSP ID: ENSP00000362055
MGNWVVNHWFSVLFLVVWLGLNVFLFVDAFLKYEKADKYYYTRKILGSTLACARASALCLNFNSTLILLPVCRNLLSFLRGTCSFCSRTLRKQLDHNLTFHKLVAYMICLHTAIHIIAHLFNFDCYSRSRQATDGSLASILSSLSHDEKKGGSWLNPIHPHITPTVYMFTVTFDMVLSSVNSNLFLFLLIKK

SEQ ID NO: 55287 - protein, 564 aa, Homo sapiens
  Payload ID: 10910
  Gene Symbol: NOX1
  Gene Name: NADPH oxidase 1
  Uniprot ID: Q9Y5S8
  ENSP ID: ENSP00000362057
MGNWVVNHWFSVLFLVVWLGLNVFLFVDAFLKYEKADKYYYTRKILGSTLACARASALCLNFNSTLILLPVCRNLLSFLRGTCSFCSRTLRKQLDHNLTFHKLVAYMICLHTAIHIIAHLFNFDCYSRSRQATDGSLASILSSLSHDEKKGGSWLNPIQSRNTTVEYVTFTSIAGLTGVIMTIALILMVTSATEFIRRSYFEVFWYTHHLFIFYILGLGIHGIGGIVRGQTEESMNESHPRKCAESFEMWDDRDSHCRRPKFEGHPPESWKWILAPVILYICERILRFYRSQQKVVITKVVMHPSKVLELQMNKRGFSMEVGQYIFVNCPSISLLEWHPFTLTSAPEEDFFSIHIRAAGDWTENLIRAFEQQYSPIPRIEVDGPFGTASEDVFQYEVAVLVGAGIGVTPFASILKSIWYKFQCADHNLKTKKIYFYWICRETGAFSWFNNLLTSLEQEMEELGKVGFLNYRLFLTGWDSNIVGHAALNFDKATDIVTGLKQKTSFGRPMWDNEFSTIATSHPKSVVGVFLCGPRTLAKSLRKCCHRYSSLDPRKVQFYFNKENF

SEQ ID NO: 55288 - protein, 175 aa, Homo sapiens
  Payload ID: 10910
  Gene Symbol: NOX1
  Gene Name: NADPH oxidase 1
  ENSP ID: ENSP00000396992
  MOD_RES (1)..(1): Any amino acid
XFSMEVGQYIFVNCPSISLLEWHPFTLTSAPEEDFFSIHIRAAGDWTENLIRAFEQQYSPIPRIEVDGPFGTASEDVFQYEVAVLVGAGIGVTPFASILKSIWYKFQCADHNLKTKKIYFYWICRETGAFSWFNNLLTSLEQEMEELGKSLRKCCHRYSSLDPRKVQFYFNKENF

SEQ ID NO: 55289 - protein, 568 aa, Homo sapiens
  Payload ID: 10911
  Gene Symbol: NOX3
  Gene Name: NADPH oxidase 3
  Uniprot ID: Q9HBY0
  ENSP ID: ENSP00000159060
MMGCWILNEGLSTILVLSWLGINFYLFIDTFYWYEEEESFHYTRVILGSTLAWARASALCLNFNCMLILIPVSRNLISFIRGTSICCRGPWRRQLDKNLRFHKLVAYGIAVNATIHIVAHFFNLERYHWSQSEEAQGLLAALSKLGNTPNESYLNPVRTFPTNTTTELLRTIAGVTGLVISLALVLIMTSSTEFIRQASYELFWYTHHVFIVFFLSLAIHGTGRIVRGQTQDSLSLHNITFCRDRYAEWQTVAQCPVPQFSGKEPSAWKWILGPVVLYACERIIRFWRFQQEVVITKVVSHPSGVLELHMKKRGFKMAPGQYILVQCPAISSLEWHPFTLTSAPQEDFFSVHIRAAGDWTAALLEAFGAEGQALQEPWSLPRLAVDGPFGTALTDVFHYPVCVCVAAGIGVTPFAALLKSIWYKCSEAQTPLKLSKVYFYWICRDARAFEWFADLLLSLETRMSEQGKTHFLSYHIFLTGWDENQALHIALHWDENTDVITGLKQKTFYGRPNWNNEFKQIAYNHPSSSIGVFFCGPKALSRTLQKMCHLYSSADPRGVHFYYNKESF

SEQ ID NO: 55290 - protein, 578 aa, Homo sapiens
  Payload ID: 10912
  Gene Symbol: NOX4
  Gene Name: NADPH oxidase 4
  Uniprot ID: Q9NPH5
  ENSP ID: ENSP00000263317
MAVSWRSWLANEGVKHLCLFIWLSMNVLLFWKTFLLYNQGPEYHYLHQMLGLGLCLSRASASVLNLNCSLILLPMCRTLLAYLRGSQKVPSRRTRRLLDKSRTFHITCGVTICIFSGVHVAAHLVNALNFSVNYSEDFVELNAARYRDEDPRKLLFTTVPGLTGVCMVVVLFLMITASTYAIRVSNYDIFWYTHNLFFVFYMLLTLHVSGGLLKYQTNLDTHPPGCISLNRTSSQNISLPEYFSEHFHEPFPEGFSKPAEFTQHKFVKICMEEPRFQANFPQTWLWISGPLCLYCAERLYRYIRSNKPVTIISVMSHPSDVMEIRMVKENFKARPGQYITLHCPSVSALENHPFTLTMCPTETKATFGVHLKIVGDWTERFRDLLLPPSSQDSEILPFIQSRNYPKLYIDGPFGSPFEESLNYEVSLCVAGGIGVTPFASILNTLLDDWKPYKLRRLYFIWVCRDIQSFRWFADLLCMLHNKFWQENRPDYVNIQLYLSQTDGIQKIIGEKYHALNSRLFIGRPRWKLLFDEIAKYNRGKTVGVFCCGPNSLSKTLHKLSNQNNSYGTRFEYNKESFS

SEQ ID NO: 55291 - protein, 554 aa, Homo sapiens
  Payload ID: 10912
  Gene Symbol: NOX4
  Gene Name: NADPH oxidase 4
  Uniprot ID: Q9NPH5
  ENSP ID: ENSP00000344747
MNVLLFWKTFLLYNQGPEYHYLHQMLGLGLCLSRASASVLNLNCSLILLPMCRTLLAYLRGSQKVPSRRTRRLLDKSRTFHITCGVTICIFSGVHVAAHLVNALNFSVNYSEDFVELNAARYRDEDPRKLLFTTVPGLTGVCMVVVLFLMITASTYAIRVSNYDIFWYTHNLFFVFYMLLTLHVSGGLLKYQTNLDTHPPGCISLNRTSSQNISLPEYFSEHFHEPFPEGFSKPAEFTQHKFVKICMEEPRFQANFPQTWLWISGPLCLYCAERLYRYIRSNKPVTIISVMSHPSDVMEIRMVKENFKARPGQYITLHCPSVSALENHPFTLTMCPTETKATFGVHLKIVGDWTERFRDLLLPPSSQDSEILPFIQSRNYPKLYIDGPFGSPFEESLNYEVSLCVAGGIGVTPFASILNTLLDDWKPYKLRRLYFIWVCRDIQSFRWFADLLCMLHNKFWQENRPDYVNIQLYLSQTDGIQKIIGEKYHALNSRLFIGRPRWKLLFDEIAKYNRGKTVGVFCCGPNSLSKTLHKLSNQNNSYGTRFEYNKESFS

SEQ ID NO: 55292 - protein, 271 aa, Homo sapiens
  Payload ID: 10912
  Gene Symbol: NOX4
  Gene Name: NADPH oxidase 4
  Uniprot ID: Q9NPH5
  ENSP ID: ENSP00000365146
MAVSWRSWLANEGVKHLCLFIWLSMNVLLFWKTFLLYNQGPEYHYLHQMLGCPTETKATFGVHLKIVGDWTERFRDLLLPPSSQDSEILPFIQSRNYPKLYIDGPFGSPFEESLNYEVSLCVAGGIGVTPFASILNTLLDDWKPYKLRRLYFIWVCRDIQSFRWFADLLCMLHNKFWQENRPDYVNIQLYLSQTDGIQKIIGEKYHALNSRLFIGRPRWKLLFDEIAKYNRGKTVGVFCCGPNSLSKTLHKLSNQNNSYGTRFEYNKESFS

SEQ ID NO: 55293 - protein, 54 aa, Homo sapiens
  Payload ID: 10912
  Gene Symbol: NOX4
  Gene Name: NADPH oxidase 4
  Uniprot ID: Q9NPH5
  ENSP ID: ENSP00000376961
MAVSWRSWLANEGVKHLCLFIWLSMNVLLFWKTFLLYNQGPEYHYLHQMLGELS

SEQ ID NO: 55294 - protein, 554 aa, Homo sapiens; identical to SEQ ID NO: 55291
  Payload ID: 10912
  Gene Symbol: NOX4
  Gene Name: NADPH oxidase 4
  Uniprot ID: Q9NPH5
  ENSP ID: ENSP00000412446

SEQ ID NO: 55295 - protein, 554 aa, Homo sapiens; identical to SEQ ID NO: 55291
  Payload ID: 10912
  Gene Symbol: NOX4
  Gene Name: NADPH oxidase 4
  Uniprot ID: Q9NPH5
  ENSP ID: ENSP00000433797

SEQ ID NO: 55296 - protein, 514 aa, Homo sapiens
  Payload ID: 10912
  Gene Symbol: NOX4
  Gene Name: NADPH oxidase 4
  Uniprot ID: Q9NPH5
  ENSP ID: ENSP00000434924
MNVLLFWKTFLLYNQGPEYHYLHQMLGLGLCLSRASASVLNLNCSLILLPMCRTLLAYLRGSQKVPSRRTRRLLDKSRTFHITCGVTICIFSGVHVAAHLVNALNFSVNYSEDFVELNAARYRDEDPRKLLFTTVPGLTGVCMVVVLFLMITASTYAIRVSNYDIFWYTHNLFFVFYMLLTLHVSGGLLKYQTNLDTHPPGCISLNRTSSQNISLPEYFSEHFHEPFPEGFSKPAEFTQHKFVKICMEEPRFQANFPQTWLWISGPLCLYCAERLYRYIRSNKPVTIISVMSHPSDVMEIRMVKENFKARPGQYITLHCPSVSALENHPFTLTMCPTETKATFGVHLKIVGDWTERFRDLLLPPSSQDSEILPFIQSRNYPKDDWKPYKLRRLYFIWVCRDIQSFRWFADLLCMLHNKFWQENRPDYVNIQLYLSQTDGIQKIIGEKYHALNSRLFIGRPRWKLLFDEIAKYNRGKTVGVFCCGPNSLSKTLHKLSNQNNSYGTRFEYNKESFS

SEQ ID NO: 55297 - protein, 231 aa, Homo sapiens
  Payload ID: 10912
  Gene Symbol: NOX4
  Gene Name: NADPH oxidase 4
  Uniprot ID: Q9NPH5
  ENSP ID: ENSP00000435039
MAVSWRSWLANEGVKHLCLFIWLSMNVLLFWKTFLLYNQGPEYHYLHQMLGCPTETKATFGVHLKIVGDWTERFRDLLLPPSSQDSEILPFIQSRNYPKDDWKPYKLRRLYFIWVCRDIQSFRWFADLLCMLHNKFWQENRPDYVNIQLYLSQTDGIQKIIGEKYHALNSRLFIGRPRWKLLFDEIAKYNRGKTVGVFCCGPNSLSKTLHKLSNQNNSYGTRFEYNKESFS

SEQ ID NO: 55298 - protein, 224 aa, Homo sapiens
  Payload ID: 10912
  Gene Symbol: NOX4
  Gene Name: NADPH oxidase 4
  Uniprot ID: Q9NPH5
  ENSP ID: ENSP00000435474
MAVSWRSWLANEGVKHLCLFIWLSMNVLLFWKTFLLYNQGPEYHYLHQMLGLGLCLSRASASVLNLNCSLILLPMCRTLLAYLRGSQKVPSRRTRRLLDKSRTFHITCGVTICIFSGVHVAAHLVNALNFSVNYSEDFVELNAARYRDEDPRKLLFTTVPGLTGVCMVVVLFLMITASTYAIRVSNYDIFWYTHNLFFVFYMLLTLHVSGVQLKPKQHLGFILK

SEQ ID NO: 55299 - protein, 391 aa, Homo sapiens
  Payload ID: 10912
  Gene Symbol: NOX4
  Gene Name: NADPH oxidase 4
  ENSP ID: ENSP00000436093
MVVVLFLMITASTYAIRVSNYDIFWYTHNLFFVFYMLLTLHVSGGLLKYQTNLDTHPPGCISLNRTSSQNISLPEYFSEHFHEPFPEGFSKPAEFTQHKFVKICMEEPRFQANFPQTWLWISGPLCLYCAERLYRYIRSNKPVTIISVMSHPSDVMEIRMVKENFKARPGQYITLHCPSVSALENHPFTLTMCPTETKATFGVHLKIVGDWTERFRDLLLPPSSQDSEILPFIQSRNYPKLYIDGPFGSPFEESLNYEVSLCVAGGIGVTPFASILNTLLDDWKPYKLRRLYFIWFWQENRPDYVNIQLYLSQTDGIQKIIGEKYHALNSRLFIGRPRWKLLFDEIAKYNRGKTVGVFCCGPNSLSKTLHKLSNQNNSYGTRFEYNKESFS

SEQ ID NO: 55300 - protein, 342 aa, Homo sapiens
  Payload ID: 10912
  Gene Symbol: NOX4
  Gene Name: NADPH oxidase 4
  ENSP ID: ENSP00000436716
MAVSWRSWLANEGVKHLCLFIWLSMNVLLFWKTFLLYNQGPEYHYLHQMLGLGLCLSRASASVLNLNCSLILLPMCRTLLAYLRGSQKVPSRRTRRLLDKSRTFHITCGVTICIFSGVHVAAHLVNALNFSVNYSEDFVELNAARYRDEDPRKLLFTTVPGLTGVCMVVVLFLMITASTYAIRVSNYDIFWYTHNLFFVFYMLLTLHVSGDDWKPYKLRRLYFIWVCRDIQSFRWFADLLCMLHNKFWQENRPDYVNIQLYLSQTDGIQKIIGEKYHALNSRLFIGRPRWKLLFDEIAKYNRGKTVGVFCCGPNSLSKTLHKLSNQNNSYGTRFEYNKESFS

SEQ ID NO: 55301 - protein, 538 aa, Homo sapiens
  Payload ID: 10912
  Gene Symbol: NOX4
  Gene Name: NADPH oxidase 4
  Uniprot ID: Q9NPH5
  ENSP ID: ENSP00000436892
MAVSWRSWLANEGVKHLCLFIWLSMNVLLFWKTFLLYNQGPEYHYLHQMLGLGLCLSRASASVLNLNCSLILLPMCRTLLAYLRGSQKVPSRRTRRLLDKSRTFHITCGVTICIFSGVHVAAHLVNALNFSVNYSEDFVELNAARYRDEDPRKLLFTTVPGLTGVCMVVVLFLMITASTYAIRVSNYDIFWYTHNLFFVFYMLLTLHVSGGLLKYQTNLDTHPPGCISLNRTSSQNISLPEYFSEHFHEPFPEGFSKPAEFTQHKFVKICMEEPRFQANFPQTWLWISGPLCLYCAERLYRYIRSNKPVTIISVMSHPSDVMEIRMVKENFKARPGQYITLHCPSVSALENHPFTLTMCPTETKATFGVHLKIVGDWTERFRDLLLPPSSQDSEILPFIQSRNYPKDDWKPYKLRRLYFIWVCRDIQSFRWFADLLCMLHNKFWQENRPDYVNIQLYLSQTDGIQKIIGEKYHALNSRLFIGRPRWKLLFDEIAKYNRGKTVGVFCCGPNSLSKTLHKLSNQNNSYGTRFEYNKESFS

SEQ ID NO: 55302 - protein, 553 aa, Homo sapiens
  Payload ID: 10912
  Gene Symbol: NOX4
  Gene Name: NADPH oxidase 4
  ENSP ID: ENSP00000436970
MLSAVTDLGSIESTVSKNLPVVSIHQLGLCLSRASASVLNLNCSLILLPMCRTLLAYLRGSQKVPSRRTRRLLDKSRTFHITCGVTICIFSGVHVAAHLVNALNFSVNYSEDFVELNAARYRDEDPRKLLFTTVPGLTGVCMVVVLFLMITASTYAIRVSNYDIFWYTHNLFFVFYMLLTLHVSGGLLKYQTNLDTHPPGCISLNRTSSQNISLPEYFSEHFHEPFPEGFSKPAEFTQHKFVKICMEEPRFQANFPQTWLWISGPLCLYCAERLYRYIRSNKPVTIISVMSHPSDVMEIRMVKENFKARPGQYITLHCPSVSALENHPFTLTMCPTETKATFGVHLKIVGDWTERFRDLLLPPSSQDSEILPFIQSRNYPKLYIDGPFGSPFEESLNYEVSLCVAGGIGVTPFASILNTLLDDWKPYKLRRLYFIWVCRDIQSFRWFADLLCMLHNKFWQENRPDYVNIQLYLSQTDGIQKIIGEKYHALNSRLFIGRPRWKLLFDEIAKYNRGKTVGVFCCGPNSLSKTLHKLSNQNNSYGTRFEYNKESFS

SEQ ID NO: 55303 - protein, 483 aa, Homo sapiens
  Payload ID: 10913
  Gene Symbol: NOXA1
  Gene Name: NADPH oxidase activator 1
  Uniprot ID: Q86UR1
  ENSP ID: ENSP00000342848
MASLGDLVRAWHLGAQAVDRGDWARALHLFSGVPAPPARLCFNAGCVHLLAGDPEAALRAFDQAVTKDTCMAVGFFQRGVANFQLARFQEALSDFWLALEQLRGHAAIDYTQLGLRFKLQAWEVLHNVASAQCQLGLWTEAASSLREAMSKWPEGSLNGLDSALDQVQRRGSLPPRQVPRGEVFRPHRWHLKHLEPVDFLGKAKVVASAIPDDQGWGVRPQQPQGPGANHDARSLIMDSPRAGTHQGPLDAETEVGADRCTSTAYQEQRPQVEQVGKQAPLSPGLPAMGGPGPGPCEDPAGAGGAGAGGSEPLVTVTVQCAFTVALRARRGADLSSLRALLGQALPHQAQLGQLSYLAPGEDGHWVPIPEEESLQRAWQDAAACPRGLQLQCRGAGGRPVLYQVVAQHSYSAQGPEDLGFRQGDTVDVLCEEPDVPLAVDQAWLEGHCDGRIGIFPKCFVVPAGPRMSGAPGRLPRSQQGDQP

SEQ ID NO: 55304 - protein, 427 aa, Homo sapiens
  Payload ID: 10913
  Gene Symbol: NOXA1
  Gene Name: NADPH oxidase activator 1
  Uniprot ID: Q86UR1
  ENSP ID: ENSP00000376562
MASLGDLVRAWHLGAQAVDRGDWARALHLFSGVPAPPARLCFNAGCVHLLAGDPEAALRAFDQAVTKDTCMAVGFFQRGVANFQLARFQEALSDFWLALEQLRGHAAIDYTQLGLRFKLQAWEVLHNVASAQCQLGLWTEAASSLREAMSKWPEGSLNGLDSALDQVQGPGANHDARSLIMDSPRAGTHQGPLDAETEVGADRCTSTAYQEQRPQVEQVGKQAPLSPGLPAMGGPGPGPCEDPAGAGGAGAGGSEPLVTVTVQCAFTVALRARRGADLSSLRALLGQALPHQAQLGQLSYLAPGEDGHWVPIPEEESLQRAWQDAAACPRGLQLQCRGAGGRPVLYQVVAQHSYSAQGPEDLGFRQGDTVDVLCEEPDVPLAVDQAWLEGHCDGRIGIFPKCFVVPAGPRMSGAPGRLPRSQQGDQP

SEQ ID NO: 55305 - protein, 370 aa, Homo sapiens
  Payload ID: 10914
  Gene Symbol: NOXO1
  Gene Name: NADPH oxidase organizer 1
  Uniprot ID: Q8NFA2
  ENSP ID: ENSP00000346195
MAGPRYPVSVQGAALVQIKRLQTFAFSVRWSDGSDTFVRRSWDEFRQLKTLKETFPVEAGLLRRSDRVLPKLLDAPLLGRVGRTSRGLARLQLLETYSRRLLATAERVARSPTITGFFAPQPLDLEPALPPGSRVILPTPEEQPLSRAAGRLSIHSLEAQSLRCLQPFCTQDTRDRPFQAQAQESLDVLLRHPSGWWLVENEDRQTAWFPAPYLEEAAPGQGREGGPSLGSSGPQFCASRAYESSRADELSVPAGARVRVLETSDRGWWLCRYGDRAGLLPAVLLRPEGLGALLSGTGFRGGDDPAGEARGFPEPSQATAPPPTVPTRPSPGAIQSRCCTVTRRALERRPRRQGRPRGCVDSVPHPTTEQ

SEQ ID NO: 55306 - protein, 371 aa, Homo sapiens
  Payload ID: 10914
  Gene Symbol: NOXO1
  Gene Name: NADPH oxidase organizer 1
  Uniprot ID: Q8NFA2
  ENSP ID: ENSP00000348435
MAGPRYPVSVQGAALVQIKRLQTFAFSVRWSDGSDTFVRRSWDEFRQLKKTLKETFPVEAGLLRRSDRVLPKLLDAPLLGRVGRTSRGLARLQLLETYSRRLLATAERVARSPTITGFFAPQPLDLEPALPPGSRVILPTPEEQPLSRAAGRLSIHSLEAQSLRCLQPFCTQDTRDRPFQAQAQESLDVLLRHPSGWWLVENEDRQTAWFPAPYLEEAAPGQGREGGPSLGSSGPQFCASRAYESSRADELSVPAGARVRVLETSDRGWWLCRYGDRAGLLPAVLLRPEGLGALLSGTGFRGGDDPAGEARGFPEPSQATAPPPTVPTRPSPGAIQSRCCTVTRRALERRPRRQGRPRGCVDSVPHPTTEQ

SEQ ID NO: 55307 - protein, 376 aa, Homo sapiens
  Payload ID: 10914
  Gene Symbol: NOXO1
  Gene Name: NADPH oxidase organizer 1
  Uniprot ID: Q8NFA2
  ENSP ID: ENSP00000380450
MAGPRYPVSVQGAALVQIKRLQTFAFSVRWSDGSDTFVRRSWDEFRQLKKTLKETFPVEAGLLRRSDRVLPKLLGQASLDAPLLGRVGRTSRGLARLQLLETYSRRLLATAERVARSPTITGFFAPQPLDLEPALPPGSRVILPTPEEQPLSRAAGRLSIHSLEAQSLRCLQPFCTQDTRDRPFQAQAQESLDVLLRHPSGWWLVENEDRQTAWFPAPYLEEAAPGQGREGGPSLGSSGPQFCASRAYESSRADELSVPAGARVRVLETSDRGWWLCRYGDRAGLLPAVLLRPEGLGALLSGTGFRGGDDPAGEARGFPEPSQATAPPPTVPTRPSPGAIQSRCCTVTRRALERRPRRQGRPRGCVDSVPHPTTEQ

SEQ ID NO: 55308 - protein, 76 aa, Homo sapiens
  Payload ID: 10914
  Gene Symbol: NOXO1
  Gene Name: NADPH oxidase organizer 1
  ENSP ID: ENSP00000454644
MAGPRYPVSVQGAALVQIKRLQTFAFSVRWSDGSDTFVRRSWDEFRQLKKTLKETFPVEAGLLRRSDRVLPKLLDA

SEQ ID NO: 55309 - protein, 375 aa, Homo sapiens
  Payload ID: 10914
  Gene Symbol: NOXO1
  Gene Name: NADPH oxidase organizer 1
  Uniprot ID: Q8NFA2
  ENSP ID: ENSP00000456800
MAGPRYPVSVQGAALVQIKRLQTFAFSVRWSDGSDTFVRRSWDEFRQLKTLKETFPVEAGLLRRSDRVLPKLLGQASLDAPLLGRVGRTSRGLARLQLLETYSRRLLATAERVARSPTITGFFAPQPLDLEPALPPGSRVILPTPEEQPLSRAAGRLSIHSLEAQSLRCLQPFCTQDTRDRPFQAQAQESLDVLLRHPSGWWLVENEDRQTAWFPAPYLEEAAPGQGREGGPSLGSSGPQFCASRAYESSRADELSVPAGARVRVLETSDRGWWLCRYGDRAGLLPAVLLRPEGLGALLSGTGFRGGDDPAGEARGFPEPSQATAPPPTVPTRPSPGAIQSRCCTVTRRALERRPRRQGRPRGCVDSVPHPTTEQ

SEQ ID NO: 55310 - protein, 765 aa, Homo sapiens
  Payload ID: 10915
  Gene Symbol: NOX5
  Gene Name: NADPH oxidase, EF-hand calcium binding domain 5
  Uniprot ID: Q96PH1
  ENSP ID: ENSP00000373518
MNTSGDPAQTGPEGCRGTMSAEEDARWLRWVTQQFKTIAGEDGEISLQEFKAALHVKESFFAERFFALFDSDRSGTITLQELQEALTLLIHGSPMDKLKFLFQVYDIDVCARQGASAGTEWGAGAGPHWASSPLGTGSGSIDPDELRTVLQSCLRESAISLPDEKLDQLTLALFESADADGNGAITFEELRDELQRFPGVMENLTISAAHWLTAPAPRPRPRRPRQLTRAYWHNHRSQLFCLATYAGLHVLLFGLAASAHRDLGASVMVAKGCGQCLNFDCSFIAVLMLRRCLTWLRATWLAQVLPLDQNIQFHQLMGYVVVGLSLVHTVAHTVNFVLQAQAEASPFQFWELLLTTRPGIGWVHGSASPTGVALLLLLLLMFICSSSCIRRSGHFEVFYWTHLSYLLVWLLLIFHGPNFWKWLLVPGILFFLEKAIGLAVSRMAAVCIMEVNLLPSKVTHLLIKRPPFFHYRPGDYLYLNIPTIARYEWHPFTISSAPEQKDTIWLHIRSQGQWTNRLYESFKASDPLGRGSKRLSRSVTMRKSQRSSKGSEILLEKHKFCNIKCYIDGPYGTPTRRIFASEHAVLIGAGIGITPFASILQSIMYRHQKRKHTCPSCQHSWIEGVQDNMKLHKVDFIWINRDQRSFEWFVSLLTKLEMDQAEEAQYGRFLELHMYMTSALGKNDMKAIGLQMALDLLANKEKKDSITGLQTRTQPGRPDWSKVFQKVAAEKKGKVQVFFCGSPALAKVLKGHCEKFGFRFFQENF

SEQ ID NO: 55311 - protein, 719 aa, Homo sapiens
  Payload ID: 10915
  Gene Symbol: NOX5
  Gene Name: NADPH oxidase, EF-hand calcium binding domain 5
  Uniprot ID: Q96PH1
  ENSP ID: ENSP00000410887
MSAEEDARWLRWVTQQFKTIAGEDGEISLQEFKAALHVKESFFAERFFALFDSDRSGTITLQELQEALTLLIHGSPMDKLKFLFQVYDIDGSGSIDPDELRTVLQSCLRESAISLPDEKLDQLTLALFESADADGNGAITFEELRDELQRFPGVMENLTISAAHWLTAPAPRPRPRRPRQLTRAYWHNHRSQLFCLATYAGLHVLLFGLAASAHRDLGASVMVAKGCGQCLNFDCSFIAVLMLRRCLTWLRATWLAQVLPLDQNIQFHQLMGYVVVGLSLVHTVAHTVNFVLQAQAEASPFQFWELLLTTRPGIGWVHGSASPTGVALLLLLLLMFICSSSCIRRSGHFEVFYWTHLSYLLVWLLLIFHGPNFWKWLLVPGILFFLEKAIGLAVSRMAAVCIMEVNLLPSKVTHLLIKRPPFFHYRPGDYLYLNIPTIARYEWHPFTISSAPEQKDTIWLHIRSQGQWTNRLYESFKASDPLGRGSKRLSRSVTMRKSQRSSKGSEILLEKHKFCNIKCYIDGPYGTPTRRIFASEHAVLIGAGIGITPFASILQSIMYRHQKRKHTCPSCQHSWIEGVQDNMKLHKVDFIWINRDQRSFEWFVSLLTKLEMDQAEEAQYGRFLELHMYMTSALGKNDMKAIGLQMALDLLANKEKKDSITGLQTRTQPGRPDWSKVFQKVAAEKKGKVQVFFCGSPALAKVLKGHCEKFGFRFFQENF

SEQ ID NO: 55312 - protein, 730 aa, Homo sapiens
  Payload ID: 10915
  Gene Symbol: NOX5
  Gene Name: NADPH oxidase, EF-hand calcium binding domain 5
  Uniprot ID: Q96PH1
  ENSP ID: ENSP00000416828
MAFVCAGLSDTMSAEEDARWLRWVTQQFKTIAGEDGEISLQEFKAALHVKESFFAERFFALFDSDRSGTITLQELQEALTLLIHGSPMDKLKFLFQVYDIDGSGSIDPDELRTVLQSCLRESAISLPDEKLDQLTLALFESADADGNGAITFEELRDELQRFPGVMENLTISAAHWLTAPAPRPRPRRPRQLTRAYWHNHRSQLFCLATYAGLHVLLFGLAASAHRDLGASVMVAKGCGQCLNFDCSFIAVLMLRRCLTWLRATWLAQVLPLDQNIQFHQLMGYVVVGLSLVHTVAHTVNFVLQAQAEASPFQFWELLLTTRPGIGWVHGSASPTGVALLLLLLLMFICSSSCIRRSGHFEVFYWTHLSYLLVWLLLIFHGPNFWKWLLVPGILFFLEKAIGLAVSRMAAVCIMEVNLLPSKVTHLLIKRPPFFHYRPGDYLYLNIPTIARYEWHPFTISSAPEQKDTIWLHIRSQGQWTNRLYESFKASDPLGRGSKRLSRSVTMRKSQRSSKGSEILLEKHKFCNIKCYIDGPYGTPTRRIFASEHAVLIGAGIGITPFASILQSIMYRHQKRKHTCPSCQHSWIEGVQDNMKLHKVDFIWINRDQRSFEWFVSLLTKLEMDQAEEAQYGRFLELHMYMTSALGKNDMKAIGLQMALDLLANKEKKDSITGLQTRTQPGRPDWSKVFQKVAAEKKGKVQVFFCGSPALAKVLKGHCEKFGFRFFQENF

SEQ ID NO: 55313 - protein, 737 aa, Homo sapiens
  Payload ID: 10915
  Gene Symbol: NOX5
  Gene Name: NADPH oxidase, EF-hand calcium binding domain 5
  Uniprot ID: Q96PH1
  ENSP ID: ENSP00000432440
MNTSGDPAQTGPEGCRGTMSAEEDARWLRWVTQQFKTIAGEDGEISLQEFKAALHVKESFFAERFFALFDSDRSGTITLQELQEALTLLIHGSPMDKLKFLFQVYDIDGSGSIDPDELRTVLQSCLRESAISLPDEKLDQLTLALFESADADGNGAITFEELRDELQRFPGVMENLTISAAHWLTAPAPRPRPRRPRQLTRAYWHNHRSQLFCLATYAGLHVLLFGLAASAHRDLGASVMVAKGCGQCLNFDCSFIAVLMLRRCLTWLRATWLAQVLPLDQNIQFHQLMGYVVVGLSLVHTVAHTVNFVLQAQAEASPFQFWELLLTTRPGIGWVHGSASPTGVALLLLLLLMFICSSSCIRRSGHFEVFYWTHLSYLLVWLLLIFHGPNFWKWLLVPGILFFLEKAIGLAVSRMAAVCIMEVNLLPSKVTHLLIKRPPFFHYRPGDYLYLNIPTIARYEWHPFTISSAPEQKDTIWLHIRSQGQWTNRLYESFKASDPLGRGSKRLSRSVTMRKSQRSSKGSEILLEKHKFCNIKCYIDGPYGTPTRRIFASEHAVLIGAGIGITPFASILQSIMYRHQKRKHTCPSCQHSWIEGVQDNMKLHKVDFIWINRDQRSFEWFVSLLTKLEMDQAEEAQYGRFLELHMYMTSALGKNDMKAIGLQMALDLLANKEKKDSITGLQTRTQPGRPDWSKVFQKVAAEKKGKVQVFFCGSPALAKVLKGHCEKFGFRFFQENF

SEQ ID NO: 55314 - protein, 747 aa, Homo sapiens
  Payload ID: 10915
  Gene Symbol: NOX5
  Gene Name: NADPH oxidase, EF-hand calcium binding domain 5
  Uniprot ID: Q96PH1
  ENSP ID: ENSP00000454143
MSAEEDARWLRWVTQQFKTIAGEDGEISLQEFKAALHVKESFFAERFFALFDSDRSGTITLQELQEALTLLIHGSPMDKLKFLFQVYDIDVCARQGASAGTEWGAGAGPHWASSPLGTGSGSIDPDELRTVLQSCLRESAISLPDEKLDQLTLALFESADADGNGAITFEELRDELQRFPGVMENLTISAAHWLTAPAPRPRPRRPRQLTRAYWHNHRSQLFCLATYAGLHVLLFGLAASAHRDLGASVMVAKGCGQCLNFDCSFIAVLMLRRCLTWLRATWLAQVLPLDQNIQFHQLMGYVVVGLSLVHTVAHTVNFVLQAQAEASPFQFWELLLTTRPGIGWVHGSASPTGVALLLLLLLMFICSSSCIRRSGHFEVFYWTHLSYLLVWLLLIFHGPNFWKWLLVPGILFFLEKAIGLAVSRMAAVCIMEVNLLPSKVTHLLIKRPPFFHYRPGDYLYLNIPTIARYEWHPFTISSAPEQKDTIWLHIRSQGQWTNRLYESFKASDPLGRGSKRLSRSVTMRKSQRSSKGSEILLEKHKFCNIKCYIDGPYGTPTRRIFASEHAVLIGAGIGITPFASILQSIMYRHQKRKHTCPSCQHSWIEGVQDNMKLHKVDFIWINRDQRSFEWFVSLLTKLEMDQAEEAQYGRFLELHMYMTSALGKNDMKAIGLQMALDLLANKEKKDSITGLQTRTQPGRPDWSKVFQKVAAEKKGKVQVFFCGSPALAKVLKGHCEKFGFRFFQENF

SEQ ID NO: 55315 - protein, 294 aa, Homo sapiens
  Payload ID: 10915
  Gene Symbol: NOX5
  Gene Name: NADPH oxidase, EF-hand calcium binding domain 5
  ENSP ID: ENSP00000455703
MENLTISAAHWLTAPAPRPRPRRPRQLTRAYWHNHRSQLFCLATYAGLHVLLFGLAASAHRDLGASVMVAKGCGQCLNFDCSFIAVLMLRRCLTWLRATWLAQVLPLDQNIQFHQLMGYVVVGLSLVHTVAHTVNFVLQAQAEASPFQFWELLLTTRPGIGWVHGSASPTGVALLLLLLLMFICSSSCIRRSGHFEVFYWTHLSYLLVWLLLIFHGPNFWKWLLVPGILFFLEKAIGLAVSRMAAVCIMEVNLLPSKTLSGCTFGPKASGQTGCMSPSRHQTHWAVVLRGCRGV

SEQ ID NO: 55316 - protein, 470 aa, Homo sapiens
  Payload ID: 10916
  Gene Symbol: NKD1
  Gene Name: naked cuticle homolog 1 (Drosophila)
  Uniprot ID: Q969G9
  ENSP ID: ENSP00000268459
MGKLHSKPAAVCKRRESPEGDSFAVSAAWARKGIEEWIGRQRCPGGVSGPRQLRLAGTIGRSTRELVGDVLRDTLSEEEEDDFRLEVALPPEKTDGLGSGDEKKMERVSEPCPGSKKQLKFEELQCDVSMEEDSRQEWTFTLYDFDNNGKVTREDITSLLHTIYEVVDSSVNHSPTSSKMLRVKLTVAPDGSQSKRSVLVNQADLQSARPRAETKPTEDLRSWEKKQRAPLRFQGDSRLEQSGCYHHCVDENIERRNHYLDLAGIENYTSQFGPGSPSVAQKSELPPRTSNPTRSRSHEPEAIHIPHRKPQGVDPASFHFLDTPIAKVSELQQRLRGTQDGSKHFVRSPKAQGKSVGVGHVARGARNKPPLGPAIPAVSPSAHLAASPALLPSLAPLGHKKHKHRAKESQQGCRGLQAPLASGGPVLGREHLRELPALVVYESQAGQPVQRHEHHHHHEHHHHYHHFYQT

SEQ ID NO: 55317 - protein, 311 aa, Homo sapiens
  Payload ID: 10917
  Gene Symbol: NKD2
  Gene Name: naked cuticle homolog 2 (Drosophila)
  Uniprot ID: Q969F2
  ENSP ID: ENSP00000274150
MGKLQSKHAAAARKRRESPEGDSFVASAYASGRKGAEEAERRARDKQELPNGDPKEGPFREDQCPLQVALPAEKAEGREHPGQLLSADDGERAANREGPRGPGGQRLNIDALQCDVSVEEDDRQEWTFTLYDFDNCGKVTREDMSSLMHTIYEVVDASVNHSSGSSKTLRVKLTVSPEPSSKRKEGPPAGQDREPTRCRMEGELAEEPRVADRRLSAHVRRPSTDPQPCSERGPYCVDENTERRNHYLDLAGIENYTSRFGPGSQLCEKRSSAPRTHSGDKARGVGLCRELWSQAGHPQWPGPFPSGLVAV

SEQ ID NO: 55318 - protein, 451 aa, Homo sapiens
  Payload ID: 10917
  Gene Symbol: NKD2
  Gene Name: naked cuticle homolog 2 (Drosophila)
  Uniprot ID: Q969F2
  ENSP ID: ENSP00000296849
MGKLQSKHAAAARKRRESPEGDSFVASAYASGRKGAEEAERRARDKQELPNGDPKEGPFREDQCPLQVALPAEKAEGREHPGQLLSADDGERAANREGPRGPGGQRLNIDALQCDVSVEEDDRQEWTFTLYDFDNCGKVTREDMSSLMHTIYEVVDASVNHSSGSSKTLRVKLTVSPEPSSKRKEGPPAGQDREPTRCRMEGELAEEPRVADRRLSAHVRRPSTDPQPCSERGPYCVDENTERRNHYLDLAGIENYTSRFGPGSPPVQAKQEPQGRASHLQARSRSQEPDTHAVHHRRSQVLVEHVVPASEPAARALDTQPRPKGPEKQFLKSPKGSGKPPGVPASSKSGKAFSYYLPAVLPPQAPQDGHHLPQPPPPPYGHKRYRQKGREGHSPLKAPHAQPATVEHEVVRDLPPTPAGEGYAVPVIQRHEHHHHHEHHHHHHHHHFHPS

SEQ ID NO: 55319 - protein, 451 aa, Homo sapiens; identical to SEQ ID NO: 55318
  Payload ID: 10917
  Gene Symbol: NKD2
  Gene Name: naked cuticle homolog 2 (Drosophila)
  Uniprot ID: Q969F2
  ENSP ID: ENSP00000479003

SEQ ID NO: 55320 - protein, 311 aa, Homo sapiens; identical to SEQ ID NO: 55317
  Payload ID: 10917
  Gene Symbol: NKD2
  Gene Name: naked cuticle homolog 2 (Drosophila)
  Uniprot ID: Q969F2
  ENSP ID: ENSP00000482896

SEQ ID NO: 55321 - protein, 1630 aa, Homo sapiens
  Payload ID: 10918
  Gene Symbol: NHS
  Gene Name: Nance-Horan syndrome (congenital cataracts and dental anomalies)
  Uniprot ID: Q6T4R5
  ENSP ID: ENSP00000369400
MPFAKRIVEPQWLCRQRRPAPGPAVDASGGSAEPPPPLQPPGRRDLDEVEAPGPEEPARAVPAPSGLPPPPPPLPAPADQTQPPHGEASVAGEESTAGIPEAAPAAGEASSAAAAAAVLLMLDLCAVSNAALARVLRQLSDVARHACSLFQELESDIQLTHRRVWALQGKLGGVQRVLSTLDPKQEAVPVSNLDIESKLSVYYRAPWHQQRNIFLPATRPPCVEELHRHARQSLQALRREHRSRSDRREQRAAAPLSIAAPPLPAYPPAHSQRRREFKDRHFLTSHPPEDEDTDVMLGQRPKNPIHNIPSTLDKQTNWSKALPLPTPEEKMKQDAQVISSCIIPINVTGVGFDREASIRCSLVHSQSVLQRRRKLRRRKTISGIPRRVQQEIDSDESPVARERNVIVHTNPDPSNTVNRISGTRDSECQTEDILIAAPSRRRIRAQRGQSIAASLSHSAGNISALADKGDTMFTPAVSSRTRSRSLPREGNRGGDAEPKVGAKPSAYEEGESFVGDHERTPNDFSEAPSSPSAQDHQPTLGLACSQHLHSPQHKLSERGRSRLSRMAADSGSCDISSNSDTFGSPIHCISTAGVLLSSHMDQKDDHQSSSGNWSGSSSTCPSQTSETIPPAASPPLTGSSHCDSELSLNTAPHANEDASVFVTEQYNDHLDKVRGHRANSFTSTVADLLDDPNNSNTSDSEWNYLHHHHDASCRQDFSPERPKADSLGCPSFTSMATYDSFLEKSPSDKADTSSHFSVDTEGYYTSMHFDCGLKGNKSYVCHYAALGPENGQGVGASPGLPDCAWQDYLDHKRQGRPSISFRKPKAKPTPPKRSSSLRKSDGNADISEKKEPKISSGQHLPHSSREMKLPLDFANTPSRMENANLPTKQEPSWINQSEQGIKEPQLDASDIPPFKDEVAESTHYADLWLLNDLKTNDPYRSLSNSSTATGTTVIECIKSPESSESQTSQSESRATTPSLPSVDNEFKLASPEKLAGLASPSSGYSSQSETPTSSFPTAFFSGPLSPGGSKRKPKVPERKSSLQQPSLKDGTISLSKDLELPIIPPTHLDLSALHNVLNKPFHHRHPLHVFTHNKQNTVGETLRSNPPPSLAITPTILKSVNLRSINKSEEVKQKEENNTDLPYLEESTLTTAALSPSKIRPHTANKSVSRQYSTEDTILSFLDSSAVEMGPDKLHLEKNSTFDVKNRCDPETITSAGSSLLDSNVTKDQVRTETEPIPENTPTKNCAFPTEGFQRVSAARPNDLDGKIIQYGPGPDETLEQVQKAPSAGLEEVAQPESVDVITSQSDSPTRATDVSNQFKHQFVMSRHHDKVPGTISYESEITSVNSFPEKCSKQENIASGISAKSASDNSKAEETQGNVDEASLKESSPSDDSIISPLSEDSQAEAEGVFVSPNKPRTTEDLFAVIHRSKRKVLGRKDSGDMSVRSKSRAPLSSSSSSASSITSPSSNVTTPNSQRSPGLIYRNAKKSNTSNEEFKLLLLKKGSRSDSSYRMSATEILKSPILPKPPGELTAESPQSTDDAHQGSQGAEALSPLSPCSPRVNAEGFSSKSFATSASARVGRSRAPPAASSSRYSVRCRLYNTPMQAISEGETENSDGSPHDDRSSQSST

SEQ ID NO: 55322 - protein, 1474 aa, Homo sapiens
  Payload ID: 10918
  Gene Symbol: NHS
  Gene Name: Nance-Horan syndrome (congenital cataracts and dental anomalies)
  Uniprot ID: Q6T4R5
  ENSP ID: ENSP00000381170
MALACCMPKNAAVSNLDIESKLSVYYRAPWHQQRNIFLPATRPPCVEELHRHARQSLQALRREHRSRSDRREQRAAAPLSIAAPPLPAYPPAHSQRRREFKDRHFLTFNSTRSPSPTECCHMTPWSRKSHPPEDEDTDVMLGQRPKNPIHNIPSTLDKQTNWSKALPLPTPEEKMKQDAQVISSCIIPINVTGVGFDREASIRCSLVHSQSVLQRRRKLRRRKTISGIPRRVQQEIDSDESPVARERNVIVHTNPDPSNTVNRISGTRDSECQTEDILIAAPSRRRIRAQRGQSIAASLSHSAGNISALADKGDTMFTPAVSSRTRSRSLPREGNRGGDAEPKVGAKPSAYEEGESFVGDHERTPNDFSEAPSSPSAQDHQPTLGLACSQHLHSPQHKLSERGRSRLSRMAADSGSCDISSNSDTFGSPIHCISTAGVLLSSHMDQKDDHQSSSGNWSGSSSTCPSQTSETIPPAASPPLTGSSHCDSELSLNTAPHANEDASVFVTEQYNDHLDKVRGHRANSFTSTVADLLDDPNNSNTSDSEWNYLHHHHDASCRQDFSPERPKADSLGCPSFTSMATYDSFLEKSPSDKADTSSHFSVDTEGYYTSMHFDCGLKGNKSYVCHYAALGPENGQGVGASPGLPDCAWQDYLDHKRQGRPSISFRKPKAKPTPPKRSSSLRKSDGNADISEKKEPKISSGQHLPHSSREMKLPLDFANTPSRMENANLPTKQEPSWINQSEQGIKEPQLDASDIPPFKDEVAESTHYADLWLLNDLKTNDPYRSLSNSSTATGTTVIECIKSPESSESQTSQSESRATTPSLPSVDNEFKLASPEKLAGLASPSSGYSSQSETPTSSFPTAFFSGPLSPGGSKRKPKVPERKSSLQQPSLKDGTISLSKDLELPIIPPTHLDLSALHNVLNKPFHHRHPLHVFTHNKQNTVGETLRSNPPPSLAITPTILKSVNLRSINKSEEVKQKEENNTDLPYLEESTLTTAALSPSKIRPHTANKSVSRQYSTEDTILSFLDSSAVEMGPDKLHLEKNSTFDVKNRCDPETITSAGSSLLDSNVTKDQVRTETEPIPENTPTKNCAFPTEGFQRVSAARPNDLDGKIIQYGPGPDETLEQVQKAPSAGLEEVAQPESVDVITSQSDSPTRATDVSNQFKHQFVMSRHHDKVPGTISYESEITSVNSFPEKCSKQENIASGISAKSASDNSKAEETQGNVDEASLKESSPSDDSIISPLSEDSQAEAEGVFVSPNKPRTTEDLFAVIHRSKRKVLGRKDSGDMSVRSKSRAPLSSSSSSASSITSPSSNVTTPNSQRSPGLIYRNAKKSNTSNEEFKLLLLKKGSRSDSSYRMSATEILKSPILPKPPGELTAESPQSTDDAHQGSQGAEALSPLSPCSPRVNAEGFSSKSFATSASARVGRSRAPPAASSSRYSVRCRLYNTPMQAISEGETENSDGSPHDDRSSQSST

SEQ ID NO: 55323 - protein, 1447 aa, Homo sapiens
  Payload ID: 10918
  Gene Symbol: NHS
  Gene Name: Nance-Horan syndrome (congenital cataracts and dental anomalies)
  ENSP ID: ENSP00000478433
MPKNAAVSNLDIESKLSVYYRAPWHQQRNIFLPATRPPCVEELHRHARQSLQALRREHRSRSDRREQRAAAPLSIAAPPLPAYPPAHSQRRREFKDRHFLTSHPPEDEDTDVMLGQRPKNPIHNIPSTLDKQTNWSKALPLPTPEEKMKQDAQVISSCIIPINVTGVGFDREASIRCSLVHSQSVLQRRRKLRRRKTISGIPRRVQQEIDSDESPVARERNVIVHTNPDPSNTVNRISGTRDSECQTEDILIAAPSRRRIRAQRGQSIAASLSHSAGNISALADKGDTMFTPAVSSRTRSRSLPREGNRGGDAEPKVGAKPSAYEEGESFVGDHERTPNDFSEAPSSPSAQDHQPTLGLACSQHLHSPQHKLSERGRSRLSRMAADSGSCDISSNSDTFGSPIHCISTAGVLLSSHMDQKDDHQSSSGNWSGSSSTCPSQTSETIPPAASPPLTGSSHCDSELSLNTAPHANEDASVFVTEQYNDHLDKVRGHRANSFTSTVADLLDDPNNSNTSDSEWNYLHHHHDASCRQDFSPERPKADSLGCPSFTSMATYDSFLEKSPSDKADTSSHFSVDTEGYYTSMHFDCGLKGNKSYVCHYAALGPENGQGVGASPGLPDCAWQDYLDHKRQGRPSISFRKPKAKPTPPKRSSSLRKSDGNADISEKKEPKISSGQHLPHSSREMKLPLDFANTPSRMENANLPTKQEPSWINQSEQGIKEPQLDASDIPPFKDEVAESTHYADLWLLNDLKTNDPYRSLSNSSTATGTTVIECIKSPESSESQTSQSESRATTPSLPSVDNEFKLASPEKLAGLASPSSGYSSQSETPTSSFPTAFFSGPLSPGGSKRKPKVPERKSSLQQPSLKDGTISLSKDLELPIIPPTHLDLSALHNVLNKPFHHRHPLHVFTHNKQNTVGETLRSNPPPSLAITPTILKSVNLRSINKSEEVKQKEENNTDLPYLEESTLTTAALSPSKIRPHTANKSVSRQYSTEDTILSFLDSSAVEMGPDKLHLEKNSTFDVKNRCDPETITSAGSSLLDSNVTKDQVRTETEPIPENTPTKNCAFPTEGFQRVSAARPNDLDGKIIQYGPGPDETLEQVQKAPSAGLEEVAQPESVDVITSQSDSPTRATDVSNQFKHQFVMSRHHDKVPGTISYESEITSVNSFPEKCSKQENIASGISAKSASDNSKAEETQGNVDEASLKESSPSDDSIISPLSEDSQAEAEGVFVSPNKPRTTEDLFAVIHRSKRKVLGRKDSGDMSVRSKSRAPLSSSSSSASSITSPSSNVTTPNSQRSPGLIYRNAKKSNTSNEEFKLLLLKKGSRSDSSYRMSATEILKSPILPKPPGELTAESPQSTDDAHQGSQGAEALSPLSPCSPRVNAEGFSSKSFATSASARVGRSRAPPAASSSRYSVRCRLYNTPMQAISEGETENSDGSPHDDRSSQSST

SEQ ID NO: 55324 - protein, 1471 aa, Homo sapiens
  Payload ID: 10918
  Gene Symbol: NHS
  Gene Name: Nance-Horan syndrome (congenital cataracts and dental anomalies)
  ENSP ID: ENSP00000480113
MDNALFLAAVSNLDIESKLSVYYRAPWHQQRNIFLPATRPPCVEELHRHARQSLQALRREHRSRSDRREQRAAAPLSIAAPPLPAYPPAHSQRRREFKDRHFLTFNSTRSPSPTECCHMTPWSRKSHPPEDEDTDVMLGQRPKNPIHNIPSTLDKQTNWSKALPLPTPEEKMKQDAQVISSCIIPINVTGVGFDREASIRCSLVHSQSVLQRRRKLRRRKTISGIPRRVQQEIDSDESPVARERNVIVHTNPDPSNTVNRISGTRDSECQTEDILIAAPSRRRIRAQRGQSIAASLSHSAGNISALADKGDTMFTPAVSSRTRSRSLPREGNRGGDAEPKVGAKPSAYEEGESFVGDHERTPNDFSEAPSSPSAQDHQPTLGLACSQHLHSPQHKLSERGRSRLSRMAADSGSCDISSNSDTFGSPIHCISTAGVLLSSHMDQKDDHQSSSGNWSGSSSTCPSQTSETIPPAASPPLTGSSHCDSELSLNTAPHANEDASVFVTEQYNDHLDKVRGHRANSFTSTVADLLDDPNNSNTSDSEWNYLHHHHDASCRQDFSPERPKADSLGCPSFTSMATYDSFLEKSPSDKADTSSHFSVDTEGYYTSMHFDCGLKGNKSYVCHYAALGPENGQGVGASPGLPDCAWQDYLDHKRQGRPSISFRKPKAKPTPPKRSSSLRKSDGNADISEKKEPKISSGQHLPHSSREMKLPLDFANTPSRMENANLPTKQEPSWINQSEQGIKEPQLDASDIPPFKDEVAESTHYADLWLLNDLKTNDPYRSLSNSSTATGTTVIECIKSPESSESQTSQSESRATTPSLPSVDNEFKLASPEKLAGLASPSSGYSSQSETPTSSFPTAFFSGPLSPGGSKRKPKVPERKSSLQQPSLKDGTISLSKDLELPIIPPTHLDLSALHNVLNKPFHHRHPLHVFTHNKQNTVGETLRSNPPPSLAITPTILKSVNLRSINKSEEVKQKEENNTDLPYLEESTLTTAALSPSKIRPHTANKSVSRQYSTEDTILSFLDSSAVEMGPDKLHLEKNSTFDVKNRCDPETITSAGSSLLDSNVTKDQVRTETEPIPENTPTKNCAFPTEGFQRVSAARPNDLDGKIIQYGPGPDETLEQVQKAPSAGLEEVAQPESVDVITSQSDSPTRATDVSNQFKHQFVMSRHHDKVPGTISYESEITSVNSFPEKCSKQENIASGISAKSASDNSKAEETQGNVDEASLKESSPSDDSIISPLSEDSQAEAEGVFVSPNKPRTTEDLFAVIHRSKRKVLGRKDSGDMSVRSKSRAPLSSSSSSASSITSPSSNVTTPNSQRSPGLIYRNAKKSNTSNEEFKLLLLKKGSRSDSSYRMSATEILKSPILPKPPGELTAESPQSTDDAHQGSQGAEALSPLSPCSPRVNAEGFSSKSFATSASARVGRSRAPPAASSSRYSVRCRLYNTPMQAISEGETENSDGSPHDDRSSQSST

SEQ ID NO: 55325 - protein, 305 aa, Homo sapiens
  Payload ID: 10919
  Gene Symbol: NANOG
  Gene Name: Nanog homeobox
  Uniprot ID: Q9H9S0
  ENSP ID: ENSP00000229307
MSVDPACPQSLPCFEASDCKESSPMPVICGPEENYPSLQMSSAEMPHTETVSPLPSSMDLLIQDSPDSSTSPKGKQPTSAEKSVAKKEDKVPVKKQKTRTVFSSTQLCVLNDRFQRQKYLSLQQMQELSNILNLSYKQVKTWFQNQRMKSKRWQKNNWPKNSNGVTQKASAPTYPSLYSSYHQGCLVNPTGNLPMWSNQTWNNSTWSNQTQNIQSWSNHSWNTQTWCTQSWNNQAWNSPFYNCGEESLQSCMQFQPNSPASDLEAALEAAGEGLNVIQQTTRYFSTPQTMDLFLNYSMNMQPEDV

SEQ ID NO: 55326 - protein, 289 aa, Homo sapiens
  Payload ID: 10919
  Gene Symbol: NANOG
  Gene Name: Nanog homeobox
  Uniprot ID: Q9H9S0
  ENSP ID: ENSP00000435288
MSVDPACPQSLPCFEASDCKESSPMPVICGPEENYPSLQMSSAEMPHTETVSPLPSSMDLLIQDSPDSSTSPKGKQPTSAEKSVAKKEDKVPVKKQKTRTVFSSTQLCVLNDRFQRQKYLSLQQMQELSNILNLSYKQVKTWFQNQRMKSKRWQKNNWPKNSNGVTQGCLVNPTGNLPMWSNQTWNNSTWSNQTQNIQSWSNHSWNTQTWCTQSWNNQAWNSPFYNCGEESLQSCMQFQPNSPASDLEAALEAAGEGLNVIQQTTRYFSTPQTMDLFLNYSMNMQPEDV

SEQ ID NO: 55327 - protein, 186 aa, Homo sapiens
  Payload ID: 10919
  Gene Symbol: NANOG
  Gene Name: Nanog homeobox
  ENSP ID: ENSP00000444434
MPVICGPEENYPSLQMSSAEMPHTETVSPLPSSMDLLIQDSPDSSTSPKGKQPTSAEKSVAKKEDKVPVKKQKTRTVFSSTQLCVLNDRFQRQKYLSLQQMQELSNILNLSYKQVKTWFQNQRMKSKRWQKNNWPKNSNGVTQKASAPTYPSLYSSYHQGCLVNPTGNLPMWSNQTWNNSTWSNQT

SEQ ID NO: 55328 - protein, 289 aa, Homo sapiens
  Payload ID: 10920
  Gene Symbol: NANOGP8
  Gene Name: Nanog homeobox pseudogene 8
  ENSP ID: ENSP00000487045
MSVDPACPQSLPCFEESDCKESSPMPVICGPEENYPSLQMSSAEMPHTETVSPLPSSMDLLIQDSPDSSTSPKGKQPTSAENSVAKKEDKVPVKKQKTRTVFSSTQLCVLNDRFQRQKYLSLQQMQELSNILNLSYKQVKTWFQNQRMKSKRWQKNNWPKNSNGVTQGCLVNPTGNLPMWSNQTWNNSTWSNQTQNIQSWSNHSWNTQTWCTQSWNNQAWNSPFYNCGEESLQSCMHFQPNSPASDLEAALEAAGEGLNVIQQTTRYFSTPQTMDLFLNYSMNMQPEDV

SEQ ID NO: 55329 - protein, 305 aa, Homo sapiens
  Payload ID: 10920
  Gene Symbol: NANOGP8
  Gene Name: Nanog homeobox pseudogene 8
  ENSP ID: ENSP00000487073
MSVDPACPQSLPCFEESDCKESSPMPVICGPEENYPSLQMSSAEMPHTETVSPLPSSMDLLIQDSPDSSTSPKGKQPTSAENSVAKKEDKVPVKKQKTRTVFSSTQLCVLNDRFQRQKYLSLQQMQELSNILNLSYKQVKTWFQNQRMKSKRWQKNNWPKNSNGVTQKASAPTYPSLYSSYHQGCLVNPTGNLPMWSNQTWNNSTWSNQTQNIQSWSNHSWNTQTWCTQSWNNQAWNSPFYNCGEESLQSCMHFQPNSPASDLEAALEAAGEGLNVIQQTTRYFSTPQTMDLFLNYSMNMQPEDV

SEQ ID NO: 55330 - protein, 188 aa, Homo sapiens
  Payload ID: 10921
  Gene Symbol: NANOGNB
  Gene Name: NANOG neighbor homeobox
  Uniprot ID: Q7Z5D8
  ENSP ID: ENSP00000371553
MHRARWLTPVIPALWEAEAGRSRGQEIETILANKKQSAMPWDQDPEQSTGNYSEDEQNGKQKWREEGEAGRKREREKEEKNEKELQDEQENKRKRENEKQKQYPEKRLVSKSLMHTLWAKFKLNRCPTIQESLSLSFEFDMTHKQISQWFCKTRKKYNKEMSKRKHKKKHMRWRSLCCQGWSRTPALK

SEQ ID NO: 55331 - protein, 84 aa, Homo sapiens
  Payload ID: 10922
  Gene Symbol: NANOS1
  Gene Name: nanos homolog 1 (Drosophila)
  ENSP ID: ENSP00000345924
PELQVCVFCRNNKEAMALYTTHILKGPDGRVLCPVLRRYTCPLCGASGDNAHTIKYCPLSKVPPPPARPPPRSARDGPPGKKLR

SEQ ID NO: 55332 - protein, 292 aa, Homo sapiens
  Payload ID: 10922
  Gene Symbol: NANOS1
  Gene Name: nanos homolog 1 (Drosophila)
  Uniprot ID: Q8WY41
  ENSP ID: ENSP00000393275
MEAFPWAPRSPRRGRAPPPMALVPSARYVSAPGPAHPQPFSSWNDYLGLATLITKAVDGEPRFGCARGGNGGGGSPPSSSSSSCCSPHTGAGPGALGPALGPPDYDEDDDDDSDEPGSRGRYLGSALELRALELCAGPAEAGLLEERFAELSPFAGRAAAVLLGCAPAAAAAATTTSEATPREERAPAWAAEPRLHAASGAAAARLLKPELQVCVFCRNNKEAMALYTTHILKGPDGRVLCPVLRRYTCPLCGASGDNAHTIKYCPLSKVPPPPARPPPRSARDGPPGKKLR

SEQ ID NO: 55333 - protein, 138 aa, Homo sapiens
  Payload ID: 10923
  Gene Symbol: NANOS2
  Gene Name: nanos homolog 2 (Drosophila)
  Uniprot ID: P60321
  ENSP ID: ENSP00000341021
MQLPPFDMWKDYFNLSQVVWALIASRGQRLETQEIEEPSPGPPLGQDQGLGAPGANGGLGTLCNFCKHNGESRHVYSSHQLKTPDGVVVCPILRHYVCPVCGATGDQAHTLKYCPLNGGQQSLYRRSGRNSAGRRVKR

SEQ ID NO: 55334 - protein, 192 aa, Homo sapiens
  Payload ID: 10924
  Gene Symbol: NANOS3
  Gene Name: nanos homolog 3 (Drosophila)
  Uniprot ID: P60323
  ENSP ID: ENSP00000341992
MGTFDLWTDYLGLAHLVRALSGKEGPETRLSPQPEPEPMLEPVSALEPMPAPESVPVPGPKDQKRSLESSPAPERLCSFCKHNGESRAIYQSHVLKDEAGRVLCPILRDYVCPQCGATRERAHTRRFCPLTGQGYTSVYSHTTRNSAGKKLVRPDKAKTQDTGHRRGGGGGAGFRGAGKSEPSPSCSPSMST

SEQ ID NO: 55335 - protein, 173 aa, Homo sapiens
  Payload ID: 10924
  Gene Symbol: NANOS3
  Gene Name: nanos homolog 3 (Drosophila)
  Uniprot ID: P60323
  ENSP ID: ENSP00000380687
MGTFDLWTDYLGLAHLVRALSGKEGPETRLSPQPEPEPMLEPDQKRSLESSPAPERLCSFCKHNGESRAIYQSHVLKDEAGRVLCPILRDYVCPQCGATRERAHTRRFCPLTGQGYTSVYSHTTRNSAGKKLVRPDKAKTQDTGHRRGGGGGAGFRGAGKSEPSPSCSPSMST

SEQ ID NO: 55336 - protein, 420 aa, Homo sapiens
  Payload ID: 10925
  Gene Symbol: NAPSA
  Gene Name: napsin A aspartic peptidase
  Uniprot ID: O96009
  ENSP ID: ENSP00000253719
MSPPPLLQPLLLLLPLLNVEPSGATLIRIPLHRVQPGRRILNLLRGWREPAELPKLGAPSPGDKPIFVPLSNYRDVQYFGEIGLGTPPQNFTVAFDTGSSNLWVPSRRCHFFSVPCWLHHRFDPKASSSFQANGTKFAIQYGTGRVDGILSEDKLTIGGIKGASVIFGEALWEPSLVFAFAHFDGILGLGFPILSVEGVRPPMDVLVEQGLLDKPVFSFYLNRDPEEPDGGELVLGGSDPAHYIPPLTFVPVTVPAYWQIHMERVKVGPGLTLCAKGCAAILDTGTSLITGPTEEIRALHAAIGGIPLLAGEYIILCSEIPKLPAVSFLLGGVWFNLTAHDYVIQTTRNGVRLCLSGFQALDVPPPAGPFWILGDVFLGTYVAVFDRGDMKSSARVGLARARTRGADLGWGETAQAQFPG

SEQ ID NO: 55337 - protein, 268 aa, Homo sapiens
  Payload ID: 10925
  Gene Symbol: NAPSA
  Gene Name: napsin A aspartic peptidase
  ENSP ID: ENSP00000469061
MSPPPLLQPLLLLLPLLNVEPSGATLIRIPLHRVQPGRRILNLLRGWREPAELPKLGAPSPGDKPIFVPLSNYRDVQYFGEIGLGTPPQNFTVAFDTGSSNLWVPSRRCHFFSVPCSSSSFQANGTKFAIQYGTGRVDGILSEDKLTIGGIKGASVIFGEALWEPSLVFAFAHFDGILGLGFPILSVEGVRPPMDVLVEQGLLDKPVFSFYLNRDPEEPDGGELVLGGSDPAHYIPPLTFVPVTVPAYWQIHMERVKVGPGLTLCAKG

SEQ ID NO: 55338 - protein, 104 aa, Homo sapiens
  Payload ID: 10925
  Gene Symbol: NAPSA
  Gene Name: napsin A aspartic peptidase
  ENSP ID: ENSP00000469763
MSPPPLLQPLLLLLPLLNVEPSGATLIRIPLHRVQPGRRILNLLRGWREPAELPKLGAPSPGDKPIFVPLSNYRDGYTTDLIPKPLAPSRPMGPSLPFNMELGG

SEQ ID NO: 55339 - protein, 1151 aa, Homo sapiens
  Payload ID: 10926
  Gene Symbol: NRD1
  Gene Name: nardilysin (N-arginine dibasic convertase)
  Uniprot ID: O43847
  ENSP ID: ENSP00000262679
MLRRVTVAAVCATRRKLCEAGRELAALWGIETRGRCEDSAAARPFPILAMPGRNKAKSTCSCPDLQPNGQDLGENSRVARLGADESEEEGRRGSLSNAGDPEIVKSPSDPKQYRYIKLQNGLQALLISDLSNMEGKTGNTTDDEEEEEVEEEEEDDDEDSGAEIEDDDEEGFDDEDEFDDEHDDDLDTEDNELEELEERAEARKKTTEKQSAAALCVGVGSFADPDDLPGLAHFLEHMVFMGSLKYPDENGFDAFLKKHGGSDNASTDCERTVFQFDVQRKYFKEALDRWAQFFIHPLMIRDAIDREVEAVDSEYQLARPSDANRKEMLFGSLARPGHPMGKFFWGNAETLKHEPRKNNIDTHARLREFWMRYYSSHYMTLVVQSKETLDTLEKWVTEIFSQIPNNGLPRPNFGHLTDPFDTPAFNKLYRVVPIRKIHALTITWALPPQQQHYRVKPLHYISWLVGHEGKGSILSFLRKKCWALALFGGNGETGFEQNSTYSVFSISITLTDEGYEHFYEVAYTVFQYLKMLQKLGPEKRIFEEIRKIEDNEFHYQEQTDPVEYVENMCENMQLYPLQDILTGDQLLFEYKPEVIGEALNQLVPQKANLVLLSGANEGKCDLKEKWFGTQYSIEDIENSWAELWNSNFELNPDLHLPAENKYIATDFTLKAFDCPETEYPVKIVNTPQGCLWYKKDNKFKIPKAYIRFHLISPLIQKSAANVVLFDIFVNILTHNLAEPAYEADVAQLEYKLVAGEHGLIIRVKGFNHKLPLLFQLIIDYLAEFNSTPAVFTMITEQLKKTYFNILIKPETLAKDVRLLILEYARWSMIDKYQALMDGLSLESLLSFVKEFKSQLFVEGLVQGNVTSTESMDFLKYVVDKLNFKPLEQEMPVQFQVVELPSGHHLCKVKALNKGDANSEVTVYYQSGTRSLREYTLMELLVMHMEEPCFDFLRTKQTLGYHVYPTCRNTSGILGFSVTVGTQATKYNSEVVDKKIEEFLSSFEEKIENLTEEAFNTQVTALIKLKECEDTHLGEEVDRNWNEVVTQQYLFDRLAHEIEALKSFSKSDLVNWFKAHRGPGSKMLSVHVVGYGKYELEEDGTPSSEDSNSSCEVMQLTYLPTSPLLADCIIPITDIRAFTTTLNLLPYHKIVK

SEQ ID NO: 55340 - protein, 1219 aa, Homo sapiens
  Payload ID: 10926
  Gene Symbol: NRD1
  Gene Name: nardilysin (N-arginine dibasic convertase)
  ENSP ID: ENSP00000346890
MLRRVTVAAVCATRRKLCEAGRELAALWGIETRGRCEDSAAARPFPILAMPGRNKAKSTCSCPDLQPNGQDLGENSRVARLGADESEEEGRRGSLSNAGDPEIVKSPSDPKQYRYIKLQNGLQALLISDLSNMEGKTGNTTDDEEEEEVEEEEEDDDEDSGAEIEDDDEEGFDDEDEFDDEHDDDLDTEDNELEELEERAEARKKTTEKQQLQSLFLLWSKLTDRLWFKSTYSKMSSTLLVETRNLYGVVGAESRSAPVQHLAGWQAEEQQGETDTVLSAAALCVGVGSFADPDDLPGLAHFLEHMVFMGSLKYPDENGFDAFLKKHGGSDNASTDCERTVFQFDVQRKYFKEALDRWAQFFIHPLMIRDAIDREVEAVDSEYQLARPSDANRKEMLFGSLARPGHPMGKFFWGNAETLKHEPRKNNIDTHARLREFWMRYYSSHYMTLVVQSKETLDTLEKWVTEIFSQIPNNGLPRPNFGHLTDPFDTPAFNKLYRVVPIRKIHALTITWALPPQQQHYRVKPLHYISWLVGHEGKGSILSFLRKKCWALALFGGNGETGFEQNSTYSVFSISITLTDEGYEHFYEVAYTVFQYLKMLQKLGPEKRIFEEIRKIEDNEFHYQEQTDPVEYVENMCENMQLYPLQDILTGDQLLFEYKPEVIGEALNQLVPQKANLVLLSGANEGKCDLKEKWFGTQYSIEDIENSWAELWNSNFELNPDLHLPAENKYIATDFTLKAFDCPETEYPVKIVNTPQGCLWYKKDNKFKIPKAYIRFHLISPLIQKSAANVVLFDIFVNILTHNLAEPAYEADVAQLEYKLVAGEHGLIIRVKGFNHKLPLLFQLIIDYLAEFNSTPAVFTMITEQLKKTYFNILIKPETLAKDVRLLILEYARWSMIDKYQALMDGLSLESLLSFVKEFKSQLFVEGLVQGNVTSTESMDFLKYVVDKLNFKPLEQEMPVQFQVVELPSGHHLCKVKALNKGDANSEVTVYYQSGTRSLREYTLMELLVMHMEEPCFDFLRTKQTLGYHVYPTCRNTSGILGFSVTVGTQATKYNSEVVDKKIEEFLSSFEEKIENLTEEAFNTQVTALIKLKECEDTHLGEEVDRNWNEVVTQQYLFDRLAHEIEALKSFSKSDLVNWFKAHRGPGSKMLSVHVVGYGKYELEEDGTPSSEDSNSSCEVMQLTYLPTSPLLADCIIPITDIRAFTTTLNLLPYHKIVK

SEQ ID NO: 55341 - protein, 538 aa, Homo sapiens
  Payload ID: 10926
  Gene Symbol: NRD1
  Gene Name: nardilysin (N-arginine dibasic convertase)
  ENSP ID: ENSP00000398464
  MOD_RES (1)..(1): Any amino acid
XKIEDNEFHYQEQTDPVEYVENMCENMQLYPLQDILTGDQLLFEYKPEVIGEALNQLVPQKANLVLLSGANEGKCDLKEKWFGTQYSIEDIENSWAELWNSNFELNPDLHLPAENKYIAYIRFHLISPLIQKSAANVVLFDIFVNILTHNLAEPAYEADVAQLEYKLVAGEHGLIIRVKGFNHKLPLLFQLIIDYLAEFNSTPAVFTMITEQLKKTYFNILIKPETLAKDVRLLILEYARWSMIDKYQALMDGLSLESLLSFVKEFKSQLFVEGLVQGNVTSTESMDFLKYVVDKLNFKPLEQEMPVQFQVVELPSGHHLCKVKALNKGDANSEVTVYYQSGTRSLREYTLMELLVMHMEEPCFDFLRTKQTLGSEVVDKKIEEFLSSFEEKIENLTEEAFNTQVTALIKLKECEDTHLGEEVDRNWNEVVTQQYLFDRLAHEIEALKSFSKSDLVNWFKAHRGPGSKMLSVHVVGYGKYELEEDGTPSSEDSNSSCEVMQLTYLPTSPLLADCIIPITDIRAFTTTLNLLPYHKIVK

SEQ ID NO: 55342 - protein, 949 aa, Homo sapiens
  Payload ID: 10926
  Gene Symbol: NRD1
  Gene Name: nardilysin (N-arginine dibasic convertase)
  ENSP ID: ENSP00000442262
MLRRVTVAAVCATRRKLCEAGRELAALWGIETRGRCEDSAAARPFPILAMPGRNKAKSTCSCPDLQPNGQDLGENSRVARLGADESEEEGRRGSLSNAGDPEIVKSPSDPKQYRYIKLQNGLQALLISDLSNMEGKTGNTTDDEEEEEVEEEEEDDDEDSGAEIEDDDEEGFDDEDEFDDEHDDDLDTEDNELEELEERAEARKKTTEKQSAAALCVGVGSFADPDDLPGLAHFLEHMVFMGSLKYPDENGFDAFLKKHGGSDNASTDCERTVFQFDVQRKYFKEALDRWAQFFIHPLMIRDAIDREVEAVDSEYQLARPSDANRKEMLFGSLARPGHPMGKFFWGNAETLKHEPRKNNIDTHARLREFWMRYYSSHYMTLVVQSKETLDTLEKWVTEIFSQIPNNGLPRPNFGHLTDPFDTPAFNKLYRVVPIRKIHALTITWALPPQQQHYRVKPLHYISWLVGHEGKGSILSFLRKKCWALALFGGNGETGFEQNSTYSVFSISITLTDEGYEHFYEVAYTVFQYLKMLQKLGPEKRIFEEIRKIEDNEFHYQEQTDPVEYVENMCENMQLYPLQDILTGDQLLFEYKPEVIGEALNQLVPQKANLVLLSGANEGKCDLKEKWFGTQYSIEDIENSWAELWNSNFELNPDLHLPAENKYIATDFTLKAFDCPETEYPVKIVNTPQGCLWYKKDNKFKIPKAYIRFHLISPLIQKSAANVVLFDIFVNILTHNLAEPAYEADVAQLEYKLVAGEHGLIIRVKGFNHKLPLLFQLIIDYLAEFNSTPAVFTMITEQLKKTYFNILIKPETLAKDVRLLILEYARWSMIDKYQALMDGLSLESLLSFVKEFKSQLFVEGLVQGNVTSTESMDFLKYVVDKLNFKPLEQEMPVQFQVVELPSGHHLCKVKALNKGDANSEVTVYYQVRYQESKRIYAYGAACDAHGRTLF

SEQ ID NO: 55343 - protein, 1087 aa, Homo sapiens
  Payload ID: 10926
  Gene Symbol: NRD1
  Gene Name: nardilysin (N-arginine dibasic convertase)
  ENSP ID: ENSP00000444416
MEGKTGNTTDDEEEEEVEEEEEDDDEDSGAEIEDDDEEGFDDEDEFDDEHDDDLDTEDNELEELEERAEARKKTTEKQQLQSLFLLWSKLTDRLWFKSTYSKMSSTLLVETRNLYGVVGAESRSAPVQHLAGWQAEEQQGETDTVLSAAALCVGVGSFADPDDLPGLAHFLEHMVFMGSLKYPDENGFDAFLKKHGGSDNASTDCERTVFQFDVQRKYFKEALDRWAQFFIHPLMIRDAIDREVEAVDSEYQLARPSDANRKEMLFGSLARPGHPMGKFFWGNAETLKHEPRKNNIDTHARLREFWMRYYSSHYMTLVVQSKETLDTLEKWVTEIFSQIPNNGLPRPNFGHLTDPFDTPAFNKLYRVVPIRKIHALTITWALPPQQQHYRVKPLHYISWLVGHEGKGSILSFLRKKCWALALFGGNGETGFEQNSTYSVFSISITLTDEGYEHFYEVAYTVFQYLKMLQKLGPEKRIFEEIRKIEDNEFHYQEQTDPVEYVENMCENMQLYPLQDILTGDQLLFEYKPEVIGEALNQLVPQKANLVLLSGANEGKCDLKEKWFGTQYSIEDIENSWAELWNSNFELNPDLHLPAENKYIATDFTLKAFDCPETEYPVKIVNTPQGCLWYKKDNKFKIPKAYIRFHLISPLIQKSAANVVLFDIFVNILTHNLAEPAYEADVAQLEYKLVAGEHGLIIRVKGFNHKLPLLFQLIIDYLAEFNSTPAVFTMITEQLKKTYFNILIKPETLAKDVRLLILEYARWSMIDKYQALMDGLSLESLLSFVKEFKSQLFVEGLVQGNVTSTESMDFLKYVVDKLNFKPLEQEMPVQFQVVELPSGHHLCKVKALNKGDANSEVTVYYQSGTRSLREYTLMELLVMHMEEPCFDFLRTKQTLGYHVYPTCRNTSGILGFSVTVGTQATKYNSEVVDKKIEEFLSSFEEKIENLTEEAFNTQVTALIKLKECEDTHLGEEVDRNWNEVVTQQYLFDRLAHEIEALKSFSKSDLVNWFKAHRGPGSKMLSVHVVGYGKYELEEDGTPSSEDSNSSCEVMQLTYLPTSPLLADCIIPITDIRAFTTTLNLLPYHKIVK

SEQ ID NO: 55344 - protein, 1148 aa, Homo sapiens
  Payload ID: 10926
  Gene Symbol: NRD1
  Gene Name: nardilysin (N-arginine dibasic convertase)
  ENSP ID: ENSP00000481902
MLRRVTVAAVCATRRKLCEAGRELAALWGIETRGRCEDSAAARPFPILAMPGRNKAKSTCSCPDLQPNGQDLGENSRVARLGADESEEEGRRGSLSNAGDPEIVKSPSDPKQYRYIKLQNGLQALLISDLSNMEGKTGNTTDDEEEEEVEEEEEDDDEDSGAEIEDDDEEGFDDEDEFDDEHDDDLDTEDNELEELEERAEARKKTTEKQSAAALCVGVGSFADPDDLPGLAHFLEHMVFMGSLKYPDENGFDAFLKKHGGSDNASTDCERTVFQFDVQRKYFKEALDRWAQFFIHPLMIRDAIDREVEAVDSEYQLARPSDANRKEMLFGSLARPGHPMGKFFWGNAETLKHEPRKNNIDTHARLREFWMRYYSSHYMTLVVQSKETLDTLEKWVTEIFSQIPNNGLPRPNFGHLTDPFDTPAFNKLYRVVPIRKIHALTITWALPPQQQHYRVKPLHYISWLVGHEGKGSILSFLRKKCWALALFGGNGETGFEQNSTYSVFSISITLTDEGYEHFYEVAYTVFQYLKMLQKLGPEKRIFEEIRKIEDNEFHYQEQTDPVEYVENMCENMQLYPLQDILTGDQLLFEYKPEVIGEALNQLVPQKANLVLLSGANEGKCDLKEKWFGTQYSIEDIENSWAELWNSNFELNPDLHLPAENKYIATDFTLKAFDCPETEYPVKIVNTPQGCLWYKKDNKFKIPKAYIRFHLISPLIQKSAANVVLFDIFVNILTHNLAEPAYEADVAQLEYKLVAGEHGLIIRVKGFNHKLPLLFQLIIDYLAEFNSTPAVFTMITEQLKKTYFNILIKPETLAKDVRLLILEYARWSMIDKYQALMDGLSLESLLSFVKEFKSQLFVEGLVQGNVTSTESMDFLKYVVDKLNFKPLEQEMPVQFQVVELPSGHHLCKVKALNKGDANSEVTVYYQSGTRSLREYTLMELLVMHMEEPCFDFLRTKQTLGYHVYPTCRNTSGILGFSVTVGTQATKYNSEVVDKKIEEFLSSFEEKIENLTEEAFNTQVTALIKLKECEDTHLGEEVDRNWNEVVTQQYLFDRLAHEIEALKSFSKSDLVNWFKAHRGPGSKMLSVHVVGYGKYELEEDGTPSSEDSNSSCEVMQLTYLPTSPLLAIVSSPLLISGLSQQHSTFSPTIK

SEQ ID NO: 55345 - protein, 215 aa, Homo sapiens
  Payload ID: 10927
  Gene Symbol: NACA
  Gene Name: nascent polypeptide-associated complex alpha subunit
  Uniprot ID: Q13765
  ENSP ID: ENSP00000349212
MPGEATETVPATEQELPQPQAETGSGTESDSDESVPELEEQDSTQATTQQAQLAAAAEIDEEPVSKAKQSRSEKKARKAMSKLGLRQVTGVTRVTIRKSKNILFVITKPDVYKSPASDTYIVFGEAKIEDLSQQAQLAAAEKFKVQGEAVSNIQENTQTPTVQEESEEEEVDETGVEVKDIELVMSQANVSRAKAVRALKNNSNDIVNAIMELTM

SEQ ID NO: 55346 - protein, 215 aa, Homo sapiens; identical to SEQ ID NO: 55345
  Payload ID: 10927
  Gene Symbol: NACA
  Gene Name: nascent polypeptide-associated complex alpha subunit
  Uniprot ID: Q13765
  ENSP ID: ENSP00000377469

SEQ ID NO: 55347 - protein, 2078 aa, Homo sapiens
  Payload ID: 10927
  Gene Symbol: NACA
  Gene Name: nascent polypeptide-associated complex alpha subunit
  Uniprot ID: E9PAV3
  ENSP ID: ENSP00000403817
MPGEATETVPATEQELPQPQAETAVLPMSSALSVTAALGQPGPTLPPPCSPAPQQCPLSAANQASPFPSPSTIASTPLEVPFPQSSSGTALPLGTAPEAPTFLPNLIGPPISPAALALASPMIAPTLKGTPSSSAPLALVALAPHSVQKSSAFPPNLLTSPPSVAVAESGSVITLSAPIAPSEPKTNLNKVPSEVVPNPKGTPSPPCIVSTVPYHCVTPMASIQSGVASLPQTTPTTTLAIASPQVKDTTISSVLISPQNPGSLSLKGPVSPPAALSLSTQSLPVVTSSQKTAGPNTPPDFPISLGSHLAPLHQSSFGSVQLLGQTGPSALSDPTVKTISVDHSSTGASYPSQRSVIPPLPSRNEVVPATVAAFPVVAPSVDKGPSTISSITCSPSGSLNVATSFSLSPTTSLILKSSPNATYHYPLVAQMPVSSVGTTPLVVTNPCTIAAAPTTTFEVATCVSPPMSSGPISNIEPTSPAALVMAPVAPKEPSTQVATTLRIPVSPPLPDPEDLKNLPSSVLVKFPTQKDLQTVPASLEGAPFSPAQAGLTTKKDPTVLPLVQAAPKNSPSFQSTSSSPEIPLSPEATLAKKSLGEPLPIGKPASSMTSPLGVNSSASVIKTDSYAGPDSAGPLLKSSLITPTVAAFPLESADPAGVAPTTAKGTSTYTTTASPFLEGTVSLAPKNHPVKEGTLTTLPLVPTASENCPVAPSPQNTCAPLATLVLAPEIPKSVPSPSLPPAGTPPGTKKVDGISHTSALAPVASSPKECPTEDSGASATASSKGTLTYLADSPSPLGVSVSPQTKRPPTKKGSAGPDTPIGNLSSPVSPVEASFLPENSLSFQGSKDSPATTHSPTPPSPKGAPTPSAVTPLSPKGVTLPPKETPTPSVVNLPFPKEGPATPAPKQAPALSMTSSSPKKARATPAPKGIPASPSPKGAPTPPAATPPSPKGGPATPSPKWAPTPPAATPPSPKGGPATPSPKGAPTPPAATPPSPKGGPATPSPKGAPTPPAVTPPSPKGSPAATPFPKGASTPPAATPPSPKGSPAATPLPKGAPTTPAATLPSPKGGPATPSLKGAPTPPAATPPSPKGGPATPSPKGAPMPPAATPPSPKGGLATPPHKGAPTTPAATPPSPKGGLATPPPKGAPTTPAATPPSPKGGLATPPPKGAPTTPAATPPSPKGGLATPSPKGAPTTPAATPPSPKGGLATPSPKGAPTTPAATPPSPKGGLATPSPKGAPTTPAATPPSPKGGPATPPPKGAPTPPAATPPSLKGGLATPPHKGAPNPAVVTPPSPKGGPATSPPKGAPTPPAATPPSPKGSPGTPPPKGAPTPPAVTPPSPKGTPTLPATTPSSKGGPTTPSSKEGPTPPAATPSHKGGPAMTPPSPKRGPAIPSPKGDPTSPAVIPLSPKKAPATPVTREGAATPSKGDLTPPAVTPVSLKKAPATSAPKGGPATPSSKGDPTLPAVTPPSPKEPPAPKQVATSSSPKKAPATPAPMGAPTLPAVIPSSPKEVPATPSSRRDPIAPTATLLSKKTPATLAPKEALIPPAMTVPSPKKTPAIPTPKEAPATPSSKEASSPPAVTPSTYKGAPSPKELLIPPAVTSPSPKEAPTPPAVTPPSPEKGPATPAPKGTPTSPPVTPSSLKDSPTSPASVTCKMGATVPQASKGLPAKKGPTALKEVLVAPAPESTPIITAPTRKGPQTKKSSATSPPICPDPSAKNGSKGPLSTVAPAPLLPVQKDSSKTAKGKDASHSPKGPLAPPESKASTPLTAAAFEKVLPKPESASVSAAPSPPVSLPLAPSPVPTLPPKQQFLPSSPGLVLESPSKPLAPADEDELLPLIPPEPISGGVPFQSVLVNMPTPKSAGIPVPTPSAKQPVTKNNKGSGTESDSDESVPELEEQDSTQATTQQAQLAAAAEIDEEPVSKAKQSRSEKKARKAMSKLGLRQVTGVTRVTIRKSKNILFVITKPDVYKSPASDTYIVFGEAKIEDLSQQAQLAAAEKFKVQGEAVSNIQENTQTPTVQEESEEEEVDETGVEVKDIELVMSQANVSRAKAVRALKNNSNDIVNAIMELTM

SEQ ID NO: 55348 - protein, 72 aa, Homo sapiens
  Payload ID: 10927
  Gene Symbol: NACA
  Gene Name: nascent polypeptide-associated complex alpha subunit
  ENSP ID: ENSP00000446745
MPGEATETVPATEQELPQPQAETGSGTESDSDESVPELEEQELLESLSGNLRISSLSSQNQMSTRALLQILT

SEQ ID NO: 55349 - protein, 215 aa, Homo sapiens; identical to SEQ ID NO: 55345
  Payload ID: 10927
  Gene Symbol: NACA
  Gene Name: nascent polypeptide-associated complex alpha subunit
  Uniprot ID: Q13765
  ENSP ID: ENSP00000446801

SEQ ID NO: 55350 - protein, 71 aa, Homo sapiens
  Payload ID: 10927
  Gene Symbol: NACA
  Gene Name: nascent polypeptide-associated complex alpha subunit
  ENSP ID: ENSP00000446933
MSKLGLRQVTGVTRVTIRKSKNILFVITKPDVYKSPASDTYIVFGEAKIEDLSQQAQLAAAEKFKVQGEAV

SEQ ID NO: 55351 - protein, 198 aa, Homo sapiens
  Payload ID: 10927
  Gene Symbol: NACA
  Gene Name: nascent polypeptide-associated complex alpha subunit
  ENSP ID: ENSP00000447133
MPGEATETVPATEQELPQPQAETGSGTESDSDESVPELEEQDSTQATTQQAQLAAAAEIDEEPVSKAKQSRSEKKARKAMSKLGLRQVTGVTRVTIRKSKNILFVITKPDVYKSPASDTYIVFGEAKIEDLSQQAQLAAAEKFKVQGEAVSNIQENTQTPTVQEESEEEEVDETGVEVKDIELVMSQANVSRAKAVRA

SEQ ID NO: 55352 - protein, 34 aa, Homo sapiens
  Payload ID: 10927
  Gene Symbol: NACA
  Gene Name: nascent polypeptide-associated complex alpha subunit
  ENSP ID: ENSP00000447207
MPGEATETVPATEQELPQPQAETVVSHLRVWNRI

SEQ ID NO: 55353 - protein, 5 aa, Homo sapiens
  Payload ID: 10927
  Gene Symbol: NACA
  Gene Name: nascent polypeptide-associated complex alpha subunit
  ENSP ID: ENSP00000447666
MPGEA

SEQ ID NO: 55354 - protein, 136 aa, Homo sapiens
  Payload ID: 10927
  Gene Symbol: NACA
  Gene Name: nascent polypeptide-associated complex alpha subunit
  ENSP ID: ENSP00000447705
MSKLGLRQVTGVTRVTIRKSKNILFVITKPDVYKSPASDTYIVFGEAKIEDLSQQAQLAAAEKFKVQGEAVSNIQENTQTPTVQEESEEEEVDETGVEVKDIELVMSQANVSRAKAVRALKNNSNDIVNAIMELTM

SEQ ID NO: 55355 - protein, 126 aa, Homo sapiens
  Payload ID: 10927
  Gene Symbol: NACA
  Gene Name: nascent polypeptide-associated complex alpha subunit
  ENSP ID: ENSP00000447764
MPGEATETVPATEQELPQPQAETGSGTESDSDESVPELEEQDSTQATTQQAQLAAAAEIDEEPVSKAKQSRSEKKARKAMSKLGLRQVTGVTRVTIRKSKNILFVITKPDVYKSPASDTYIVFGEA

SEQ ID NO: 55356 - protein, 215 aa, Homo sapiens; identical to SEQ ID NO: 55345
  Payload ID: 10927
  Gene Symbol: NACA
  Gene Name: nascent polypeptide-associated complex alpha subunit
  Uniprot ID: Q13765
  ENSP ID: ENSP00000447821

SEQ ID NO: 55357 - protein, 925 aa, Homo sapiens
  Payload ID: 10927
  Gene Symbol: NACA
  Gene Name: nascent polypeptide-associated complex alpha subunit
  Uniprot ID: E9PAV3
  ENSP ID: ENSP00000448035
MPGEATETVPATEQELPQPQAETAVLPMSSALSVTAALGQPGPTLPPPCSPAPQQCPLSAANQASPFPSPSTIASTPLEVPFPQSSSGTALPLGTAPEAPTFLPNLIGPPISPAALALASPMIAPTLKGTPSSSAPLALVALAPHSVQKSSAFPPNLLTSPPSVAVAESGSVITLSAPIAPSEPKTNLNKVPSEVVPNPKGTPSPPCIVSTVPYHCVTPMASIQSGVASLPQTTPTTTLAIASPQVKDTTISSVLISPQNPGSLSLKGPVSPPAALSLSTQSLPVVTSSQKTAGPNTPPDFPISLGSHLAPLHQSSFGSVQLLGQTGPSALSDPTVKTISVDHSSTGASYPSQRSVIPPLPSRNEVVPATVAAFPVVAPSVDKGPSTISSITCSPSGSLNVATSFSLSPTTSLILKSSPNATYHYPLVAQMPVSSVGTTPLVVTNPCTIAAAPTTTFEVATCVSPPMSSGPISNIEPTSPAALVMAPVAPKEPSTQVATTLRIPVSPPLPDPEDLKNLPSSVLVKFPTQKDLQTVPASLEGAPFSPAQAGLTTKKDPTVLPLVQAAPKNSPSFQSTSSSPEIPLSPEATLAKKSLGEPLPIVAAFPLESADPAGVAPTTAKAAAFEKVLPKPESASVSAAPSPPVSLPLAPSPVPTLPPKQQFLPSSPGLVLESPSKPLAPADEDELLPLIPPEPISGGVPFQSVLVNMPTPKSAGIPVPTPSAKQPVTKNNKGSGTESDSDESVPELEEQDSTQATTQQAQLAAAAEIDEEPVSKAKQSRSEKKARKAMSKLGLRQVTGVTRVTIRKSKNILFVITKPDVYKSPASDTYIVFGEAKIEDLSQQAQLAAAEKFKVQGEAVSNIQENTQTPTVQEESEEEEVDETGVEVKDIELVMSQANVSRAKAVRALKNNSNDIVNAIMELTM

SEQ ID NO: 55358 - protein, 213 aa, Homo sapiens
  Payload ID: 10927
  Gene Symbol: NACA
  Gene Name: nascent polypeptide-associated complex alpha subunit
  ENSP ID: ENSP00000448039
TVAAFPLESADPAGVAPTTAKGSGTESDSDESVPELEEQDSTQATTQQAQLAAAAEIDEEPVSKAKQSRSEKKARKAMSKLGLRQVTGVTRVTIRKSKNILFVITKPDVYKSPASDTYIVFGEAKIEDLSQQAQLAAAEKFKVQGEAVSNIQENTQTPTVQEESEEEEVDETGVEVKDIELVMSQANVSRAKAVRALKNNSNDIVNAIMELTM

SEQ ID NO: 55359 - protein, 148 aa, Homo sapiens
  Payload ID: 10927
  Gene Symbol: NACA
  Gene Name: nascent polypeptide-associated complex alpha subunit
  ENSP ID: ENSP00000450383
MPGEATETVPATEQELPQPQAETESDSDESVPELEEQDSTQATTQQAQLAAAAEIDEEPVSKAKQSRSEKKARKAMSKLGLRQVTGVTRVTIRKSKNILFVITKPDVYKSPASDTYIVFGEAKIEDLSQQAQLAAAEKFKVQGEAVSN

SEQ ID NO: 55360 - protein, 215 aa, Homo sapiens
  Payload ID: 10928
  Gene Symbol: NACA2
  Gene Name: nascent polypeptide-associated complex alpha subunit 2
  Uniprot ID: Q9H009
  ENSP ID: ENSP00000427802
MPGEATETVPATEQELPQSQAETGSGTASDSGESVPGIEEQDSTQTTTQKAWLVAAAEIDEEPVGKAKQSRSEKRARKAMSKLGLLQVTGVTRVTIWKSKNILFVITKLDVYKSPASDAYIVFGEAKIQDLSQQAQLAAAEKFRVQGEAVGNIQENTQTPTVQEESEEEEVDETGVEVKDVKLVMSQANVSRAKAVRALKNNSNDIVNAIMELTV

SEQ ID NO: 55361 - protein, 101 aa, Homo sapiens
  Payload ID: 10929
  Gene Symbol: NPPA
  Gene Name: natriuretic peptide A
  ENSP ID: ENSP00000365659
MPLEDEVVPPQVLSEPNEEAGAALSPLPEVPPWTGEVSPAQRDGGALGRGPWDSSDRSALLKSKLRALLTAPRSLRRSSCFGGRMDRIGAQSGLGCNSFRY

SEQ ID NO: 55362 - protein, 151 aa, Homo sapiens
  Payload ID: 10929
  Gene Symbol: NPPA
  Gene Name: natriuretic peptide A
  Uniprot ID: P01160
  ENSP ID: ENSP00000365663
MSSFSTTTVSFLLLLAFQLLGQTRANPMYNAVSNADLMDFKNLLDHLEEKMPLEDEVVPPQVLSEPNEEAGAALSPLPEVPPWTGEVSPAQRDGGALGRGPWDSSDRSALLKSKLRALLTAPRSLRRSSCFGGRMDRIGAQSGLGCNSFRY

SEQ ID NO: 55363 - protein, 152 aa, Homo sapiens [sequence omitted]

SEQ ID NO: 55364 - protein, 134 aa, Homo sapiens
  Payload ID: 10930
  Gene Symbol: NPPB
  Gene Name: natriuretic peptide B
  Uniprot ID: P16860
  ENSP ID: ENSP00000365651
MDPQTAPSRALLLLLFLHLAFLGGRSHPLGSPGSASDLETSGLQEQRNHLQGKLSELQVEQTSLEPLQESPRPTGVWKSREVATEGIRGHRKMVLYTLRAPRSPKMVQGSGCFGRKMDRISSSSGLGCKVLRRH

SEQ ID NO: 55365 - protein, 126 aa, Homo sapiens
  Payload ID: 10931
  Gene Symbol: NPPC
  Gene Name: natriuretic peptide C
  Uniprot ID: P23582
  ENSP ID: ENSP00000295440
MHLSQLLACALLLTLLSLRPSEAKPGAPPKVPRTPPAEELAEPQAAGGGQKKGDKAPGGGGANLKGDRSRLLRDLRVDTKSRAAWARLLQEHPNARKYKGANKKGLSKGCFGLKLDRIGSMSGLGC

SEQ ID NO: 55366 - protein, 126 aa, Homo sapiens; identical to SEQ ID NO: 55365
  Payload ID: 10931
  Gene Symbol: NPPC
  Gene Name: natriuretic peptide C
  Uniprot ID: P23582
  ENSP ID: ENSP00000387159

SEQ ID NO: 55367 - protein, 1061 aa, Homo sapiens
  Payload ID: 10932
  Gene Symbol: NPR1
  Gene Name: natriuretic peptide receptor 1
  Uniprot ID: P16066
  ENSP ID: ENSP00000357669
MPGPRRPAGSRLRLLLLLLLPPLLLLLRGSHAGNLTVAVVLPLANTSYPWSWARVGPAVELALAQVKARPDLLPGWTVRTVLGSSENALGVCSDTAAPLAAVDLKWEHNPAVFLGPGCVYAAAPVGRFTAHWRVPLLTAGAPALGFGVKDEYALTTRAGPSYAKLGDFVAALHRRLGWERQALMLYAYRPGDEEHCFFLVEGLFMRVRDRLNITVDHLEFAEDDLSHYTRLLRTMPRKGRVIYICSSPDAFRTLMLLALEAGLCGEDYVFFHLDIFGQSLQGGQGPAPRRPWERGDGQDVSARQAFQAAKIITYKDPDNPEYLEFLKQLKHLAYEQFNFTMEDGLVNTIPASFHDGLLLYIQAVTETLAHGGTVTDGENITQRMWNRSFQGVTGYLKIDSSGDRETDFSLWDMDPENGAFRVVLNYNGTSQELVAVSGRKLNWPLGYPPPDIPKCGFDNEDPACNQDHLSTLEVLALVGSLSLLGILIVSFFIYRKMQLEKELASELWRVRWEDVEPSSLERHLRSAGSRLTLSGRGSNYGSLLTTEGQFQVFAKTAYYKGNLVAVKRVNRKRIELTRKVLFELKHMRDVQNEHLTRFVGACTDPPNICILTEYCPRGSLQDILENESITLDWMFRYSLTNDIVKGMLFLHNGAICSHGNLKSSNCVVDGRFVLKITDYGLESFRDLDPEQGHTVYAKKLWTAPELLRMASPPVRGSQAGDVYSFGIILQEIALRSGVFHVEGLDLSPKEIIERVTRGEQPPFRPSLALQSHLEELGLLMQRCWAEDPQERPPFQQIRLTLRKFNRENSSNILDNLLSRMEQYANNLEELVEERTQAYLEEKRKAEALLYQILPHSVAEQLKRGETVQAEAFDSVTIYFSDIVGFTALSAESTPMQVVTLLNDLYTCFDAVIDNFDVYKVETIGDAYMVVSGLPVRNGRLHACEVARMALALLDAVRSFRIRHRPQEQLRLRIGIHTGPVCAGVVGLKMPRYCLFGDTVNTASRMESNGEALKIHLSSETKAVLEEFGGFELELRGDVEMKGKGKVRTYWLLGERGSSTRG

SEQ ID NO: 55368 - protein, 1047 aa, Homo sapiens
  Payload ID: 10933
  Gene Symbol: NPR2
  Gene Name: natriuretic peptide receptor 2
  Uniprot ID: P20594
  ENSP ID: ENSP00000341083
MALPSLLLLVAALAGGVRPPGARNLTLAVVLPEHNLSYAWAWPRVGPAVALAVEALGRALPVDLRFVSSELEGACSEYLAPLSAVDLKLYHDPDLLLGPGCVYPAASVARFASHWRLPLLTAGAVASGFSAKNDHYRTLVRTGPSAPKLGEFVVTLHGHFNWTARAALLYLDARTDDRPHYFTIEGVFEALQGSNLSVQHQVYAREPGGPEQATHFIRANGRIVYICGPLEMLHEILLQAQRENLTNGDYVFFYLDVFGESLRAGPTRATGRPWQDNRTREQAQALREAFQTVLVITYREPPNPEYQEFQNRLLIRAREDFGVELGPSLMNLIAGCFYDGILLYAEVLNETIQEGGTREDGLRIVEKMQGRRYHGVTGLVVMDKNNDRETDFVLWAMGDLDSGDFQPAAHYSGAEKQIWWTGRPIPWVKGAPPSDNPPCAFDLDDPSCDKTPLSTLAIVALGTGITFIMFGVSSFLIFRKLMLEKELASMLWRIRWEELQFGNSERYHKGAGSRLTLSLRGSSYGSLMTAHGKYQIFANTGHFKGNVVAIKHVNKKRIELTRQVLFELKHMRDVQFNHLTRFIGACIDPPNICIVTEYCPRGSLQDILENDSINLDWMFRYSLINDLVKGMAFLHNSIISSHGSLKSSNCVVDSRFVLKITDYGLASFRSTAEPDDSHALYAKKLWTAPELLSGNPLPTTGMQKADVYSFGIILQEIALRSGPFYLEGLDLSPKEIVQKVRNGQRPYFRPSIDRTQLNEELVLLMERCWAQDPAERPDFGQIKGFIRRFNKEGGTSILDNLLLRMEQYANNLEKLVEERTQAYLEEKRKAEALLYQILPHSVAEQLKRGETVQAEAFDSVTIYFSDIVGFTALSAESTPMQVVTLLNDLYTCFDAIIDNFDVYKVETIGDAYMVVSGLPGRNGQRHAPEIARMALALLDAVSSFRIRHRPHDQLRLRIGVHTGPVCAGVVGLKMPRYCLFGDTVNTASRMESNGQALKIHVSSTTKDALDELGCFQLELRGDVEMKGKGKMRTYWLLGERKGPPGLL

SEQ ID NO: 55369 - protein, 164 aa, Homo sapiens [sequence omitted]

SEQ ID NO: 55370 - protein, 275 aa, Homo sapiens
  Payload ID: 10933
  Gene Symbol: NPR2
  Gene Name: natriuretic peptide receptor 2
  ENSP ID: ENSP00000399204
  MOD_RES (1)..(1): Any amino acid
XSIISSHGSLKSSNCVVDSRFVLKITDYGLASFRSTAEPDDSHALYASMQKADVYSFGIILQEIALRSGPFYLEGLDLSPKEIVQKVRNGQRPYFRPSIDRTQLNEELVLLMERCWAQDPAERPDFGQIKGFIRRFNKEGGTSILDNLLLRMEQYANNLEKLVEERTQAYLEEKRKAEALLYQILPHSVAEQLKRGETVQAEAFDSVTIYFSDIVGFTALSAESTPMQVVTLLNDLYTCFDAIIDNFDVYKVETIGDAYMVVSGLPGRNGQRHAP

SEQ ID NO: 55371 - protein, 76 aa, Homo sapiens
  Payload ID: 10933
  Gene Symbol: NPR2
  Gene Name: natriuretic peptide receptor 2
  ENSP ID: ENSP00000402902
  MOD_RES (1)..(1): Any amino acid
XPHSVAEQLKRGETVQAEAFDSVTIYFSDIVGFTALSAESTPMQVVTLLNDLYTCFDAIIDNFDVYKGQSVLGLLA

SEQ ID NO: 55372 - protein, 541 aa, Homo sapiens
  Payload ID: 10934
  Gene Symbol: NPR3
  Gene Name: natriuretic peptide receptor 3
  Uniprot ID: P17342
  ENSP ID: ENSP00000265074
MPSLLVLTFSPCVLLGWALLAGGTGGGGVGGGGGGAGIGGGRQEREALPPQKIEVLVLLPQDDSYLFSLTRVRPAIEYALRSVEGNGTGRRLLPPGTRFQVAYEDSDCGNRALFSLVDRVAAARGAKPDLILGPVCEYAAAPVARLASHWDLPMLSAGALAAGFQHKDSEYSHLTRVAPAYAKMGEMMLALFRHHHWSRAALVYSDDKLERNCYFTLEGVHEVFQEEGLHTSIYSFDETKDLDLEDIVRNIQASERVVIMCASSDTIRSIMLVAHRHGMTSGDYAFFNIELFNSSSYGDGSWKRGDKHDFEAKQAYSSLQTVTLLRTVKPEFEKFSMEVKSSVEKQGLNMEDYVNMFVEGFHDAILLYVLALHEVLRAGYSKKDGGKIIQQTWNRTFEGIAGQVSIDANGDRYGDFSVIAMTDVEAGTQEVIGDYFGKEGRFEMRPNVKYPWGPLKLRIDENRIVEHTNSSPCKSSGGLEESAVTGIVVGALLGAGLLMAFYFFRKKYRITIERRTQQEESNLGKHRELREDSIRSHFSVA

SEQ ID NO: 55373 - protein, 324 aa, Homo sapiens
  Payload ID: 10934
  Gene Symbol: NPR3
  Gene Name: natriuretic peptide receptor 3
  Uniprot ID: P17342
  ENSP ID: ENSP00000318340
MEPSALGPWSLFPDLAPRDQEGQVLAPRRCFRRECGQNEKVVIMCASSDTIRSIMLVAHRHGMTSGDYAFFNIELFNSSSYGDGSWKRGDKHDFEAKQAYSSLQTVTLLRTVKPEFEKFSMEVKSSVEKQGLNMEDYVNMFVEGFHDAILLYVLALHEVLRAGYSKKDGGKIIQQTWNRTFEGIAGQVSIDANGDRYGDFSVIAMTDVEAGTQEVIGDYFGKEGRFEMRPNVKYPWGPLKLRIDENRIVEHTNSSPCKSCGLEESAVTGIVVGALLGAGLLMAFYFFRKKYRITIERRTQQEESNLGKHRELREDSIRSHFSVA

SEQ ID NO: 55374 - protein, 325 aa, Homo sapiens
  Payload ID: 10934
  Gene Symbol: NPR3
  Gene Name: natriuretic peptide receptor 3
  ENSP ID: ENSP00000388408
MEPSALGPWSLFPDLAPRDQEGQVLAPRRCFRRECGQNEKVVIMCASSDTIRSIMLVAHRHGMTSGDYAFFNIELFNSSSYGDGSWKRGDKHDFEAKQAYSSLQTVTLLRTVKPEFEKFSMEVKSSVEKQGLNMEDYVNMFVEGFHDAILLYVLALHEVLRAGYSKKDGGKIIQQTWNRTFEGIAGQVSIDANGDRYGDFSVIAMTDVEAGTQEVIGDYFGKEGRFEMRPNVKYPWGPLKLRIDENRIVEHTNSSPCKSSGGLEESAVTGIVVGALLGAGLLMAFYFFRKKYRITIERRTQQEESNLGKHRELREDSIRSHFSVA

SEQ ID NO: 55375 - protein, 540 aa, Homo sapiens
  Payload ID: 10934
  Gene Symbol: NPR3
  Gene Name: natriuretic peptide receptor 3
  Uniprot ID: P17342
  ENSP ID: ENSP00000398028
MPSLLVLTFSPCVLLGWALLAGGTGGGGVGGGGGGAGIGGGRQEREALPPQKIEVLVLLPQDDSYLFSLTRVRPAIEYALRSVEGNGTGRRLLPPGTRFQVAYEDSDCGNRALFSLVDRVAAARGAKPDLILGPVCEYAAAPVARLASHWDLPMLSAGALAAGFQHKDSEYSHLTRVAPAYAKMGEMMLALFRHHHWSRAALVYSDDKLERNCYFTLEGVHEVFQEEGLHTSIYSFDETKDLDLEDIVRNIQASERVVIMCASSDTIRSIMLVAHRHGMTSGDYAFFNIELFNSSSYGDGSWKRGDKHDFEAKQAYSSLQTVTLLRTVKPEFEKFSMEVKSSVEKQGLNMEDYVNMFVEGFHDAILLYVLALHEVLRAGYSKKDGGKIIQQTWNRTFEGIAGQVSIDANGDRYGDFSVIAMTDVEAGTQEVIGDYFGKEGRFEMRPNVKYPWGPLKLRIDENRIVEHTNSSPCKSCGLEESAVTGIVVGALLGAGLLMAFYFFRKKYRITIERRTQQEESNLGKHRELREDSIRSHFSVA

SEQ ID NO: 55376 - protein, 88 aa, Homo sapiens
  Payload ID: 10934
  Gene Symbol: NPR3
  Gene Name: natriuretic peptide receptor 3
  ENSP ID: ENSP00000423730
  MOD_RES (1)..(1): Any amino acid
XEMMLALFRHHHWSRAALVYSDDKLERNCYFTLEGVHEVFQEEGLHTSIYSFDETKDLDLEDIVRNIQASERVLGLICWNPSGRKFSS

SEQ ID NO: 55377 - protein, 252 aa, Homo sapiens
  Payload ID: 10934
  Gene Symbol: NPR3
  Gene Name: natriuretic peptide receptor 3
  ENSP ID: ENSP00000425325
MAEGCAVYGTWPWGGMFQLFRPSALAGLCSIGLVVIMCASSDTIRSIMLVAHRHGMTSGDYAFFNIELFNSSSYGDGSWKRGDKHDFEAKQAYSSLQTVTLLRTVKPEFEKFSMEVKSSVEKQGLNMEDYVNMFVEGFHDAILLYVLALHEVLRAGYSKKDGGKIIQQTWNRTFEGIAGQVSIDANGDRYGDFSVIAMTDVEAGTQEVIGDYFGKEGRFEMRPNVKYPWGPLKLRIDENRIVEHTNSSPCKS

SEQ ID NO: 55378 - protein, 304 aa, Homo sapiens
  Payload ID: 10935
  Gene Symbol: NCR1
  Gene Name: natural cytotoxicity triggering receptor 1
  ENSP ID: ENSP00000291890
MSSTLPALLCVGLCLSQRISAQQQTLPKPFIWAEPHFMVPKEKQVTICCQGNYGAVEYQLHFEGSLFAVDRPKPPERINKVQFYIPDMNSRMAGQYSCIYRVGELWSEPSNLLDLVVTEMYDTPTLSVHPGPEVISGEKVTFYCRLDTATSMFLLLKEGRSSHVQRGYGKVQAEFPLGPVTTAHRGTYRCFGSYNNHAWSFPSEPVKLLVTGDIENTSLAPEDPTFPADTWGTYLLTTETGLQKDHALWDHTAQNLLRMGLAFLVLVALVWFLVEDWLSRKRTRERASRASTWEGRRRLNTQTL

SEQ ID NO: 55379 - protein, 287 aa, Homo sapiens
  Payload ID: 10935
  Gene Symbol: NCR1
  Gene Name: natural cytotoxicity triggering receptor 1
  ENSP ID: ENSP00000339515
MSSTLPALLCVGLCLSQRISAQQQTLPKPFIWAEPHFMVPKEKQVTICCQGNYGAVEYQLHFEGSLFAVDRPKPPERINKVQFYIPDMNSRMAGQYSCIYRVGELWSEPSNLLDLVVTEMYDTPTLSVHPGPEVISGEKVTFYCRLDTATSMFLLLKEGRSSHVQRGYGKVQAEFPLGPVTTAHRGTYRCFGSYNNHAWSFPSEPVKLLVTGDIENTSLAPEDPTFPDHALWDHTAQNLLRMGLAFLVLVALVWFLVEDWLSRKRTRERASRASTWEGRRRLNTQTL

SEQ ID NO: 55380 - protein, 209 aa, Homo sapiens
  Payload ID: 10935
  Gene Symbol: NCR1
  Gene Name: natural cytotoxicity triggering receptor 1
  Uniprot ID: O76036
  ENSP ID: ENSP00000344358
MSSTLPALLCVGLCLSQRISAQQQMYDTPTLSVHPGPEVISGEKVTFYCRLDTATSMFLLLKEGRSSHVQRGYGKVQAEFPLGPVTTAHRGTYRCFGSYNNHAWSFPSEPVKLLVTGDIENTSLAPEDPTFPADTWGTYLLTTETGLQKDHALWDHTAQNLLRMGLAFLVLVALVWFLVEDWLSRKRTRERASRASTWEGRRRLNTQTL

SEQ ID NO: 55381 - protein, 197 aa, Homo sapiens
  Payload ID: 10935
  Gene Symbol: NCR1
  Gene Name: natural cytotoxicity triggering receptor 1
  Uniprot ID: O76036
  ENSP ID: ENSP00000349972
MSSTLPALLCVEMYDTPTLSVHPGPEVISGEKVTFYCRLDTATSMFLLLKEGRSSHVQRGYGKVQAEFPLGPVTTAHRGTYRCFGSYNNHAWSFPSEPVKLLVTGDIENTSLAPEDPTFPADTWGTYLLTTETGLQKDHALWDHTAQNLLRMGLAFLVLVALVWFLVEDWLSRKRTRERASRASTWEGRRRLNTQTL

SEQ ID NO: 55382 - protein, 291 aa, Homo sapiens
  Payload ID: 10935
  Gene Symbol: NCR1
  Gene Name: natural cytotoxicity triggering receptor 1
  ENSP ID: ENSP00000469750
MSSTLPALLCVETLPKPFIWAEPHFMVPKEKQVTICCQGNYGAVEYQLHFEGSLFAVDRPKPPERINKVQFYIPDMNSRMAGQYSCIYRVGELWSEPSNLLDLVVTEMYDTPTLSVHPGPEVISGEKVTFYCRLDTATSMFLLLKEGRSSHVQRGYGKVQAEFPLGPVTTAHRGTYRCFGSYNNHAWSFPSEPVKLLVTGDIENTSLAPEDPTFPDTWGTYLLTTETGLQKDHALWDHTAQNLLRMGLAFLVLVALVWFLVEDWLSRKRTRERASRASTWEGRRRLNTQTL

SEQ ID NO: 55383 - protein, 303 aa, Homo sapiens
  Payload ID: 10935
  Gene Symbol: NCR1
  Gene Name: natural cytotoxicity triggering receptor 1
  ENSP ID: ENSP00000471986
MSSTLPALLCVGLCLSQRISAQQQTLPKPFIWAEPHFMVPKEKQVTICCQGNYGAVEYQLHFEGSLFAVDRPKPPERINKVQFYIPDMNSRMAGQYSCIYRVGELWSEPSNLLDLVVTEMYDTPTLSVHPGPEVISGEKVTFYCRLDTATSMFLLLKEGRSSHVQRGYGKVQAEFPLGPVTTAHRGTYRCFGSYNNHAWSFPSEPVKLLVTGDIENTSLAPEDPTFPDTWGTYLLTTETGLQKDHALWDHTAQNLLRMGLAFLVLVALVWFLVEDWLSRKRTRERASRASTWEGRRRLNTQTL

SEQ ID NO: 55384 - protein, 192 aa, Homo sapiens
  Payload ID: 10935
  Gene Symbol: NCR1
  Gene Name: natural cytotoxicity triggering receptor 1
  Uniprot ID: O76036
  ENSP ID: ENSP00000477625
MSSTLPALLCVGLCLSQRISAQQQMYDTPTLSVHPGPEVISGEKVTFYCRLDTATSMFLLLKEGRSSHVQRGYGKVQAEFPLGPVTTAHRGTYRCFGSYNNHAWSFPSEPVKLLVTGDIENTSLAPEDPTFPDHALWDHTAQNLLRMGLAFLVLVALVWFLVEDWLSRKRTRERASRASTWEGRRRLNTQTL

SEQ ID NO: 55385 - protein, 215 aa, Homo sapiens
  Payload ID: 10935
  Gene Symbol: NCR1
  Gene Name: natural cytotoxicity triggering receptor 1
  ENSP ID: ENSP00000477939
MSSTLPALLCVETLPKPFIWAEPHFMVPKEKQVTICCQGNYGAVEYQLHFEGSLFAVDRPKPPERINKVQFYIPDMNSRMAGQYSCIYRVGELWSEPSNLLDLVVTEMYDTPTLSVHPGPEVISGEKVTFYCRLDTATSMFLLLKEGRSSHVQRGYGKVQAEFPLGPVTTAHRGTYRCFGSYNNHAWSFPSEPVKLLVTGDIENTSLAPEDPTFP

SEQ ID NO: 55386 - protein, 227 aa, Homo sapiens
  Payload ID: 10935
  Gene Symbol: NCR1
  Gene Name: natural cytotoxicity triggering receptor 1
  ENSP ID: ENSP00000477986
MSSTLPALLCVGLCLSQRISAQQQTLPKPFIWAEPHFMVPKEKQVTICCQGNYGAVEYQLHFEGSLFAVDRPKPPERINKVQFYIPDMNSRMAGQYSCIYRVGELWSEPSNLLDLVVTEMYDTPTLSVHPGPEVISGEKVTFYCRLDTATSMFLLLKEGRSSHVQRGYGKVQAEFPLGPVTTAHRGTYRCFGSYNNHAWSFPSEPVKLLVTGDIENTSLAPEDPTFP

SEQ ID NO: 55387 - protein, 215 aa, Homo sapiens; identical to SEQ ID NO: 55385
  Payload ID: 10935
  Gene Symbol: NCR1
  Gene Name: natural cytotoxicity triggering receptor 1
  ENSP ID: ENSP00000478204

SEQ ID NO: 55388 - protein, 227 aa, Homo sapiens; identical to SEQ ID NO: 55386
  Payload ID: 10935
  Gene Symbol: NCR1
  Gene Name: natural cytotoxicity triggering receptor 1
  ENSP ID: ENSP00000478444

SEQ ID NO: 55389 - protein, 132 aa, Homo sapiens
  Payload ID: 10935
  Gene Symbol: NCR1
  Gene Name: natural cytotoxicity triggering receptor 1
  ENSP ID: ENSP00000478452
MSSTLPALLCVGLCLSQRISAQQQMYDTPTLSVHPGPEVISGEKVTFYCRLDTATSMFLLLKEGRSSHVQRGYGKVQAEFPLGPVTTAHRGTYRCFGSYNNHAWSFPSEPVKLLVTGDIENTSLAPEDPTFP

SEQ ID NO: 55390 - protein, 291 aa, Homo sapiens
  Payload ID: 10935
  Gene Symbol: NCR1
  Gene Name: natural cytotoxicity triggering receptor 1
  ENSP ID: ENSP00000478483
MSSTLPALLCVETLPKPFIWAEPHFMVPKEKQVTICCQGNYGAVEYQLHFEGSLFAVDRPKPPERINKVKFYIPDMNSRMAGQYSCIYRVGELWSEPSNLLDLVVTEMYDTPTLSVHPGPEVISGEKVTFYCRLDTATSMFLLLKEGRSSHVQRGYGKVQAEFPLGPVTTAHRGTYRCFGSYNNHAWSFPSEPVKLLVTGDIENTSLAPEDPTFPDTWGTYLLTTETGLQKDHALWDHTAQNLLRMGLAFLVLVALVWFLVEDWLSRKRTRERASRASTWEGRRRLNTQTL

SEQ ID NO: 55391 - protein, 304 aa, Homo sapiens
  Payload ID: 10935
  Gene Symbol: NCR1
  Gene Name: natural cytotoxicity triggering receptor 1
  Uniprot ID: O76036
  ENSP ID: ENSP00000478507
MSSTLPALLCVGLCLSQRISAQQQTLPKPFIWAEPHFMVPKEKQVTICCQGNYGAVEYQLHFEGSLFAVDRPKPPERINKVKFYIPDMNSRMAGQYSCIYRVGELWSEPSNLLDLVVTEMYDTPTLSVHPGPEVISGEKVTFYCRLDTATSMFLLLKEGRSSHVQRGYGKVQAEFPLGPVTTAHRGTYRCFGSYNNHAWSFPSEPVKLLVTGDIENTSLAPEDPTFPADTWGTYLLTTETGLQKDHALWDHTAQNLLRMGLAFLVLVALVWFLVEDWLSRKRTRERASRASTWEGRRRLNTQTL

SEQ ID NO: 55392 - protein, 227 aa, Homo sapiens; identical to SEQ ID NO: 55386
  Payload ID: 10935
  Gene Symbol: NCR1
  Gene Name: natural cytotoxicity triggering receptor 1
  ENSP ID: ENSP00000478527

SEQ ID NO: 55393 - protein, 304 aa, Homo sapiens; identical to SEQ ID NO: 55391
  Payload ID: 10935
  Gene Symbol: NCR1
  Gene Name: natural cytotoxicity triggering receptor 1
  ENSP ID: ENSP00000478731

SEQ ID NO: 55394 - protein, 227 aa, Homo sapiens; identical to SEQ ID NO: 55386
  Payload ID: 10935
  Gene Symbol: NCR1
  Gene Name: natural cytotoxicity triggering receptor 1
  ENSP ID: ENSP00000478855

SEQ ID NO: 55395 - protein, 287 aa, Homo sapiens
  Payload ID: 10935
  Gene Symbol: NCR1
  Gene Name: natural cytotoxicity triggering receptor 1
  ENSP ID: ENSP00000479048
MSSTLPALLCVGLCLSQRISAQQQTLPKPFIWAEPHFMVPKEKQVTICCQGNYGAVEYQLHFEGSLFAVDRPKPPERINKVKFYIPDMNSRMAGQYSCIYRVGELWSEPSNLLDLVVTEMYDTPTLSVHPGPEVISGEKVTFYCRLDTATSMFLLLKEGRSSHVQRGYGKVQAEFPLGPVTTAHRGTYRCFGSYNNHAWSFPSEPVKLLVTGDIENTSLAPEDPTFPDHALWDHTAQNLLRMGLAFLVLVALVWFLVEDWLSRKRTRERASRASTWEGRRRLNTQTL

SEQ ID NO: 55396 - protein, 120 aa, Homo sapiens
  Payload ID: 10935
  Gene Symbol: NCR1
  Gene Name: natural cytotoxicity triggering receptor 1
  ENSP ID: ENSP00000479161
MSSTLPALLCVEMYDTPTLSVHPGPEVISGEKVTFYCRLDTATSMFLLLKEGRSSHVQRGYGKVQAEFPLGPVTTAHRGTYRCFGSYNNHAWSFPSEPVKLLVTGDIENTSLAPEDPTFP

SEQ ID NO: 55397 - protein, 197 aa, Homo sapiens; identical to SEQ ID NO: 55381
  Payload ID: 10935
  Gene Symbol: NCR1
  Gene Name: natural cytotoxicity triggering receptor 1
  Uniprot ID: O76036
  ENSP ID: ENSP00000479222

SEQ ID NO: 55398 - protein, 132 aa, Homo sapiens; identical to SEQ ID NO: 55389
  Payload ID: 10935
  Gene Symbol: NCR1
  Gene Name: natural cytotoxicity triggering receptor 1
  ENSP ID: ENSP00000479368

SEQ ID NO: 55399 - protein, 197 aa, Homo sapiens; identical to SEQ ID NO: 55381
  Payload ID: 10935
  Gene Symbol: NCR1
  Gene Name: natural cytotoxicity triggering receptor 1
  Uniprot ID: O76036
  ENSP ID: ENSP00000479388

SEQ ID NO: 55400 - protein, 287 aa, Homo sapiens; identical to SEQ ID NO: 55395
  Payload ID: 10935
  Gene Symbol: NCR1
  Gene Name: natural cytotoxicity triggering receptor 1
  ENSP ID: ENSP00000479416

SEQ ID NO: 55401 - protein, 227 aa, Homo sapiens; identical to SEQ ID NO: 55386
  Payload ID: 10935
  Gene Symbol: NCR1
  Gene Name: natural cytotoxicity triggering receptor 1
  ENSP ID: ENSP00000479507

SEQ ID NO: 55402 - protein, 304 aa, Homo sapiens; identical to SEQ ID NO: 55391
  Payload ID: 10935
  Gene Symbol: NCR1
  Gene Name: natural cytotoxicity triggering receptor 1
  ENSP ID: ENSP00000479525

SEQ ID NO: 55403 - protein, 197 aa, Homo sapiens; identical to SEQ ID NO: 55381
  Payload ID: 10935
  Gene Symbol: NCR1
  Gene Name: natural cytotoxicity triggering receptor 1
  ENSP ID: ENSP00000479600

SEQ ID NO: 55404 - protein, 209 aa, Homo sapiens; identical to SEQ ID NO: 55380
  Payload ID: 10935
  Gene Symbol: NCR1
  Gene Name: natural cytotoxicity triggering receptor 1
  ENSP ID: ENSP00000479705

SEQ ID NO: 55405 - protein, 227 aa, Homo sapiens; identical to SEQ ID NO: 55386
  Payload ID: 10935
  Gene Symbol: NCR1
  Gene Name: natural cytotoxicity triggering receptor 1
  ENSP ID: ENSP00000479804

SEQ ID NO: 55406 - protein, 287 aa, Homo sapiens; identical to SEQ ID NO: 55395
  Payload ID: 10935
  Gene Symbol: NCR1
  Gene Name: natural cytotoxicity triggering receptor 1
  ENSP ID: ENSP00000479809

SEQ ID NO: 55407 - protein, 304 aa, Homo sapiens; identical to SEQ ID NO: 55391
  Payload ID: 10935
  Gene Symbol: NCR1
  Gene Name: natural cytotoxicity triggering receptor 1
  ENSP ID: ENSP00000480002

SEQ ID NO: 55408 - protein, 287 aa, Homo sapiens; identical to SEQ ID NO: 55395
  Payload ID: 10935
  Gene Symbol: NCR1
  Gene Name: natural cytotoxicity triggering receptor 1
  Uniprot ID: O76036
  ENSP ID: ENSP00000480010

SEQ ID NO: 55409 - protein, 197 aa, Homo sapiens; identical to SEQ ID NO: 55381
  Payload ID: 10935
  Gene Symbol: NCR1
  Gene Name: natural cytotoxicity triggering receptor 1
  Uniprot ID: O76036
  ENSP ID: ENSP00000480145

SEQ ID NO: 55410 - protein, 197 aa, Homo sapiens; identical to SEQ ID NO: 55381
  Payload ID: 10935
  Gene Symbol: NCR1
  Gene Name: natural cytotoxicity triggering receptor 1
  ENSP ID: ENSP00000480657

SEQ ID NO: 55411 - protein, 120 aa, Homo sapiens; identical to SEQ ID NO: 55396
  Payload ID: 10935
  Gene Symbol: NCR1
  Gene Name: natural cytotoxicity triggering receptor 1
  ENSP ID: ENSP00000480741

SEQ ID NO: 55412 - protein, 292 aa, Homo sapiens
  Payload ID: 10935
  Gene Symbol: NCR1
  Gene Name: natural cytotoxicity triggering receptor 1
  ENSP ID: ENSP00000480921
MSSTLPALLCVETLPKPFIWAEPHFMVPKEKQVTICCQGNYGAVEYQLHFEGSLFAVDRPKPPERINKVKFYIPDMNSRMAGQYSCIYRVGELWSEPSNLLDLVVTEMYDTPTLSVHPGPEVISGEKVTFYCRLDTATSMFLLLKEGRSSHVQRGYGKVQAEFPLGPVTTAHRGTYRCFGSYNNHAWSFPSEPVKLLVTGDIENTSLAPEDPTFPADTWGTYLLTTETGLQKDHALWDHTAQNLLRMGLAFLVLVALVWFLVEDWLSRKRTRERASRASTWEGRRRLNTQTL

SEQ ID NO: 55413 - protein, 304 aa, Homo sapiens; identical to SEQ ID NO: 55391
  Payload ID: 10935
  Gene Symbol: NCR1
  Gene Name: natural cytotoxicity triggering receptor 1
  ENSP ID: ENSP00000480947

SEQ ID NO: 55414 - protein, 215 aa, Homo sapiens; identical to SEQ ID NO: 55385
  Payload ID: 10935
  Gene Symbol: NCR1
  Gene Name: natural cytotoxicity triggering receptor 1
  ENSP ID: ENSP00000480950

SEQ ID NO: 55415 - protein, 132 aa, Homo sapiens; identical to SEQ ID NO: 55389
  Payload ID: 10935
  Gene Symbol: NCR1
  Gene Name: natural cytotoxicity triggering receptor 1
  ENSP ID: ENSP00000480962

SEQ ID NO: 55416 - protein, 287 aa, Homo sapiens; identical to SEQ ID NO: 55395
  Payload ID: 10935
  Gene Symbol: NCR1
  Gene Name: natural cytotoxicity triggering receptor 1
  ENSP ID: ENSP00000481235

SEQ ID NO: 55417 - protein, 215 aa, Homo sapiens; identical to SEQ ID NO: 55385
  Payload ID: 10935
  Gene Symbol: NCR1
  Gene Name: natural cytotoxicity triggering receptor 1
  ENSP ID: ENSP00000481370

SEQ ID NO: 55418 - protein, 291 aa, Homo sapiens; identical to SEQ ID NO: 55390
  Payload ID: 10935
  Gene Symbol: NCR1
  Gene Name: natural cytotoxicity triggering receptor 1
  ENSP ID: ENSP00000481479

SEQ ID NO: 55419 - protein, 209 aa, Homo sapiens; identical to SEQ ID NO: 55380
  Payload ID: 10935
  Gene Symbol: NCR1
  Gene Name: natural cytotoxicity triggering receptor 1
  Uniprot ID: O76036
  ENSP ID: ENSP00000481540

SEQ ID NO: 55420 - protein, 227 aa, Homo sapiens; identical to SEQ ID NO: 55386
  Payload ID: 10935
  Gene Symbol: NCR1
  Gene Name: natural cytotoxicity triggering receptor 1
  ENSP ID: ENSP00000481612

SEQ ID NO: 55421 - protein, 287 aa, Homo sapiens; identical to SEQ ID NO: 55395
  Payload ID: 10935
  Gene Symbol: NCR1
  Gene Name: natural cytotoxicity triggering receptor 1
  ENSP ID: ENSP00000481618

SEQ ID NO: 55422 - protein, 303 aa, Homo sapiens
  Payload ID: 10935
  Gene Symbol: NCR1
  Gene Name: natural cytotoxicity triggering receptor 1
  Uniprot ID: O76036
  ENSP ID: ENSP00000481692
MSSTLPALLCVGLCLSQRISAQQQTLPKPFIWAEPHFMVPKEKQVTICCQGNYGAVEYQLHFEGSLFAVDRPKPPERINKVKFYIPDMNSRMAGQYSCIYRVGELWSEPSNLLDLVVTEMYDTPTLSVHPGPEVISGEKVTFYCRLDTATSMFLLLKEGRSSHVQRGYGKVQAEFPLGPVTTAHRGTYRCFGSYNNHAWSFPSEPVKLLVTGDIENTSLAPEDPTFPDTWGTYLLTTETGLQKDHALWDHTAQNLLRMGLAFLVLVALVWFLVEDWLSRKRTRERASRASTWEGRRRLNTQTL

SEQ ID NO: 55423 - protein, 304 aa, Homo sapiens; identical to SEQ ID NO: 55391
  Payload ID: 10935
  Gene Symbol: NCR1
  Gene Name: natural cytotoxicity triggering receptor 1
  ENSP ID: ENSP00000481747

SEQ ID NO: 55424 - protein, 120 aa, Homo sapiens; identical to SEQ ID NO: 55396
  Payload ID: 10935
  Gene Symbol: NCR1
  Gene Name: natural cytotoxicity triggering receptor 1
  ENSP ID: ENSP00000481792

SEQ ID NO: 55425 - protein, 304 aa, Homo sapiens; identical to SEQ ID NO: 55391
  Payload ID: 10935
  Gene Symbol: NCR1
  Gene Name: natural cytotoxicity triggering receptor 1
  Uniprot ID: O76036
  ENSP ID: ENSP00000481971

SEQ ID NO: 55426 - protein, 227 aa, Homo sapiens; identical to SEQ ID NO: 55386
  Payload ID: 10935
  Gene Symbol: NCR1
  Gene Name: natural cytotoxicity triggering receptor 1
  ENSP ID: ENSP00000482071

SEQ ID NO: 55427 - protein, 197 aa, Homo sapiens; identical to SEQ ID NO: 55381
  Payload ID: 10935
  Gene Symbol: NCR1
  Gene Name: natural cytotoxicity triggering receptor 1
  Uniprot ID: O76036
  ENSP ID: ENSP00000482092

SEQ ID NO: 55428 - protein, 209 aa, Homo sapiens; identical to SEQ ID NO: 55380
  Payload ID: 10935
  Gene Symbol: NCR1
  Gene Name: natural cytotoxicity triggering receptor 1
  ENSP ID: ENSP00000482189

SEQ ID NO: 55429 - protein, 227 aa, Homo sapiens; identical to SEQ ID NO: 55386
  Payload ID: 10935
  Gene Symbol: NCR1
  Gene Name: natural cytotoxicity triggering receptor 1
  ENSP ID: ENSP00000482342

SEQ ID NO: 55430 - protein, 197 aa, Homo sapiens; identical to SEQ ID NO: 55381
  Payload ID: 10935
  Gene Symbol: NCR1
  Gene Name: natural cytotoxicity triggering receptor 1
  ENSP ID: ENSP00000482380

SEQ ID NO: 55431 - protein, 304 aa, Homo sapiens; identical to SEQ ID NO: 55391
  Payload ID: 10935
  Gene Symbol: NCR1
  Gene Name: natural cytotoxicity triggering receptor 1
  Uniprot ID: O76036
  ENSP ID: ENSP00000482423

SEQ ID NO: 55432 - protein, 303 aa, Homo sapiens; identical to SEQ ID NO: 55422
  Payload ID: 10935
  Gene Symbol: NCR1
  Gene Name: natural cytotoxicity triggering receptor 1
  Uniprot ID: O76036
  ENSP ID: ENSP00000482536

SEQ ID NO: 55433 - protein, 209 aa, Homo sapiens; identical to SEQ ID NO: 55380
  Payload ID: 10935
  Gene Symbol: NCR1
  Gene Name: natural cytotoxicity triggering receptor 1
  ENSP ID: ENSP00000482541

SEQ ID NO: 55434 - protein, 209 aa, Homo sapiens; identical to SEQ ID NO: 55380
  Payload ID: 10935
  Gene Symbol: NCR1
  Gene Name: natural cytotoxicity triggering receptor 1
  Uniprot ID: O76036
  ENSP ID: ENSP00000482554

SEQ ID NO: 55435 - protein, 197 aa, Homo sapiens; identical to SEQ ID NO: 55381
  Payload ID: 10935
  Gene Symbol: NCR1
  Gene Name: natural cytotoxicity triggering receptor 1
  ENSP ID: ENSP00000482677

SEQ ID NO: 55436 - protein, 209 aa, Homo sapiens; identical to SEQ ID NO: 55380
  Payload ID: 10935
  Gene Symbol: NCR1
  Gene Name: natural cytotoxicity triggering receptor 1
  Uniprot ID: O76036
  ENSP ID: ENSP00000483028

SEQ ID NO: 55437 - protein, 209 aa, Homo sapiens; identical to SEQ ID NO: 55380
  Payload ID: 10935
  Gene Symbol: NCR1
  Gene Name: natural cytotoxicity triggering receptor 1
  ENSP ID: ENSP00000483184

SEQ ID NO: 55438 - protein, 304 aa, Homo sapiens; identical to SEQ ID NO: 55391
  Payload ID: 10935
  Gene Symbol: NCR1
  Gene Name: natural cytotoxicity triggering receptor 1
  Uniprot ID: O76036
  ENSP ID: ENSP00000483452

SEQ ID NO: 55439 - protein, 287 aa, Homo sapiens; identical to SEQ ID NO: 55395
  Payload ID: 10935
  Gene Symbol: NCR1
  Gene Name: natural cytotoxicity triggering receptor 1
  Uniprot ID: O76036
  ENSP ID: ENSP00000483611

SEQ ID NO: 55440 - protein, 287 aa, Homo sapiens; identical to SEQ ID NO: 55395
  Payload ID: 10935
  Gene Symbol: NCR1
  Gene Name: natural cytotoxicity triggering receptor 1
  Uniprot ID: O76036
  ENSP ID: ENSP00000483723

SEQ ID NO: 55441 - protein, 215 aa, Homo sapiens; identical to SEQ ID NO: 55385
  Payload ID: 10935
  Gene Symbol: NCR1
  Gene Name: natural cytotoxicity triggering receptor 1
  ENSP ID: ENSP00000483780

SEQ ID NO: 55442 - protein, 227 aa, Homo sapiens; identical to SEQ ID NO: 55386
  Payload ID: 10935
  Gene Symbol: NCR1
  Gene Name: natural cytotoxicity triggering receptor 1
  ENSP ID: ENSP00000483810

SEQ ID NO: 55443 - protein, 197 aa, Homo sapiens; identical to SEQ ID NO: 55381
  Payload ID: 10935
  Gene Symbol: NCR1
  Gene Name: natural cytotoxicity triggering receptor 1
  ENSP ID: ENSP00000483840

SEQ ID NO: 55444 - protein, 287 aa, Homo sapiens; identical to SEQ ID NO: 55395
  Payload ID: 10935
  Gene Symbol: NCR1
  Gene Name: natural cytotoxicity triggering receptor 1
  Uniprot ID: O76036
  ENSP ID: ENSP00000484067

SEQ ID NO: 55445 - protein, 304 aa, Homo sapiens; identical to SEQ ID NO: 55391
  Payload ID: 10935
  Gene Symbol: NCR1
  Gene Name: natural cytotoxicity triggering receptor 1
  Uniprot ID: O76036
  ENSP ID: ENSP00000484071

SEQ ID NO: 55446 - protein, 304 aa, Homo sapiens; identical to SEQ ID NO: 55391
  Payload ID: 10935
  Gene Symbol: NCR1
  Gene Name: natural cytotoxicity triggering receptor 1
  Uniprot ID: O76036
  ENSP ID: ENSP00000484221

SEQ ID NO: 55447 - protein, 120 aa, Homo sapiens; identical to SEQ ID NO: 55396
  Payload ID: 10935
  Gene Symbol: NCR1
  Gene Name: natural cytotoxicity triggering receptor 1
  ENSP ID: ENSP00000484235

SEQ ID NO: 55448 - protein, 209 aa, Homo sapiens; identical to SEQ ID NO: 55380
  Payload ID: 10935
  Gene Symbol: NCR1
  Gene Name: natural cytotoxicity triggering receptor 1
  Uniprot ID: O76036
  ENSP ID: ENSP00000484377

SEQ ID NO: 55449 - protein, 304 aa, Homo sapiens; identical to SEQ ID NO: 55391
  Payload ID: 10935
  Gene Symbol: NCR1
  Gene Name: natural cytotoxicity triggering receptor 1
  Uniprot ID: O76036
  ENSP ID: ENSP00000484520

SEQ ID NO: 55450 - protein, 209 aa, Homo sapiens; identical to SEQ ID NO: 55380
  Payload ID: 10935
  Gene Symbol: NCR1
  Gene Name: natural cytotoxicity triggering receptor 1
  ENSP ID: ENSP00000484779

SEQ ID NO: 55451 - protein, 192 aa, Homo sapiens; identical to SEQ ID NO: 55384
  Payload ID: 10935
  Gene Symbol: NCR1
  Gene Name: natural cytotoxicity triggering receptor 1
  Uniprot ID: O76036
  ENSP ID: ENSP00000484831

SEQ ID NO: 55452 - protein, 132 aa, Homo sapiens; identical to SEQ ID NO: 55389
  Payload ID: 10935
  Gene Symbol: NCR1
  Gene Name: natural cytotoxicity triggering receptor 1
  ENSP ID: ENSP00000484847

SEQ ID NO: 55453 - protein, 132 aa, Homo sapiens; identical to SEQ ID NO: 55389
  Payload ID: 10935
  Gene Symbol: NCR1
  Gene Name: natural cytotoxicity triggering receptor 1
  ENSP ID: ENSP00000484989

SEQ ID NO: 55454 - protein, 258 aa, Homo sapiens
  Payload ID: 10936
  Gene Symbol: NCR2
  Gene Name: natural cytotoxicity triggering receptor 2
  Uniprot ID: O95944
  ENSP ID: ENSP00000362175
MAWRALHPLLLLLLLFPGSQAQSKAQVLQSVAGQTLTVRCQYPPTGSLYEKKGWCKEASALVCIRLVTSSKPRTMAWTSRFTIWDDPDAGFFTVTMTDLREEDSGHYWCRIYRPSDNSVSKSVRFYLVVSPASASTQTSWTPRDLVSSQTQTQSCVPPTAGARQAPESPSTIPVPSQPQNSTLRPGPAAPIALVPVFCGLLVAKSLVLSALLVWWVLRNRHMQHQGRSLLHPAQPRPQAHRHFPLSHRAPGGTYGGKP

SEQ ID NO: 55455 - protein, 270 aa, Homo sapiens
  Payload ID: 10936
  Gene Symbol: NCR2
  Gene Name: natural cytotoxicity triggering receptor 2
  Uniprot ID: O95944
  ENSP ID: ENSP00000362178
MAWRALHPLLLLLLLFPGSQAQSKAQVLQSVAGQTLTVRCQYPPTGSLYEKKGWCKEASALVCIRLVTSSKPRTMAWTSRFTIWDDPDAGFFTVTMTDLREEDSGHYWCRIYRPSDNSVSKSVRFYLVVSPASASTQTSWTPRDLVSSQTQTQSCVPPTAGARQAPESPSTIPVPSHPSSPLPVPLPSRPQNSTLRPGPAAPIALVPVFCGLLVAKSLVLSALLVWWVLRNRHMQHQGRSLLHPAQPRPQAHRHFPLSHRAPGGTYGGKP

SEQ ID NO: 55456 - protein, 276 aa, Homo sapiens
  Payload ID: 10936
  Gene Symbol: NCR2
  Gene Name: natural cytotoxicity triggering receptor 2
  Uniprot ID: O95944
  ENSP ID: ENSP00000362181
MAWRALHPLLLLLLLFPGSQAQSKAQVLQSVAGQTLTVRCQYPPTGSLYEKKGWCKEASALVCIRLVTSSKPRTMAWTSRFTIWDDPDAGFFTVTMTDLREEDSGHYWCRIYRPSDNSVSKSVRFYLVVSPASASTQTSWTPRDLVSSQTQTQSCVPPTAGARQAPESPSTIPVPSQPQNSTLRPGPAAPIALVPVFCGLLVAKSLVLSALLVWWGDIWWKTMMELRSLDTQKATCHLQQVTDLPWTSVSSPVEREILYHTVARTKISDDDDEHTL

SEQ ID NO: 55457 - protein, 201 aa, Homo sapiens
  Payload ID: 10937
  Gene Symbol: NCR3
  Gene Name: natural cytotoxicity triggering receptor 3
  Uniprot ID: O14931
  ENSP ID: ENSP00000342156
MAWMLLLILIMVHPGSCALWVSQPPEIRTLEGSSAFLPCSFNASQGRLAIGSVTWFRDEVVPGKEVRNGTPEFRGRLAPLASSRFLHDHQAELHIRDVRGHDASIYVCRVEVLGLGVGTGNGTRLVVEKEHPQLGAGTVLLLRAGFYAVSFLSVAVGSTVYYQGKCLTWKGPRRQLPAVVPAPLPPPCGSSAHLLPPVPGG

SEQ ID NO: 55458 - protein, 165 aa, Homo sapiens
  Payload ID: 10937
  Gene Symbol: NCR3
  Gene Name: natural cytotoxicity triggering receptor 3
  Uniprot ID: O14931
  ENSP ID: ENSP00000365239
MAWMLLLILIMVHPGSCALWVSQPPEIRTLEGSSAFLPCSFNASQGRLAIGSVTWFRDEVVPGKEAELHIRDVRGHDASIYVCRVEVLGLGVGTGNGTRLVVEKEHPQLGAGTVLLLRAGFYAVSFLSVAVGSTVYYQGKCHCHMGTHCHSSDGPRGVIPEPRCP

SEQ ID NO: 55459 - protein, 190 aa, Homo sapiens
  Payload ID: 10937
  Gene Symbol: NCR3
  Gene Name: natural cytotoxicity triggering receptor 3
  Uniprot ID: O14931
  ENSP ID: ENSP00000365240
MAWMLLLILIMVHPGSCALWVSQPPEIRTLEGSSAFLPCSFNASQGRLAIGSVTWFRDEVVPGKEVRNGTPEFRGRLAPLASSRFLHDHQAELHIRDVRGHDASIYVCRVEVLGLGVGTGNGTRLVVEKEHPQLGAGTVLLLRAGFYAVSFLSVAVGSTVYYQGKCHCHMGTHCHSSDGPRGVIPEPRCP

SEQ ID NO: 55460 - protein, 177 aa, Homo sapiens
  Payload ID: 10937
  Gene Symbol: NCR3
  Gene Name: natural cytotoxicity triggering receptor 3
  Uniprot ID: O14931
  ENSP ID: ENSP00000365241
MAWMLLLILIMVHPGSCALWVSQPPEIRTLEGSSAFLPCSFNASQGRLAIGSVTWFRDEVVPGKEVRNGTPEFRGRLAPLASSRFLHDHQAELHIRDVRGHDASIYVCRVEVLGLGVGTGNGTRLVVEKEHPQLGAGTVLLLRAGFYAVSFLSVAVGSTVYYQGKYAKSTLSGFPQL

SEQ ID NO: 55461 - protein, 190 aa, Homo sapiens; identical to SEQ ID NO: 55459
  Payload ID: 10937
  Gene Symbol: NCR3
  Gene Name: natural cytotoxicity triggering receptor 3
  Uniprot ID: O14931
  ENSP ID: ENSP00000372968

SEQ ID NO: 55462 - protein, 201 aa, Homo sapiens; identical to SEQ ID NO: 55457
  Payload ID: 10937
  Gene Symbol: NCR3
  Gene Name: natural cytotoxicity triggering receptor 3
  Uniprot ID: O14931
  ENSP ID: ENSP00000372969

SEQ ID NO: 55463 - protein, 177 aa, Homo sapiens; identical to SEQ ID NO: 55460
  Payload ID: 10937
  Gene Symbol: NCR3
  Gene Name: natural cytotoxicity triggering receptor 3
  Uniprot ID: O14931
  ENSP ID: ENSP00000372970

SEQ ID NO: 55464 - protein, 165 aa, Homo sapiens; identical to SEQ ID NO: 55458
  Payload ID: 10937
  Gene Symbol: NCR3
  Gene Name: natural cytotoxicity triggering receptor 3
  Uniprot ID: O14931
  ENSP ID: ENSP00000383100

SEQ ID NO: 55465 - protein, 201 aa, Homo sapiens; identical to SEQ ID NO: 55457
  Payload ID: 10937
  Gene Symbol: NCR3
  Gene Name: natural cytotoxicity triggering receptor 3
  Uniprot ID: O14931
  ENSP ID: ENSP00000389071

SEQ ID NO: 55466 - protein, 177 aa, Homo sapiens; identical to SEQ ID NO: 55460
  Payload ID: 10937
  Gene Symbol: NCR3
  Gene Name: natural cytotoxicity triggering receptor 3
  Uniprot ID: O14931
  ENSP ID: ENSP00000389396

SEQ ID NO: 55467 - protein, 190 aa, Homo sapiens; identical to SEQ ID NO: 55459
  Payload ID: 10937
  Gene Symbol: NCR3
  Gene Name: natural cytotoxicity triggering receptor 3
  Uniprot ID: O14931
  ENSP ID: ENSP00000389419

SEQ ID NO: 55468 - protein, 201 aa, Homo sapiens; identical to SEQ ID NO: 55457
  Payload ID: 10937
  Gene Symbol: NCR3
  Gene Name: natural cytotoxicity triggering receptor 3
  Uniprot ID: O14931
  ENSP ID: ENSP00000390131

SEQ ID NO: 55469 - protein, 177 aa, Homo sapiens; identical to SEQ ID NO: 55460
  Payload ID: 10937
  Gene Symbol: NCR3
  Gene Name: natural cytotoxicity triggering receptor 3
  Uniprot ID: O14931
  ENSP ID: ENSP00000391177

SEQ ID NO: 55470 - protein, 177 aa, Homo sapiens; identical to SEQ ID NO: 55460
  Payload ID: 10937
  Gene Symbol: NCR3
  Gene Name: natural cytotoxicity triggering receptor 3
  Uniprot ID: O14931
  ENSP ID: ENSP00000395238

SEQ ID NO: 55471 - protein, 201 aa, Homo sapiens; identical to SEQ ID NO: 55457
  Payload ID: 10937
  Gene Symbol: NCR3
  Gene Name: natural cytotoxicity triggering receptor 3
  Uniprot ID: O14931
  ENSP ID: ENSP00000398313

SEQ ID NO: 55472 - protein, 190 aa, Homo sapiens; identical to SEQ ID NO: 55459
  Payload ID: 10937
  Gene Symbol: NCR3
  Gene Name: natural cytotoxicity triggering receptor 3
  Uniprot ID: O14931
  ENSP ID: ENSP00000399128

SEQ ID NO: 55473 - protein, 190 aa, Homo sapiens; identical to SEQ ID NO: 55459
  Payload ID: 10937
  Gene Symbol: NCR3
  Gene Name: natural cytotoxicity triggering receptor 3
  Uniprot ID: O14931
  ENSP ID: ENSP00000402904

SEQ ID NO: 55474 - protein, 190 aa, Homo sapiens; identical to SEQ ID NO: 55459
  Payload ID: 10937
  Gene Symbol: NCR3
  Gene Name: natural cytotoxicity triggering receptor 3
  Uniprot ID: O14931
  ENSP ID: ENSP00000403978

SEQ ID NO: 55475 - protein, 190 aa, Homo sapiens; identical to SEQ ID NO: 55459
  Payload ID: 10937
  Gene Symbol: NCR3
  Gene Name: natural cytotoxicity triggering receptor 3
  Uniprot ID: O14931
  ENSP ID: ENSP00000404747

SEQ ID NO: 55476 - protein, 201 aa, Homo sapiens; identical to SEQ ID NO: 55457
  Payload ID: 10937
  Gene Symbol: NCR3
  Gene Name: natural cytotoxicity triggering receptor 3
  Uniprot ID: O14931
  ENSP ID: ENSP00000405306

SEQ ID NO: 55477 - protein, 165 aa, Homo sapiens; identical to SEQ ID NO: 55458
  Payload ID: 10937
  Gene Symbol: NCR3
  Gene Name: natural cytotoxicity triggering receptor 3
  Uniprot ID: O14931
  ENSP ID: ENSP00000406373

SEQ ID NO: 55478 - protein, 177 aa, Homo sapiens; identical to SEQ ID NO: 55460
  Payload ID: 10937
  Gene Symbol: NCR3
  Gene Name: natural cytotoxicity triggering receptor 3
  Uniprot ID: O14931
  ENSP ID: ENSP00000408960

SEQ ID NO: 55479 - protein, 165 aa, Homo sapiens; identical to SEQ ID NO: 55458
  Payload ID: 10937
  Gene Symbol: NCR3
  Gene Name: natural cytotoxicity triggering receptor 3
  Uniprot ID: O14931
  ENSP ID: ENSP00000409048

SEQ ID NO: 55480 - protein, 177 aa, Homo sapiens; identical to SEQ ID NO: 55460
  Payload ID: 10937
  Gene Symbol: NCR3
  Gene Name: natural cytotoxicity triggering receptor 3
  Uniprot ID: O14931
  ENSP ID: ENSP00000409874

SEQ ID NO: 55481 - protein, 177 aa, Homo sapiens; identical to SEQ ID NO: 55460
  Payload ID: 10937
  Gene Symbol: NCR3
  Gene Name: natural cytotoxicity triggering receptor 3
  Uniprot ID: O14931
  ENSP ID: ENSP00000411205

SEQ ID NO: 55482 - protein, 165 aa, Homo sapiens; identical to SEQ ID NO: 55458
  Payload ID: 10937
  Gene Symbol: NCR3
  Gene Name: natural cytotoxicity triggering receptor 3
  Uniprot ID: O14931
  ENSP ID: ENSP00000412474

SEQ ID NO: 55483 - protein, 190 aa, Homo sapiens; identical to SEQ ID NO: 55459
  Payload ID: 10937
  Gene Symbol: NCR3
  Gene Name: natural cytotoxicity triggering receptor 3
  Uniprot ID: O14931
  ENSP ID: ENSP00000412702

SEQ ID NO: 55484 - protein, 165 aa, Homo sapiens; identical to SEQ ID NO: 55458
  Payload ID: 10937
  Gene Symbol: NCR3
  Gene Name: natural cytotoxicity triggering receptor 3
  Uniprot ID: O14931
  ENSP ID: ENSP00000415456

SEQ ID NO: 55485 - protein, 165 aa, Homo sapiens; identical to SEQ ID NO: 55458
  Payload ID: 10937
  Gene Symbol: NCR3
  Gene Name: natural cytotoxicity triggering receptor 3
  Uniprot ID: O14931
  ENSP ID: ENSP00000415697

SEQ ID NO: 55486 - protein, 201 aa, Homo sapiens; identical to SEQ ID NO: 55457
  Payload ID: 10937
  Gene Symbol: NCR3
  Gene Name: natural cytotoxicity triggering receptor 3
  Uniprot ID: O14931
  ENSP ID: ENSP00000416035

SEQ ID NO: 55487 - protein, 165 aa, Homo sapiens; identical to SEQ ID NO: 55458
  Payload ID: 10937
  Gene Symbol: NCR3
  Gene Name: natural cytotoxicity triggering receptor 3
  Uniprot ID: O14931
  ENSP ID: ENSP00000416105

SEQ ID NO: 55488 - protein, 201 aa, Homo sapiens; identical to SEQ ID NO: 55457
  Payload ID: 10937
  Gene Symbol: NCR3
  Gene Name: natural cytotoxicity triggering receptor 3
  Uniprot ID: O14931
  ENSP ID: ENSP00000416944

SEQ ID NO: 55489 - protein, 115 aa, Homo sapiens
  Payload ID: 10937
  Gene Symbol: NCR3
  Gene Name: natural cytotoxicity triggering receptor 3
  ENSP ID: ENSP00000431193
MAWMLLLILIMVHPGSCALWVSQPPEIRTLEGSSAFLPCSFNASQGRLAIGSVTWFRDEVVPGKEVRNGTPEFRGRLAPLASSRFLHDHQAELHIRDVRGHDASIYVCRVENILS

SEQ ID NO: 55490 - protein, 115 aa, Homo sapiens; identical to SEQ ID NO: 55489
  Payload ID: 10937
  Gene Symbol: NCR3
  Gene Name: natural cytotoxicity triggering receptor 3
  ENSP ID: ENSP00000431646

SEQ ID NO: 55491 - protein, 115 aa, Homo sapiens; identical to SEQ ID NO: 55489
  Payload ID: 10937
  Gene Symbol: NCR3
  Gene Name: natural cytotoxicity triggering receptor 3
  ENSP ID: ENSP00000432120

SEQ ID NO: 55492 - protein, 115 aa, Homo sapiens; identical to SEQ ID NO: 55489
  Payload ID: 10937
  Gene Symbol: NCR3
  Gene Name: natural cytotoxicity triggering receptor 3
  ENSP ID: ENSP00000432357

SEQ ID NO: 55493 - protein, 115 aa, Homo sapiens; identical to SEQ ID NO: 55489
  Payload ID: 10937
  Gene Symbol: NCR3
  Gene Name: natural cytotoxicity triggering receptor 3
  ENSP ID: ENSP00000432961

SEQ ID NO: 55494 - protein, 115 aa, Homo sapiens; identical to SEQ ID NO: 55489
  Payload ID: 10937
  Gene Symbol: NCR3
  Gene Name: natural cytotoxicity triggering receptor 3
  ENSP ID: ENSP00000433448

SEQ ID NO: 55495 - protein, 115 aa, Homo sapiens; identical to SEQ ID NO: 55489
  Payload ID: 10937
  Gene Symbol: NCR3
  Gene Name: natural cytotoxicity triggering receptor 3
  ENSP ID: ENSP00000437322

SEQ ID NO: 55496 - protein, 454 aa, Homo sapiens
  Payload ID: 10938
  Gene Symbol: NCR3LG1
  Gene Name: natural killer cell cytotoxicity receptor 3 ligand 1
  Uniprot ID: Q68D85
  ENSP ID: ENSP00000341637
MTWRAAASTCAALLILLWALTTEGDLKVEMMAGGTQITPLNDNVTIFCNIFYSQPLNITSMGITWFWKSLTFDKEVKVFEFFGDHQEAFRPGAIVSPWRLKSGDASLRLPGIQLEEAGEYRCEVVVTPLKAQGTVQLEVVASPASRLLLDQVGMKENEDKYMCESSGFYPEAINITWEKQTQKFPHPIEISEDVITGPTIKNMDGTFNVTSCLKLNSSQEDPGTVYQCVVRHASLHTPLRSNFTLTAARHSLSETEKTDNFSIHWWPISFIGVGLVLLIVLIPWKKICNKSSSAYTPLKCILKHWNSFDTQTLKKEHLIFFCTRAWPSYQLQDGEAWPPEGSVNINTIQQLDVFCRQEGKWSEVPYVQAFFALRDNPDLCQCCRIDPALLTVTSGKSIDDNSTKSEKQTPREHSDAVPDAPILPVSPIWEPPPATTSTTPVLSSQPPTLLLPLQ

SEQ ID NO: 55497 - protein, 454 aa, Homo sapiens; identical to SEQ ID NO: 55496
  Payload ID: 10938
  Gene Symbol: NCR3LG1
  Gene Name: natural killer cell cytotoxicity receptor 3 ligand 1
  Uniprot ID: Q68D85
  ENSP ID: ENSP00000434394

SEQ ID NO: 55498 - protein, 165 aa, Homo sapiens
  Payload ID: 10939
  Gene Symbol: NKG7
  Gene Name: natural killer cell granule protein 7
  Uniprot ID: Q16617
  ENSP ID: ENSP00000221978
MELCRSLALLGGSLGLMFCLIALSTDFWFEAVGPTHSAHSGLWPTGHGDIISGYIHVTQTFSIMAVLWALVSVSFLVLSCFPSLFPPGHGPLVSTTAAFAAAISMVVAMAVYTSERWDQPPHPQIQTFFSWSFYLGWVSAILLLCTGALSLGAHCGGPRPGYETL

SEQ ID NO: 55499 - protein, 142 aa, Homo sapiens
  Payload ID: 10939
  Gene Symbol: NKG7
  Gene Name: natural killer cell granule protein 7
  ENSP ID: ENSP00000468910
MELCRSLALLGGSLGLMFCLIALSTDFWFEAVGPTHSAHSGLWPTGHGDIISGHGPLVSTTAAFAAGKDSGLDWGIASQRIPAEELSHLSCPCPQPSPWWWPWRCTPASGGTSLHTPRSRPSSPGPSTWAGSQLSSCSVQVP

SEQ ID NO: 55500 - protein, 85 aa, Homo sapiens
  Payload ID: 10939
  Gene Symbol: NKG7
  Gene Name: natural killer cell granule protein 7
  ENSP ID: ENSP00000469370
MELCRSLALLGGSLGLMFCLIALSTDFWFEAVGPTHSAHSGLWPTGHGDIISGHGPLVSTTAAFAAGALSLGAHCGGPRPGYETL

SEQ ID NO: 55501 - protein, 89 aa, Homo sapiens
  Payload ID: 10939
  Gene Symbol: NKG7
  Gene Name: natural killer cell granule protein 7
  ENSP ID: ENSP00000471163
  MOD_RES (1)..(1): Any amino acid
XWPTGHGDIISGHGPLVSTTAAFAAAISMVVAMAVYTSERWDQPPHPQIQTFFSWSFYLGWVSAILLLCTGALSLGAHCGGPRPGYETL

SEQ ID NO: 55502 - protein, 72 aa, Homo sapiens
  Payload ID: 10939
  Gene Symbol: NKG7
  Gene Name: natural killer cell granule protein 7
  ENSP ID: ENSP00000473204
TGHGDIISAISMVVAMAVYTSERWDQPPHPQIQTFFSWSFYLGWVSAILLLCTGALSLGAHCGGPRPGYETL

SEQ ID NO: 55503 - protein, 1462 aa, Homo sapiens
  Payload ID: 10940
  Gene Symbol: NKTR
  Gene Name: natural killer cell triggering receptor
  Uniprot ID: P30414
  ENSP ID: ENSP00000232978
MGAQDRPQCHFDIEINREPVGRIMFQLFSDICPKTCKNFLCLCSGEKGLGKTTGKKLCYKGSTFHRVVKNFMIQGGDFSEGNGKGGESIYGGYFKDENFILKHDRAFLLSMANRGKHTNGSQFFITTKPAPHLDGVHVVFGLVISGFEVIEQIENLKTDAASRPYADVRVIDCGVLATKSIKDVFEKKRKKPTHSEGSDSSSNSSSSSESSSESELEHERSRRRKHKRRPKVKRSKKRRKEASSSEEPRNKHAMNPKGHSERSDTNEKRSVDSSAKREKPVVRPEEIPPVPENRFLLRRDMPVVTAEPEPKIPDVAPIVSDQKPSVSKSGRKIKGRGTIRYHTPPRSRSCSESDDDDSSETPPHWKEEMQRLRAYRPPSGEKWSKGDKLSDPCSSRWDERSLSQRSRSWSYNGYYSDLSTARHSGHHKKRRKEKKVKHKKKGKKQKHCRRHKQTKKRRILIPSDIESSKSSTRRMKSSCDRERSSRSSSLSSHHSSKRDWSKSDKDVQSSLTHSSRDSYRSKSHSQSYSRGSSRSRTASKSSSHSRSRSKSRSSSKSGHRKRASKSPRKTASQLSENKPVKTEPLRATMAQNENVVVQPVVAENIPVIPLSDSPPPSRWKPGQKPWKPSYERIQEMKAKTTHLLPIQSTYSLANIKETGSSSSYHKREKNSESDQSTYSKYSDRSSESSPRSRSRSSRSRSYSRSYTRSRSLASSHSRSRSPSSRSHSRNKYSDHSQCSRSSSYTSISSDDGRRAKRRLRSSGKKNSVSHKKHSSSSEKTLHSKYVKGRDRSSCVRKYSESRSSLDYSSDSEQSSVQATQSAQEKEKQGQMERTHNKQEKNRGEEKSKSERECPHSKKRTLKENLSDHLRNGSKPKRKNYAGSKWDSESNSERDVTKNSKNDSHPSSDKEEGEATSDSESEVSEIHIKVKPTTKSSTNTSLPDDNGAWKSSKQRTSTSDSEGSCSNSENNRGKPQKHKHGSKENLKREHTKKVKEKLKGKKDKKHKAPKRKQAFHWQPPLEFGEEEEEEIDDKQVTQESKEKKVSENNETIKDNILKTEKSSEEDLSGKHDTVTVSSDLDQFTKDDSKLSISPTALNTEENVACLQNIQHVEESVPNGVEDVLQTDDNMEICTPDRSSPAKVEETSPLGNARLDTPDINIVLKQDMATEHPQAEVVKQESSMSESKVLGEVGKQDSSSASLASAGESTGKKEVAEKSQINLIDKKWKPLQGVGNLAAPNAATSSAVEVKVLTTVPEMKPQGLRIEIKSKNKVRPGSLFDEVRKTARLNRRPRNQESSSDEQTPSRDDDSQSRSPSRSRSKSETKSRHRTRSVSYSHSRSRSRSSTSSYRSRSYSRSRSRGWYSRGRTRSRSSSYRSYKSHRTSSRSRSRSSSYDPHSRSRSYTYDSYYSRSRSRSRSQRSDSYHRGRSYNRRSRSCRSYGSDSESDRSYSHHRSPSESSRYS

SEQ ID NO: 55504 - protein, 105 aa, Homo sapiens
  Payload ID: 10940
  Gene Symbol: NKTR
  Gene Name: natural killer cell triggering receptor
  ENSP ID: ENSP00000390259
MGAQDRPQCHFDIEINREPVGRIMFQLFSDICPKTCKNFLCLCSGEKGLGKTTGKKLCYKGSTFHRVVKNFMIQGGDFSEGNGKGGESIYGGYFKENVVFCKMKR

SEQ ID NO: 55505 - protein, 105 aa, Homo sapiens; identical to SEQ ID NO: 55504
  Payload ID: 10940
  Gene Symbol: NKTR
  Gene Name: natural killer cell triggering receptor
  ENSP ID: ENSP00000404802

SEQ ID NO: 55506 - protein, 104 aa, Homo sapiens
  Payload ID: 10940
  Gene Symbol: NKTR
  Gene Name: natural killer cell triggering receptor
  ENSP ID: ENSP00000408660
MGAQDRPQCHFDIEINREPVGRIMFQLFSDICPKTCKNFLCLCSGEKGLGKTTGKKLCYKGSTFHRVVKNFMIQGGDFSEGNGKGGESIYGGYFKENVVFCKMK

SEQ ID NO: 55507 - protein, 1162 aa, Homo sapiens [sequence omitted]

SEQ ID NO: 55508 - protein, 99 aa, Homo sapiens
  Payload ID: 10941
  Gene Symbol: NCBP2-AS2
  Gene Name: NCBP2 antisense RNA 2 (head to head)
  Uniprot ID: Q69YL0
  ENSP ID: ENSP00000488305
MVLRRLLAALLHSPQLVERLSESRPIRRAAQLTAFALLQAQLRGQDAARRLQDLAAGPVGSLCRRAERFRDAFTQELRRGLRGRSGPPPGSQRGPGANI

SEQ ID NO: 55509 - protein, 377 aa, Homo sapiens
  Payload ID: 10942
  Gene Symbol: NCK1
  Gene Name: NCK adaptor protein 1
  Uniprot ID: P16333
  ENSP ID: ENSP00000288986
MAEEVVVVAKFDYVAQQEQELDIKKNERLWLLDDSKSWWRVRNSMNKTGFVPSNYVERKNSARKASIVKNLKDTLGIGKVKRKPSVPDSASPADDSFVDPGERLYDLNMPAYVKFNYMAEREDELSLIKGTKVIVMEKCSDGWWRGSYNGQVGWFPSNYVTEEGDSPLGDHVGSLSEKLAAVVNNLNTGQVLHVVQALYPFSSSNDEELNFEKGDVMDVIEKPENDPEWWKCRKINGMVGLVPKNYVTVMQNNPLTSGLEPSPPQCDYIRPSLTGKFAGNPWYYGKVTRHQAEMALNERGHEGDFLIRDSESSPNDFSVSLKAQGKNKHFKVQLKETVYCIGQRKFSTMEELVEHYKKAPIFTSEQGEKLYLVKHLS

SEQ ID NO: 55510 - protein, 377 aa, Homo sapiens; identical to SEQ ID NO: 55509
  Payload ID: 10942
  Gene Symbol: NCK1
  Gene Name: NCK adaptor protein 1
  Uniprot ID: P16333
  ENSP ID: ENSP00000417273

SEQ ID NO: 55511 - protein, 162 aa, Homo sapiens
  Payload ID: 10942
  Gene Symbol: NCK1
  Gene Name: NCK adaptor protein 1
  ENSP ID: ENSP00000417729
MAEEVVVVAKFDYVAQQEQELDIKKNERLWLLDDSKSWWRVRNSMNKTGFVPSNYVERKNSARKASIVKNLKDTLGIGKVKRKPSVPDSASPADDSFVDPGERLYDLNMPAYVKFNYMAEREDELSLIKGTKVWNHHLHSVITLGLHSLESLLAILGIMAKS

SEQ ID NO: 55512 - protein, 174 aa, Homo sapiens
  Payload ID: 10942
  Gene Symbol: NCK1
  Gene Name: NCK adaptor protein 1
  ENSP ID: ENSP00000418060
MDWLNVFKDFFSIGKVKRKPSVPDSASPADDSFVDPGERLYDLNMPAYVKFNYMAEREDELSLIKGTKCDYIRPSLTGKFAGNPWYYGKVTRHQAEMALNERGHEGDFLIRDSESSPNDFSVSLKAQGKNKHFKVQLKETVYCIGQRKFSTMEELVEHYKKAPIFTSEQGEKLY

SEQ ID NO: 55513 - protein, 75 aa, Homo sapiens
  Payload ID: 10942
  Gene Symbol: NCK1
  Gene Name: NCK adaptor protein 1
  ENSP ID: ENSP00000418513
MAEEVVVVAKFDYVAQQEQELDIKKNERLWLLDDSKSWWRVRNSMNKTGFVPSNYVERKNSARKASIVKNLKDTL

SEQ ID NO: 55514 - protein, 129 aa, Homo sapiens
  Payload ID: 10942
  Gene Symbol: NCK1
  Gene Name: NCK adaptor protein 1
  ENSP ID: ENSP00000419302
MAEEVVVVAKFDYVAQQEQELDIKKNERLWLLDDSKSWWRVRNSMNKTGFVPSNYVERKNSARKASIVKNLKDTLGIGKVKRKPSVPDSASPADDSFVDPGERLYDLNMPAYVKFNYMAEREDELSLIK

SEQ ID NO: 55515 - protein, 141 aa, Homo sapiens
  Payload ID: 10942
  Gene Symbol: NCK1
  Gene Name: NCK adaptor protein 1
  ENSP ID: ENSP00000419544
  MOD_RES (1)..(1): Any amino acid
XVAQQEQELDIKKNERLWLLDDSKSWWRVRNSMNKTGFVPSNYVERKNSARKASIVKNLKDTLGIGKVKRKPSVPDSASPADDSFVDPGERLYDLNMPAYVKFNYMAEREDELSLIKGTKCDYIRPSLTGKFAGNPWYYGK

SEQ ID NO: 55516 - protein, 313 aa, Homo sapiens
  Payload ID: 10942
  Gene Symbol: NCK1
  Gene Name: NCK adaptor protein 1
  Uniprot ID: P16333
  ENSP ID: ENSP00000419631
MDWLNVFKDFFSIGKVKRKPSVPDSASPADDSFVDPGERLYDLNMPAYVKFNYMAEREDELSLIKGTKVIVMEKCSDGWWRGSYNGQVGWFPSNYVTEEGDSPLGDHVGSLSEKLAAVVNNLNTGQVLHVVQALYPFSSSNDEELNFEKGDVMDVIEKPENDPEWWKCRKINGMVGLVPKNYVTVMQNNPLTSGLEPSPPQCDYIRPSLTGKFAGNPWYYGKVTRHQAEMALNERGHEGDFLIRDSESSPNDFSVSLKAQGKNKHFKVQLKETVYCIGQRKFSTMEELVEHYKKAPIFTSEQGEKLYLVKHLS

SEQ ID NO: 55517 - protein, 115 aa, Homo sapiens
  Payload ID: 10942
  Gene Symbol: NCK1
  Gene Name: NCK adaptor protein 1
  ENSP ID: ENSP00000419677
MAEEVVVVAKFDYVAQQEQELDIKKNERLWLLDDSKSWWRVRNSMNKTGFVPSNYVERKNSARKASIVKNLKDTLGIGKVKRKPSVPDSASPADDSFVDPGERLYDLNMPAYVKF

SEQ ID NO: 55518 - protein, 380 aa, Homo sapiens
  Payload ID: 10943
  Gene Symbol: NCK2
  Gene Name: NCK adaptor protein 2
  Uniprot ID: O43639
  ENSP ID: ENSP00000233154
MTEEVIVIAKWDYTAQQDQELDIKKNERLWLLDDSKTWWRVRNAANRTGYVPSNYVERKNSLKKGSLVKNLKDTLGLGKTRRKTSARDASPTPSTDAEYPANGSGADRIYDLNIPAFVKFAYVAEREDELSLVKGSRVTVMEKCSDGWWRGSYNGQIGWFPSNYVLEEVDEAAAESPSFLSLRKGASLSNGQGSRVLHVVQTLYPFSSVTEEELNFEKGETMEVIEKPENDPEWWKCKNARGQVGLVPKNYVVVLSDGPALHPAHAPQISYTGPSSSGRFAGREWYYGNVTRHQAECALNERGVEGDFLIRDSESSPSDFSVSLKASGKNKHFKVQLVDNVYCIGQRRFHTMDELVEHYKKAPIFTSEHGEKLYLVRALQ

SEQ ID NO: 55519 - protein, 144 aa, Homo sapiens
  Payload ID: 10943
  Gene Symbol: NCK2
  Gene Name: NCK adaptor protein 2
  ENSP ID: ENSP00000377017
MTEEVIVIAKWDYTAQQDQELDIKKNERLWLLDDSKTWWRVRNAANRTGYVPSNYVERKNSLKKGSLVKNLKDTLGLGKTRRKTSARDASPTPSTDAEYPANGSGADRIYDLNIPAFVKFAYVAEREDELSLVKGSRVTVMEKC

SEQ ID NO: 55520 - protein, 380 aa, Homo sapiens; identical to SEQ ID NO: 55518
  Payload ID: 10943
  Gene Symbol: NCK2
  Gene Name: NCK adaptor protein 2
  Uniprot ID: O43639
  ENSP ID: ENSP00000377018

SEQ ID NO: 55521 - protein, 110 aa, Homo sapiens
  Payload ID: 10943
  Gene Symbol: NCK2
  Gene Name: NCK adaptor protein 2
  ENSP ID: ENSP00000408040
MTEEVIVIAKWDYTAQQDQELDIKKNERLWLLDDSKTWWRVRNAANRTGYVPSNYVERKNSLKKGSLVKNLKDTLGLGKTRRKTSARDASPTPSTDAEYPANGSGADRIY

SEQ ID NO: 55522 - protein, 83 aa, Homo sapiens
  Payload ID: 10943
  Gene Symbol: NCK2
  Gene Name: NCK adaptor protein 2
  ENSP ID: ENSP00000410428
MTEEVIVIAKWDYTAQQDQELDIKKNERLWLLDDSKTWWRVRNAANRTGYVPSNYVERKNSLKKGSLVKNLKDTLAQRLLRVP

SEQ ID NO: 55523 - protein, 83 aa, Homo sapiens; identical to SEQ ID NO: 55522
  Payload ID: 10943
  Gene Symbol: NCK2
  Gene Name: NCK adaptor protein 2
  ENSP ID: ENSP00000431109

SEQ ID NO: 55524 - protein, 722 aa, Homo sapiens
  Payload ID: 10944
  Gene Symbol: NCKIPSD
  Gene Name: NCK interacting protein with SH3 domain
  Uniprot ID: Q9NZQ3
  ENSP ID: ENSP00000294129
MYRALYAFRSAEPNALAFAAGETFLVLERSSAHWWLAARARSGETGYVPPAYLRRLQGLEQDVLQAIDRAIEAVHNTAMRDGGKYSLEQRGVLQKLIHHRKETLSRRGPSASSVAVMTSSTSDHHLDAAAARQPNGVCRAGFERQHSLPSSEHLGADGGLYQIPLPSSQIPPQPRRAAPTTPPPPVKRRDREALMASGSGGHNTMPSGGNSVSSGSSVSSTSLDTLYTSSSPSEPGSSCSPTPPPVPRRGTHTTVSQVQPPPSKASAPEPPAEEEVATGTTSASDDLEALGTLSLGTTEEKAAAEAAVPRTIGAELMELVRRNTGLSHELCRVAIGIIVGHIQASVPASSPVMEQVLLSLVEGKDLSMALPSGQVCHDQQRLEVIFADLARRKDDAQQRSWALYEDEGVIRCYLEELLHILTDADPEVCKKMCKRNEFESVLALVAYYQMEHRASLRLLLLKCFGAMCSLDAAIISTLVSSVLPVELARDMQTDTQDHQKLCYSALILAMVFSMGEAVPYAHYEHLGTPFAQFLLNIVEDGLPLDTTEQLPDLCVNLLLALNLHLPAADQNVIMAALSKHANVKIFSEKLLLLLNRGDDPVRIFKHEPQPPHSVLKFLQDVFGSPATAAIFYHTDMMALIDITVRHIADLSPGDKLRMEYLSLMHAIVRTTPYLQHRHRLPDLQAILRRILNEEETSPQCQMDRMIVREMCKEFLVLGEAPS

SEQ ID NO: 55525 - protein, 715 aa, Homo sapiens
  Payload ID: 10944
  Gene Symbol: NCKIPSD
  Gene Name: NCK interacting protein with SH3 domain
  Uniprot ID: Q9NZQ3
  ENSP ID: ENSP00000389059
MYRALYAFRSAEPNALAFAAGETFLVLERSSAHWWLAARARSGETGYVPPAYLRRLQGLEQDVLQAIDRAIEAVHNTAMRDGGKYSLEQRGVLQKLIHHRKETLSRRGPSASSVAVMTSSTSDHHLDAAAARQPNGVCRAGFERQHSLPSSEHLGADGGLYQIPPQPRRAAPTTPPPPVKRRDREALMASGSGGHNTMPSGGNSVSSGSSVSSTSLDTLYTSSSPSEPGSSCSPTPPPVPRRGTHTTVSQVQPPPSKASAPEPPAEEEVATGTTSASDDLEALGTLSLGTTEEKAAAEAAVPRTIGAELMELVRRNTGLSHELCRVAIGIIVGHIQASVPASSPVMEQVLLSLVEGKDLSMALPSGQVCHDQQRLEVIFADLARRKDDAQQRSWALYEDEGVIRCYLEELLHILTDADPEVCKKMCKRNEFESVLALVAYYQMEHRASLRLLLLKCFGAMCSLDAAIISTLVSSVLPVELARDMQTDTQDHQKLCYSALILAMVFSMGEAVPYAHYEHLGTPFAQFLLNIVEDGLPLDTTEQLPDLCVNLLLALNLHLPAADQNVIMAALSKHANVKIFSEKLLLLLNRGDDPVRIFKHEPQPPHSVLKFLQDVFGSPATAAIFYHTDMMALIDITVRHIADLSPGDKLRMEYLSLMHAIVRTTPYLQHRHRLPDLQAILRRILNEEETSPQCQMDRMIVREMCKEFLVLGEAPS

SEQ ID NO: 55526 - protein, 151 aa, Homo sapiens
  Payload ID: 10944
  Gene Symbol: NCKIPSD
  Gene Name: NCK interacting protein with SH3 domain
  ENSP ID: ENSP00000396683
DTTEQLPDLCVNLLLALNLHLPAADQNVIMAALSKHANVKIFSEKLLLLLNRGDDPVRIFKHEPQPPHSVLKFLQDVFGSPATAAIFYHTDMMALIDITVRHIADLSPGDKVPGAAHGVPLPDACYSPHHTLPAAPPPATRPAGHTATHPE

SEQ ID NO: 55527 - protein, 268 aa, Homo sapiens
  Payload ID: 10944
  Gene Symbol: NCKIPSD
  Gene Name: NCK interacting protein with SH3 domain
  ENSP ID: ENSP00000406442
  MOD_RES (1)..(1): Any amino acid
XSAPEPPAEEEVATGTTSASDDLEALGTLSLGTTEEKAAAEAAVPRTIGAELMELVRRNTGLSHELCRVAIGIIVGHIQASVPASSPVMEQVLLSLVEGKDLSMALPSGQVCHDQQRLEVIFADLARRKDDAQQRSWALYEDEGVIRCYLEELLHILTDADPEVCKKMCKRNEFESVLALVAYYQMEHRASLRLLLLKCFGAMCSLDAAIISTLVSSVLPVELARDMQTDTQEHLGTPFAQFLLNIVEDGLPLDTTEQLPDLCVNLLL

SEQ ID NO: 55528 - protein, 203 aa, Homo sapiens
  Payload ID: 10944
  Gene Symbol: NCKIPSD
  Gene Name: NCK interacting protein with SH3 domain
  ENSP ID: ENSP00000408588
MRDGGKYSLEQRGVLQKLIHHRKETLSRRGPSASSVAVMTSSTSDHHLDAAAARQPNGVCRAGFERQHSLPSSEHLGADGGLYQIPLPSSQIPPQPRRAAPTTPPPPVKRRDREALMASGSGGHNTMPSGGNSVSSGSSVSSTSLDTLYTSSSPSEPGSSCSPTPPPVPRRGTHTTVSQVQPPPSKASAPEPPAEEEVATGTT

SEQ ID NO: 55529 - protein, 395 aa, Homo sapiens
  Payload ID: 10944
  Gene Symbol: NCKIPSD
  Gene Name: NCK interacting protein with SH3 domain
  ENSP ID: ENSP00000409675
MYRALYAFRSAEPNALAFAAGETFLVLERSSAHWWLAARARSGETGYVPPAYLRRLQGLEQDVLQAIDRAIEAVHNTAMRDGGKYSLEQRGVLQKLIHHRKETLSRRGPSASSVAVMTSSTSDHHLDAAAARQPNGVCRAGFERQHSLPSSEHLGADGGLYQIPLPSSQIPPQPRRAAPTTPPPPVKRRDREALMASGSGGHNTMPSGGNSVSSGSSVSSTSLDTLYTSSSPSEPGSSCSPTPPPVPRRGTHTTVSQVQPPPSKASAPEPPAEEEVATGTTSASDDLEALGTLSLGTTEEKAAAEAAVPRTIGAELMELVRRNTGLSHELCRVAIGIIVGHIQASVPASSPVMEQVLLSLVEGKVRVGGTAGPPCYPPCSHRHTLVQPVHYRYFS

SEQ ID NO: 55530 - protein, 58 aa, Homo sapiens
  Payload ID: 10944
  Gene Symbol: NCKIPSD
  Gene Name: NCK interacting protein with SH3 domain
  ENSP ID: ENSP00000416144
MYRALYAFRSAEPNALAFAAGETFLVLERSSAHWWLAARARSGETGYVPPAYLRRLQV

SEQ ID NO: 55531 - protein, 165 aa, Homo sapiens
  Payload ID: 10944
  Gene Symbol: NCKIPSD
  Gene Name: NCK interacting protein with SH3 domain
  ENSP ID: ENSP00000416904
MTSSTSDHHLDAAAARQPNGVCRAGFERQHSLPSSEHLGADGGLYQIPLPSSQIPPQPRRAAPTTPPPPVKRRDREALMASGSGGHNTMPSGGNSVSSGSSVSSTSLDTLYTSSSPSEPGSSCSPTPPPVPRRGTHTTVSQVQPPPSKASAPEPPAEEEVATGTT

SEQ ID NO: 55532 - protein, 1134 aa, Homo sapiens
  Payload ID: 10945
  Gene Symbol: NCKAP1
  Gene Name: NCK-associated protein 1
  Uniprot ID: Q9Y2A7
  ENSP ID: ENSP00000354251
MSRSVLQPSQQKLAEKLTILNDRGVGMLTRLYNIKKQGQVWKACGDPKAKPSYLIDKNLESAVKFIVRKFPAVETRNNNQQLAQLQKEKSEILKNLALYYFTFVDVMEFKDHVCELLNTIDVCQVFFDITVNFDLTKNYLDLIITYTTLMILLSRIEERKAIIGLYNYAHEMTHGASDREYPRLGQMIVDYENPLKKMMEEFVPHSKSLSDALISLQMVYPRRNLSADQWRNAQLLSLISAPSTMLNPAQSDTMPCEYLSLDAMEKWIIFGFILCHGILNTDATALNLWKLALQSSSCLSLFRDEVFHIHKAAEDLFVNIRGYNKRINDIRECKEAAVSHAGSMHRERRKFLRSALKELATVLSDQPGLLGPKALFVFMALSFARDEIIWLLRHADNMPKKSADDFIDKHIAELIFYMEELRAHVRKYGPVMQRYYVQYLSGFDAVVLNELVQNLSVCPEDESIIMSSFVNTMTSLSVKQVEDGEVFDFRGMRLDWFRLQAYTSVSKASLGLADHRELGKMMNTIIFHTKMVDSLVEMLVETSDLSIFCFYSRAFEKMFQQCLELPSQSRYSIAFPLLCTHFMSCTHELCPEERHHIGDRSLSLCNMFLDEMAKQARNLITDICTEQCTLSDQLLPKHCAKTISQAVNKKSKKQTGKKGEPEREKPGVESMRKNRLVVTNLDKLHTALSELCFSINYVPNMVVWEHTFTPREYLTSHLEIRFTKSIVGMTMYNQATQEIAKPSELLTSVRAYMTVLQSIENYVQIDITRVFNNVLLQQTQHLDSHGEPTITSLYTNWYLETLLRQVSNGHIAYFPAMKAFVNLPTENELTFNAEEYSDISEMRSLSELLGPYGMKFLSESLMWHISSQVAELKKLVVENVDVLTQMRTSFDKPDQMAALFKRLSSVDSVLKRMTIIGVILSFRSLAQEALRDVLSYHIPFLVSSIEDFKDHIPRETDMKVAMNVYELSSAAGLPCEIDPALVVALSSQKSENISPEEEYKIACLLMVFVAVSLPTLASNVMSQYSPAIEGHCNNIHCLAKAINQIAAALFTIHKGSIEDRLKEFLALASSSLLKIGQETDKTTTRNRESVYLLLDMIVQESPFLTMDLLESCFPYVLLRNAYHAVYKQSVTSSA

SEQ ID NO: 55533 - protein, 1128 aa, Homo sapiens
  Payload ID: 10945
  Gene Symbol: NCKAP1
  Gene Name: NCK-associated protein 1
  Uniprot ID: Q9Y2A7
  ENSP ID: ENSP00000355348
MSRSVLQPSQQKLAEKLTILNDRGVGMLTRLYNIKKACGDPKAKPSYLIDKNLESAVKFIVRKFPAVETRNNNQQLAQLQKEKSEILKNLALYYFTFVDVMEFKDHVCELLNTIDVCQVFFDITVNFDLTKNYLDLIITYTTLMILLSRIEERKAIIGLYNYAHEMTHGASDREYPRLGQMIVDYENPLKKMMEEFVPHSKSLSDALISLQMVYPRRNLSADQWRNAQLLSLISAPSTMLNPAQSDTMPCEYLSLDAMEKWIIFGFILCHGILNTDATALNLWKLALQSSSCLSLFRDEVFHIHKAAEDLFVNIRGYNKRINDIRECKEAAVSHAGSMHRERRKFLRSALKELATVLSDQPGLLGPKALFVFMALSFARDEIIWLLRHADNMPKKSADDFIDKHIAELIFYMEELRAHVRKYGPVMQRYYVQYLSGFDAVVLNELVQNLSVCPEDESIIMSSFVNTMTSLSVKQVEDGEVFDFRGMRLDWFRLQAYTSVSKASLGLADHRELGKMMNTIIFHTKMVDSLVEMLVETSDLSIFCFYSRAFEKMFQQCLELPSQSRYSIAFPLLCTHFMSCTHELCPEERHHIGDRSLSLCNMFLDEMAKQARNLITDICTEQCTLSDQLLPKHCAKTISQAVNKKSKKQTGKKGEPEREKPGVESMRKNRLVVTNLDKLHTALSELCFSINYVPNMVVWEHTFTPREYLTSHLEIRFTKSIVGMTMYNQATQEIAKPSELLTSVRAYMTVLQSIENYVQIDITRVFNNVLLQQTQHLDSHGEPTITSLYTNWYLETLLRQVSNGHIAYFPAMKAFVNLPTENELTFNAEEYSDISEMRSLSELLGPYGMKFLSESLMWHISSQVAELKKLVVENVDVLTQMRTSFDKPDQMAALFKRLSSVDSVLKRMTIIGVILSFRSLAQEALRDVLSYHIPFLVSSIEDFKDHIPRETDMKVAMNVYELSSAAGLPCEIDPALVVALSSQKSENISPEEEYKIACLLMVFVAVSLPTLASNVMSQYSPAIEGHCNNIHCLAKAINQIAAALFTIHKGSIEDRLKEFLALASSSLLKIGQETDKTTTRNRESVYLLLDMIVQESPFLTMDLLESCFPYVLLRNAYHAVYKQSVTSSA

SEQ ID NO: 55534 - protein, 1127 aa, Homo sapiens
  Payload ID: 10946
  Gene Symbol: NCKAP1L
  Gene Name: NCK-associated protein 1-like
  Uniprot ID: P55160
  ENSP ID: ENSP00000293373
MSLTSAYQHKLAEKLTILNDRGQGVLIRMYNIKKTCSDPKSKPPFLLEKSMEPSLKYINKKFPNIDVRNSTQHLGPVHREKAEIIRFLTNYYQSFVDVMEFRDHVYELLNTIDACQCHFDINLNFDFTRSYLDLIVTYTSVILLLSRIEDRRILIGMYNCAHEMLHGHGDPSFARLGQMVLEYDHPLKKLTEEFGPHTKAVSGALLSLHFLFVRRNQGAEQWRSAQLLSLISNPPAMINPANSDTMACEYLSVEVMERWIIIGFLLCHGCLNSNSQCQKLWKLCLQGSLYITLIREDVLQVHKVTEDLFSSLKGYGKRVADIKESKEHVIANSGQFHCQRRQFLRMAVKELETVLADEPGLLGPKALFAFMALSFIRDEVTWLVRHTENVTKTKTPEDYADSSIAELLFLLEGIRSLVRRHIKVIQQYHLQYLARFDALVLSDIIQNLSVCPEEESIIMSSFVSILSSLNLKQVDNGEKFEFSGLRLDWFRLQAYTSVAKAPLHLHENPDLAKVMNLIVFHSRMLDSVEKLLVETSDLSTFCFHLRIFEKMFAMTLEESAMLRYAIAFPLICAHFVHCTHEMCPEEYPHLKNHGLHHCNSFLEELAKQTSNCVLEICAEQRNLSEQLLPKHCATTISKAKNKKTRKQRQTPRKGEPERDKPGAESHRKNRSIVTNMDKLHLNLTELALTMNHVYSFSVFEHTIFPSEYLSSHLEARLNRAIVWLAGYNATTQEIVRPSELLAGVKAYIGFIQSLAQFLGADASRVIRNALLQQTQPLDSCGEQTITTLYTNWYLESLLRQASSGTIILSPAMQAFVSLPREGEQNFSAEEFSDISEMRALAELLGPYGMKFLSENLMWHVTSQIVELKKLVVENMDILVQIRSNFSKPDLMASLLPQLTGAENVLKRMTIIGVILSFRAMAQEGLREVFSSHCPFLMGPIECLKEFVTPDTDIKVTLSIFELASAAGVGCDIDPALVAAIANLKADTSSPEEEYKVACLLLIFLAVSLPLLATDPSSFYSIEKDGYNNNIHCLTKAIIQVSAALFTLYNKNIETHLKEFLVVASVSLLQLGQETDKLKTRNRESISLLMRLVVEESSFLTLDMLESCFPYVLLRNAYREVSRAFHLN

SEQ ID NO: 55535 - protein, 1077 aa, Homo sapiens
  Payload ID: 10946
  Gene Symbol: NCKAP1L
  Gene Name: NCK-associated protein 1-like
  Uniprot ID: P55160
  ENSP ID: ENSP00000445596
MEPSLKYINKKFPNIDVRNSTQHLGPVHREKAEIIRFLTNYYQSFVDVMEFRDHVYELLNTIDACQCHFDINLNFDFTRSYLDLIVTYTSVILLLSRIEDRRILIGMYNCAHEMLHGHGDPSFARLGQMVLEYDHPLKKLTEEFGPHTKAVSGALLSLHFLFVRRNQGAEQWRSAQLLSLISNPPAMINPANSDTMACEYLSVEVMERWIIIGFLLCHGCLNSNSQCQKLWKLCLQGSLYITLIREDVLQVHKVTEDLFSSLKGYGKRVADIKESKEHVIANSGQFHCQRRQFLRMAVKELETVLADEPGLLGPKALFAFMALSFIRDEVTWLVRHTENVTKTKTPEDYADSSIAELLFLLEGIRSLVRRHIKVIQQYHLQYLARFDALVLSDIIQNLSVCPEEESIIMSSFVSILSSLNLKQVDNGEKFEFSGLRLDWFRLQAYTSVAKAPLHLHENPDLAKVMNLIVFHSRMLDSVEKLLVETSDLSTFCFHLRIFEKMFAMTLEESAMLRYAIAFPLICAHFVHCTHEMCPEEYPHLKNHGLHHCNSFLEELAKQTSNCVLEICAEQRNLSEQLLPKHCATTISKAKNKKTRKQRQTPRKGEPERDKPGAESHRKNRSIVTNMDKLHLNLTELALTMNHVYSFSVFEHTIFPSEYLSSHLEARLNRAIVWLAGYNATTQEIVRPSELLAGVKAYIGFIQSLAQFLGADASRVIRNALLQQTQPLDSCGEQTITTLYTNWYLESLLRQASSGTIILSPAMQAFVSLPREGEQNFSAEEFSDISEMRALAELLGPYGMKFLSENLMWHVTSQIVELKKLVVENMDILVQIRSNFSKPDLMASLLPQLTGAENVLKRMTIIGVILSFRAMAQEGLREVFSSHCPFLMGPIECLKEFVTPDTDIKVTLSIFELASAAGVGCDIDPALVAAIANLKADTSSPEEEYKVACLLLIFLAVSLPLLATDPSSFYSIEKDGYNNNIHCLTKAIIQVSAALFTLYNKNIETHLKEFLVVASVSLLQLGQETDKLKTRNRESISLLMRLVVEESSFLTLDMLESCFPYVLLRNAYREVSRAFHLN

SEQ ID NO: 55536 - protein, 449 aa, Homo sapiens
  Payload ID: 10946
  Gene Symbol: NCKAP1L
  Gene Name: NCK-associated protein 1-like
  ENSP ID: ENSP00000447246
MSLTSAYQHKLAEKLTILNDRGQGVLIRMYNIKKTCSDPKSKPPFLLEKSMEPSLKYINKKFPNIDVRNSTQHLGPVHREKAEIIRFLTNYYQSFVDVMEFRDHVYELLNTIDACQCHFDINLNFDFTRSYLDLIVTYTSVILLLSRIEDRRILIGMYNCAHEMLHGHGDPSFARLGQMVLEYDHPLKKLTEEFGPHTKAVSGALLSLHFLFVRRNQGAEQWRSAQLLSLISNPPAMINPANSDTMACEYLSVEVMERWIIIGFLLCHGCLNSNSQCQKLWKLCLQGSLYITLIREDVLQVHKVTEDLFSSLKGYGKRVADIKESKEHVIANSGQFHCQRRQFLRMAVKELETVLADEPGLLGPKALFAFMALSFIRDEVTWLVRHTENVTKTKTPEDYADSSIAELLFLLEGIRSLVRRHIKVIQQYHLQYLARFDALVLSDIIQFLS

SEQ ID NO: 55537 - protein, 69 aa, Homo sapiens
  Payload ID: 10947
  Gene Symbol: NCKAP5
  Gene Name: NCK-associated protein 5
  ENSP ID: ENSP00000351882
MEGKRQLEKRDFGKRLSLDSSLVEYMDSNKYIEHLLTQLEEQHRSLWREKLAVARLQREVAQRTSEGAM

SEQ ID NO: 55538 - protein, 1909 aa, Homo sapiens [sequence omitted]

SEQ ID NO: 55539 - protein, 590 aa, Homo sapiens [sequence omitted]

SEQ ID NO: 55540 - protein, 590 aa, Homo sapiens
  Payload ID: 10947
  Gene Symbol: NCKAP5
  Gene Name: NCK-associated protein 5
  Uniprot ID: O14513
  ENSP ID: ENSP00000386952
MEGKRQLEKRDFGKRLSLDSSLVEYMDSNKYIEHLLTQLEEQHRSLWREKLAVARLQREVAQRTSEGAMHEKLIHELEEERHLRLQSEKRLQEVTLESERNRIQMRSLQQQFSRMEETVRNLLQSQGSPEQKKEETVNIMVYQEKLSEEERKHKEALEDLHMVVDEDSRSESSSTDEGKEKTKLLLERLKALEAENSALALENENQREQYERCLDEVANQVVQALLTQKDLREECVKLKTRVFDLEQQNRTLSILFQQRVRPTSDLLLQKLHSRLLDLSSGDLLSEVERNRSLTQSRTDAEVHEHQLNTKSALKCPGLGAVIPGHLCPRNSYSSSSELSLSSTCSEYSSGSSYTWHDGKNLRKRVKEANENLQEDEDDAVADSVFQSHIIESNCQMRTLDSGIGTFPLPDSGNRSTGRYLCQPDSPEDAEPLLPLQSALSAVSSMRAQTLEREVPSSTDGQRPADSAIVHSTSDPIMTARGMRPLQSRLPKPASSGKVSSQKQNEAEPRPQTCSSFGYAEDPMASQPLPDWGSEVAATGTQDKAPRMCTYSASGGSNSDSDLDYGDNGFGAGRGQLVKALKSAAPEIETT

SEQ ID NO: 55541 - protein, 1909 aa, Homo sapiens
  Payload ID: 10947
  Gene Symbol: NCKAP5
  Gene Name: NCK-associated protein 5
  Uniprot ID: O14513
  ENSP ID: ENSP00000387128
MEGKRQLEKRDFGKRLSLDSSLVEYMDSNKYIEHLLTQLEEQHRSLWREKLAVARLQREVAQRTSEGAMHEKLIHELEEERHLRLQSEKRLQEVTLESERNRIQMRSLQQQFSRMEETVRNLLQSQGSPEQKKEETVNIMVYQEKLSEEERKHKEALEDLHMVVDEDSRSESSSTDEGKEKTKLLLERLKALEAENSALALENENQREQYERCLDEVANQVVQALLTQKDLREECVKLKTRVFDLEQQNRTLSILFQQRVRPTSDLLLQKLHSRLLDLSSGDLLSEVERNRSLTQSRTDAEVHEHQLNTKSALKCPGLGAVIPGHLCPRNSYSSSSELSLSSTCSEYSSGSSYTWHDGKNLRKRQSSQNWDKRLSIDSSLPSGFASPTNELPPTRIKESHILEGLRKLQKRKVLLEPPSVITKWGYKDCMNSNEGIYSPGIKSSSLKEYPPCKTADLGSPCKEPHKTFVYDLDSHVDADDDPSTLALLQAVPNQSCRPHGSKLTHSVSDSLFGWETNRKHFLEGTSSVYPKERPEKLTSCASSCPLEMKLCPSVQTPQVQRERGPQGQGHGRMALNLQLSDTDDNETFDELHIESSDEKSPSDVSLAADTDKSVENLDVLVGFGKSLCGSPEEEEKQVPIPSETRPKTFSFIKQQRVVKRTSSEECVTVIFDAEDGEPIEFSSHQTGVVTVTRNEISINSTPAGPKAEHTELLPQGIACLQPRAAARDYTFFKRSEEDTEKNIPKDNVDNVPRVSTESFSSRTVTQNPQQQKLVKPTHNISCQSNSRSSAPMGIYQKQNLTKIPPRGKSSPQKSKLMEPEATTLLPSSGLVTLEKSPALAPGKLSRFMKTESSGPLFELRSDPHIPKHSAQLPHSSRMPSRRDWVQCPKSQTPGSRSRPAIESSDSGEPPTRDEHCGSGPEAGVKSPSPPPPPGRSVSLLARPSYDYSPAPSSTKSETRVPSETARTPFKSPLLKGISAPVISSNPATTEVQRKKPSVAFKKPIFTHPMPSPEAVIQTRCPAHAPSSSFTVMALGPPKVSPKRGVPKTSPRQTLGTPQRDIGLQTPRISPSTHEPLEMTSSKSVSPGRKGQLNDSASTPPKPSFLGVNESPSSQVSSSSSSSSPAKSHNSPHGCQSAHEKGLKTRLPVGLKVLMKSPQLLRKSSTVPGKHEKDSLNEASKSSVAVNKSKPEDSKNPASMEITAGERNVTLPDSQAQGSLADGLPLETALQEPLESSIPGSDGRDGVDNRSMRRSLSSSKPHLKPALGMNGAKARSHSFSTHSGDKPSTPPIEGSGKVRTQIITNTAERGNSLTRQNSSTESSPNKAPSAPMLESLPSVGRPSGHPSSGKGSLGSSGSFSSQHGSPSKLPLRIPPKSEGLLIPPGKEDQQAFTQGECPSANVAVLGEPGSDRRSCPPTPTDCPEALQSPGRTQHPSTFETSSTSKLETSGRHPDASATATDAVSSEAPLSPTIEEKVMLCIQENVEKGQVQTKPTSVEAKQKPGPSFASWFGFRKSRLPALSSRKMDISKTKVEKKDAKVLGFGNRQLKSERKKEKKKPELQCETENELIKDTKSADNPDGGLQSKNNRRTPQDIYNQLKIEPRNRHSPVACSTKDTFMTELLNRVDKKAAPQTESGSSNASCRNVLKGSSQGSCLIGSSISTQGNHKKNMKIKADMEVPKDSLVKEANENLQEDEDDAVADSVFQSHIIESNCQMRTLDSGIGTFPLPDSGNRSTGRYLCQPDSPEDAEPLLPLQSALSAVSSMRAQTLEREVPSSTDGQRPADSAIVHSTSDPIMTARGMRPLQSRLPKPASSGKVSSQKQNEAEPRPQTCSSFGYAEDPMASQPLPDWGSEVAATGTQDKAPRMCTYSASGGSNSDSDLDYGDNGFGAGRGQLVKALKSAAPEIETT

SEQ ID NO: 55542 - protein, 114 aa, Homo sapiens
  Payload ID: 10947
  Gene Symbol: NCKAP5
  Gene Name: NCK-associated protein 5
  ENSP ID: ENSP00000399070
  MOD_RES (1)..(1): Any amino acid
XQLEKRDFGKRLSLDSSLVEYMDSNKYIEHLLTQLEEQHRSLWREKLAVARLQREVAQRTSEGAMHEKLIHELEEERHLRLQSEKRLQEVTLESERNRIQMRSLQQQFSRRRKM

SEQ ID NO: 55543 - protein, 1334 aa, Homo sapiens
  Payload ID: 10948
  Gene Symbol: NCKAP5L
  Gene Name: NCK-associated protein 5-like
  Uniprot ID: Q9HCH0
  ENSP ID: ENSP00000337998
MSEAMDQPAGGPGNPRPGEGDDGSMEPGTCQELLHRLRELEAENSALAQANENQRETYERCLDEVANHVVQALLNQKDLREECIKLKKRVFDLERQNQMLSALFQQKLQLTTGSLPQIPLTPLQPPSEPPASPSLSSTEGPAAPLPLGHCAGQREVCWEQQLRPGGPGPPAAPPPALDALSPFLRKKAQILEVLRALEETDPLLLCSPATPWRPPGQGPGSPEPINGELCGPPQPEPSPWAPCLLLGPGNLGGLLHWERLLGGLGGEEDTGRPWGPSRGPPQAQGTSSGPNCAPGSSSSSSSDEAGDPNEAPSPDTLLGALARRQLNLGQLLEDTESYLQAFLAGAAGPLNGDHPGPGQSSSPDQAPPQLSKSKGLPKSAWGGGTPEAHRPGFGATSEGQGPLPFLSMFMGAGDAPLGSRPGHPHSSSQVKSKLQIGPPSPGEAQGPLLPSPARGLKFLKLPPTSEKSPSPGGPQLSPQLPRNSRIPCRNSGSDGSPSPLLARRGLGGGELSPEGAQGLPTSPSPCYTTPDSTQLRPPQSALSTTLSPGPVVSPCYENILDLSRSTFRGPSPEPPPSPLQVPTYPQLTLEVPQAPEVLRSPGVPPSPCLPESYPYGSPQEKSLDKAGSESPHPGRRTPGNSSKKPSQGSGRRPGDPGSTPLRDRLAALGKLKTGPEGALGSEKNGVPARPGTEKTRGPGKSGESAGDMVPSIHRPLEQLEAKGGIRGAVALGTNSLKQQEPGLMGDPGARVYSSHSMGARVDLEPVSPRSCLTKVELAKSRLAGALCPQVPRTPAKVPTSAPSLGKPNKSPHSSPTKLPSKSPTKVVPRPGAPLVTKESPKPDKGKGPPWADCGSTTAQSTPLVPGPTDPSQGPEGLAPHSAIEEKVMKGIEENVLRLQGQERAPGAEVKHRNTSSIASWFGLKKSKLPALNRRTEATKNKEGAGGGSPLRREVKMEARKLEAESLNISKLMAKAEDLRRALEEEKAYLSSRARPRPGGPAPGPNTGLGQVQGQLAGMYQGADTFMQQLLNRVDGKELPSKSWREPKPEYGDFQPVSSDPKSPWPACGPRNGLVGPLQGCGKPPGKPSSEPGRREEMPSEDSLAEPVPTSHFTACGSLTRTLDSGIGTFPPPDHGSSGTPSKNLPKTKPPRLDPPPGVPPARPPPLTKVPRRAHTLEREVPGIEELLVSGRHPSMPAFPALLPAAPGHRGHETCPDDPCEDPGPTPPVQLAKNWTFPNTRAAGSSSDPLMCPPRQLEGLPRTPMALPVDRKRSQEPSRPSPTPQGPPFGGSRTPSTSDMAEEGRVASGGPPGLETSESLSDSLYDSLSSCGSQG

SEQ ID NO: 55544 - protein, 1004 aa, Homo sapiens
  Payload ID: 10948
  Gene Symbol: NCKAP5L
  Gene Name: NCK-associated protein 5-like
  ENSP ID: ENSP00000402619
  MOD_RES (1)..(1): Any amino acid
XSSGPNCAPGSSSSSSSDEAGDPNEAPSPDTLLGALARRQLNLGQLLEDTESYLQAFLAGAAGPLNGDHPGPGQSSSPDQAPPQLSKSKGLPKSAWGGGTPEAHRPGFGATSEGQGPLPFLSMFMGAGDAPLGSRPGHPHSSSQVKSKLQIGPPSPGEAQGPLLPSPARGLKFLKLPPTSEKSPSPGGPQLSPQLPRNSRIPCRNSGSDGSPSPLLARRGLGGGELSPEGAQGLPTSPSPCYTTPDSTQLRPPQSALSTTLSPGPVVSPCYENILDLSRSTFRGPSPEPPPSPLQVPTYPQLTLEVPQAPEVLRSPGVPPSPCLPESYPYGSPQEKSLDKAGSESPHPGRRTPGNSSKKPSQGSGRRPGDPGSTPLRDRLAALGKLKTGPEGALGSEKNGVPARPGTEKTRGPGKSGESAGDMVPSIHRPLEQLEAKGGIRGAVALGTNSLKQQEPGLMGDPGARVYSSHSMGARVDLEPVSPRSCLTKVELAKSRLAGALCPQVPRTPAKVPTSAPSLGKPNKSPHSSPTKLPSKSPTKVVPRPGAPLVTKESPKPDKGKGPPWADCGSTTAQSTPLVPGPTDPSQGPEGLAPHSAIEEKVMKGIEENVLRLQGQERAPGAEVKHRNTSSIASWFGLKKSKLPALNRRTEATKNKEGAGGGSPLRREVKMEARKLEAESLNISKLMAKAEDLRRALEEEKAYLSSRARPRPGGPAPGPNTGLGQVQGQLAGMYQGADTFMQQLLNRVDGKELPSKSWREPKPEYGDFQPVSSDPKSPWPACGPRNGLVGPLQGCGKPPGKPSSEPGRREEMPSEDSLAEPVPTSHFTACGSLTRTLDSGIGTFPPPDHGSSGTPSKNLPKTKPPRLDPPPGVPPARPPPLTKVPRRAHTLEREVPGIEELLVSGRHPSMPAFPALLPAAPGHRGHETCPDDPCEDPGPTPPVQLAKNWTFPNTRAAGSSSDPLMCPPRQLEGLPRTPMVRIAAEERERTREQEGVMWGDQFLQ

SEQ ID NO: 55545 - protein, 674 aa, Homo sapiens
  Payload ID: 10949
  Gene Symbol: NDC1
  Gene Name: NDC1 transmembrane nucleoporin
  Uniprot ID: Q9BTX1
  ENSP ID: ENSP00000360483
MATAVSRPCAGRSRDILWRVLGWRIVASIVWSVLFLPICTTVFIIFSRIDLFHPIQWLSDSFSDLYSSYVIFYFLLLSVVIIIISIFNVEFYAVVPSIPCSRLALIGKIIHPQQLMHSFIHAAMGMVMAWCAAVITQGQYSFLVVPCTGTNSFGSPAAQTCLNEYHLFFLLTGAFMGYSYSLLYFVNNMNYLPFPIIQQYKFLRFRRSLLLLVKHSCVESLFLVRNFCILYYFLGYIPKAWISTAMNLHIDEQVHRPLDTVSGLLNLSLLYHVWLCGVFLLTTWYVSWILFKIYATEAHVFPVQPPFAEGSDECLPKVLNSNPPPIIKYLALQDLMLLSQYSPSRRQEVFSLSQPGGHPHNWTAISRECLNLLNGMTQKLILYQEAAATNGRVSSSYPVEPKKLNSPEETAFQTPKSSQMPRPSVPPLVKTSLFSSKLSTPDVVSPFGTPFGSSVMNRMAGIFDVNTCYGSPQSPQLIRRGPRLWTSASDQQMTEFSNPSPSTSISAEGKTMRQPSVIYSWIQNKREQIKNFLSKRVLIMYFFSKHPEASIQAVFSDAQMHIWALEGLSHLVAASFTEDRFGVVQTTLPAILNTLLTLQEAVDKYFKLPHASSKPPRISGSLVDTSYKTLRFAFRASLKTAIYRITTTFGEHLNAVQASAEHQKRLQQFLEFKE

SEQ ID NO: 55546 - protein, 642 aa, Homo sapiens
  Payload ID: 10950
  Gene Symbol: NDC80
  Gene Name: NDC80 kinetochore complex component
  Uniprot ID: O14777
  ENSP ID: ENSP00000261597
MKRSSVSSGGAGRLSMQELRSQDVNKQGLYTPQTKEKPTFGKLSINKPTSERKVSLFGKRTSGHGSRNSQLGIFSSSEKIKDPRPLNDKAFIQQCIRQLCEFLTENGYAHNVSMKSLQAPSVKDFLKIFTFLYGFLCPSYELPDTKFEEEVPRIFKDLGYPFALSKSSMYTVGAPHTWPHIVAALVWLIDCIKIHTAMKESSPLFDDGQPWGEETEDGIMHNKLFLDYTIKCYESFMSGADSFDEMNAELQSKLKDLFNVDAFKLESLEAKNRALNEQIARLEQEREKEPNRLESLRKLKASLQGDVQKYQAYMSNLESHSAILDQKLNGLNEEIARVELECETIKQENTRLQNIIDNQKYSVADIERINHERNELQQTINKLTKDLEAEQQKLWNEELKYARGKEAIETQLAEYHKLARKLKLIPKGAENSKGYDFEIKFNPEAGANCLVKYRAQVYVPLKELLNETEEEINKALNKKMGLEDTLEQLNAMITESKRSVRTLKEEVQKLDDLYQQKIKEAEEEDEKCASELESLEKHKHLLESTVNQGLSEAMNELDAVQREYQLVVQTTTEERRKVGNNLQRLLEMVATHVGSVEKHLEEQIAKVDREYEECMSEDLSENIKEIRDKYEKKATLIKSSEE

SEQ ID NO: 55547 - protein, 32 aa, Homo sapiens
  Payload ID: 10950
  Gene Symbol: NDC80
  Gene Name: NDC80 kinetochore complex component
  ENSP ID: ENSP00000458236
TTEERRKVGNNLQRLLEMVATHVGSVERRMLG

SEQ ID NO: 55548 - protein, 141 aa, Homo sapiens
  Payload ID: 10950
  Gene Symbol: NDC80
  Gene Name: NDC80 kinetochore complex component
  ENSP ID: ENSP00000461227
MKRSSVSSGGAGRLSMQELRSQDVNKQGLYTPQTKEKPTFGKLSINKPTSERKVSLFGKRWSLALSPRLECSGAISAHCNLCLASSSNSPASASRVAGITELVDMDPGIVNLVYFPVLRKSRTRDHLMTKHSFSSVFDNSV

SEQ ID NO: 55549 - protein, 168 aa, Homo sapiens
  Payload ID: 10950
  Gene Symbol: NDC80
  Gene Name: NDC80 kinetochore complex component
  ENSP ID: ENSP00000476919
CIRQLCEFLTENGYAHNVSMKSLQAPSVKDFLKIFTFLYGFLCPSYELPDTKFEEEVPRIFKDLGYPFALSKSSMYTVGAPHTWPHIVAALVWLIDCIKSLALLPRLECSGMISAHYNLHLPGSSNSHASASQVARITGAHHHAQLIFVFSVETACHHVGQADLELLT

SEQ ID NO: 55550 - protein, 882 aa, Homo sapiens
  Payload ID: 10951
  Gene Symbol: NDST1
  Gene Name: N-deacetylase/N-sulfotransferase (heparan glucosaminyl) 1
  Uniprot ID: P52848
  ENSP ID: ENSP00000261797
MPALACLRRLCRHVSPQAVLFLLFIFCLFSVFISAYYLYGWKRGLEPSADAPEPDCGDPPPVAPSRLLPLKPVQAATPSRTDPLVLVFVESLYSQLGQEVVAILESSRFKYRTEIAPGKGDMPTLTDKGRGRFALIIYENILKYVNLDAWNRELLDKYCVAYGVGIIGFFKANENSLLSAQLKGFPLFLHSNLGLKDCSINPKSPLLYVTRPSEVEKGVLPGEDWTVFQSNHSTYEPVLLAKTRSSESIPHLGADAGLHAALHATVVQDLGLHDGIQRVLFGNNLNFWLHKLVFVDAVAFLTGKRLSLPLDRYILVDIDDIFVGKEGTRMKVEDVKALFDTQNELRAHIPNFTFNLGYSGKFFHTGTNAEDAGDDLLLSYVKEFWWFPHMWSHMQPHLFHNQSVLAEQMALNKKFAVEHGIPTDMGYAVAPHHSGVYPVHVQLYEAWKQVWSIRVTSTEEYPHLKPARYRRGFIHNGIMVLPRQTCGLFTHTIFYNEYPGGSSELDKIINGGELFLTVLLNPISIFMTHLSNYGNDRLGLYTFKHLVRFLHSWTNLRLQTLPPVQLAQKYFQIFSEEKDPLWQDPCEDKRHKDIWSKEKTCDRFPKLLIIGPQKTGTTALYLFLGMHPDLSSNYPSSETFEEIQFFNGHNYHKGIDWYMEFFPIPSNTTSDFYFEKSANYFDSEVAPRRAAALLPKAKVLTILINPADRAYSWYQHQRAHDDPVALKYTFHEVITAGSDASSKLRALQNRCLVPGWYATHIERWLSAYHANQILVLDGKLLRTEPAKVMDMVQKFLGVTNTIDYHKTLAFDPKKGFWCQLLEGGKTKCLGKSKGRKYPEMDLDSRAFLKDYYRDHNIELSKLLYKMGQTLPTWLREDLQNTR

SEQ ID NO: 55551 - protein, 159 aa, Homo sapiens
  Payload ID: 10951
  Gene Symbol: NDST1
  Gene Name: N-deacetylase/N-sulfotransferase (heparan glucosaminyl) 1
  ENSP ID: ENSP00000427813
MPALACLRRLCRHVSPQAVLFLLFIFCLFSVFISAYYLYGWKRGLEPSADAPEPDCGDPPPVAPSRLLPLKPVQAATPSRTDPLVLVFVESLYSQLGQEVVAILESSRFKYRTEIAPGKGDMPTLTDKGRGRFALIIYENILKYVNLDAWNRELLDKYC

SEQ ID NO: 55552 - protein, 825 aa, Homo sapiens
  Payload ID: 10951
  Gene Symbol: NDST1
  Gene Name: N-deacetylase/N-sulfotransferase (heparan glucosaminyl) 1
  ENSP ID: ENSP00000428604
MPALACLRRLCRHVSPQAVLFLLFIFCLFSVFISAYYLYGWKRGLEPSADAPEPDCGDPPPVAPSRLLPLKPVQAATPSRTDPLVLVFVESLYSQLGQEVVAILESSRFKYRTEIAPGKGDMPTLTDKGRGRFALIIYENILKYVNLDAWNRELLDKYCVAYGVGIIGFFKANENSLLSAQLKGFPLFLHSNLGLKDCSINPKSPLLYVTRPSEVEKGVLPGEDWTVFQSNHSTYEPVLLAKTRSSESIPHLGADAGLHAALHATVVQDLGLHDGIQRVLFGNNLNFWLHKLVFVDAVAFLTGKRLSLPLDRYILVDIDDIFVGKEGTRMKVEDVKALFDTQNELRAHIPNFTFNLGYSGKFFHTGTNAEDAGDDLLLSYVKEFWWFPHMWSHMQPHLFHNQSVLAEQMALNKKFAVEHGIPTDMGYAVAPHHSGVYPVHVQLYEAWKQVWSIRVTSTEEYPHLKPARYRRGFIHNGIMVLPRQTCGLFTHTIFYNEYPGGSSELDKIINGGELFLTVLLNPISIFMTHLSNYGNDRLGLYTFKHLVRFLHSWTNLRLQTLPPVQLAQKYFQIFSEEKDPLWQDPCEDKRHKDIWSKEKTCDRFPKLLIIGPQKTGTTALYLFLGMHPDLSSNYPSSETFEEIQFFNGHNYHKGIDWYMEFFPIPSNTTSDFYFEKSANYFDSEVAPRRAAALLPKAKVLTILINPADRAYSWYQILVLDGKLLRTEPAKVMDMVQKFLGVTNTIDYHKTLAFDPKKGFWCQLLEGGKTKCLGKSKGRKYPEMDLDSRAFLKDYYRDHNIELSKLLYKMGQTLPTWLREDLQNTR

SEQ ID NO: 55553 - protein, 68 aa, Homo sapiens
  Payload ID: 10951
  Gene Symbol: NDST1
  Gene Name: N-deacetylase/N-sulfotransferase (heparan glucosaminyl) 1
  ENSP ID: ENSP00000429966
MPALACLRRLCRHVSPQAVLFLLFIFCLFSVFISAYYLYGWKRGLEPSADAPEPDCGDPPPVAPSRLL

SEQ ID NO: 55554 - protein, 23 aa, Homo sapiens
  Payload ID: 10951
  Gene Symbol: NDST1
  Gene Name: N-deacetylase/N-sulfotransferase (heparan glucosaminyl) 1
  ENSP ID: ENSP00000430258
MPALACLRRLCRHVSPQAVLFLL

SEQ ID NO: 55555 - protein, 883 aa, Homo sapiens
  Payload ID: 10952
  Gene Symbol: NDST2
  Gene Name: N-deacetylase/N-sulfotransferase (heparan glucosaminyl) 2
  Uniprot ID: P52849
  ENSP ID: ENSP00000299641
MLQLWKVVRPARQLELHRLILLLIAFSLGSMGFLAYYVSTSPKAKEPLPLPLGDCSSGGAAGPGPARPPVPPRPPRPPETARTEPVVLVFVESAYSQLGQEIVAILESSRFRYSTELAPGRGDMPTLTDNTHGRYVLVIYENLLKYVNLDAWSRELLDRYCVEYGVGIIGFFRAHEHSLLSAQLKGFPLFLHSNLGLRDYQVNPSAPLLHLTRPSRLEPGPLPGDDWTIFQSNHSTYEPVLLASLRPAEPAVPGPVLRRARLPTVVQDLGLHDGIQRVLFGHGLSFWLHKLIFVDAVAYLTGKRLCLDLDRYILVDIDDIFVGKEGTRMKVADVEALLTTQNKLRTLVPNFTFNLGFSGKFYHTGTEEEDAGDDMLLKHRKEFWWFPHMWSHMQPHLFHNRSVLADQMRLNKQFALEHGIPTDLGYAVAPHHSGVYPIHTQLYEAWKSVWGIQVTSTEEYPHLRPARYRRGFIHNGIMVLPRQTCGLFTHTIFYNEYPGGSRELDRSIRGGELFLTVLLNPISIFMTHLSNYGNDRLGLYTFESLVRFLQCWTRLRLQTLPPVPLAQKYFELFPQERSPLWQNPCDDKRHKDIWSKEKTCDRLPKFLIVGPQKTGTTAIHFFLSLHPAVTSSFPSPSTFEEIQFFNSPNYHKGIDWYMDFFPVPSNASTDFLFEKSATYFDSEVVPRRGAALLPRAKIITVLTNPADRAYSWYQHQRAHGDPVALNYTFYQVISASSQTPLALRSLQNRCLVPGYYSTHLQRWLTYYPSGQLLIVDGQELRTNPAASMESIQKFLGITPFLNYTRTLRFDDDKGFWCQGLEGGKTRCLGRSKGRRYPDMDTESRLFLTDFFRNHNLELSKLLSRLGQPVPSWLREELQHSSLG

SEQ ID NO: 55556 - protein, 883 aa, Homo sapiens; identical to SEQ ID NO: 55555
  Payload ID: 10952
  Gene Symbol: NDST2
  Gene Name: N-deacetylase/N-sulfotransferase (heparan glucosaminyl) 2
  Uniprot ID: P52849
  ENSP ID: ENSP00000310657

SEQ ID NO: 55557 - protein, 149 aa, Homo sapiens
  Payload ID: 10952
  Gene Symbol: NDST2
  Gene Name: N-deacetylase/N-sulfotransferase (heparan glucosaminyl) 2
  ENSP ID: ENSP00000392733
GDPVALNYTFYQVISASSQTPLALRSLQNRCLVPGYYSTHLQRWLTYYPSGQLLIVDGQELRTNPAASMESIQKFLGITPFLNYTRTLRFDDDKGFWCQGLEGGKTRCLGRSKGRRYPDMDTEVSKARGRGIPLHFQDLILCPTSYHFC

SEQ ID NO: 55558 - protein, 873 aa, Homo sapiens
  Payload ID: 10953
  Gene Symbol: NDST3
  Gene Name: N-deacetylase/N-sulfotransferase (heparan glucosaminyl) 3
  Uniprot ID: O95803
  ENSP ID: ENSP00000296499
MSFIMKLHRHFQRTVILLATFCMVSIIISAYYLYSGYKQENELSETASEVDCGDLQHLPYQLMEVKAMKLFDASRTDPTVLVFVESQYSSLGQDIIMILESSRFQYHIEIAPGKGDLPVLIDKMKGKYILIIYENILKYINMDSWNRSLLDKYCVEYGVGVIGFHKTSEKSVQSFQLKGFPFSIYGNLAVKDCCINPHSPLIRVTKSSKLEKGSLPGTDWTVFQINHSAYQPVIFAKVKTPENLSPSISKGAFYATIIHDLGLHDGIQRVLFGNNLNFWLHKLIFIDAISFLSGKRLTLSLDRYILVDIDDIFVGKEGTRMNTNDVKALLDTQNLLRAQITNFTFNLGFSGKFYHTGTEEEDEGDDCLLGSVDEFWWFPHMWSHMQPHLFHNESSLVEQMILNKKFALEHGIPTDMGYAVAPHHSGVYPVHVQLYEAWKKVWNIKITSTEEYPHLKPARYRRGFIHKNIMVLPRQTCGLFTHTIFYKEYPGGPKELDKSIQGGELFFTVVLNPISIFMTHLSNYGNDRLGLYTFVNLANFVKSWTNLRLQTLPPVQLAHKYFELFPDQKDPLWQNPCDDKRHRDIWSKEKTCDRLPKFLVIGPQKTGTTALYLFLVMHPSILSNSPSPKTFEEVQFFNRNNYHRGIDWYMDFFPVPSNVTTDFLFEKSANYFHSEEAPKRAASLVPKAKIITILIDPSDRAYSWYQHQRSHEDPAALKFSFYEVISAGPRAPSELRALQKRCLVPGWYASHIERWLVYFPPFQLLIIDGQQLRTDPATVMDEVQKFLGVLPHYNYSEALTFDSHKGFWCQLLEEGKTKCLGKSKGRKYPPMDSDSRTFLSSYYRDHNVELSKLLHKLGQPLPSWLRQELQKVR

SEQ ID NO: 55559 - protein, 872 aa, Homo sapiens
  Payload ID: 10954
  Gene Symbol: NDST4
  Gene Name: N-deacetylase/N-sulfotransferase (heparan glucosaminyl) 4
  Uniprot ID: Q9H3R1
  ENSP ID: ENSP00000264363
MNLIVKLRRSFRTLIVLLATFCLVSIVISAYFLYSGYKQEMTLIETTAEAECTDIKILPYRSMELKTVKPIDTSKTDPTVLLFVESQYSQLGQDIIAILESSRFQYHMVIAPGKGDIPPLTDNGKGKYTLVIYENILKYVSMDSWNRELLEKYCVEYSVSIIGFHKANENSLPSTQLKGFPLNLFNNLALKDCFVNPQSPLLHITKAPKVEKGPLPGEDWTIFQYNHSTYQPVLLTELQTEKSLSSLSSKTLFATVIQDLGLHDGIQRVLFGNNLNFWLHKLIFIDAISFLSGKRLTLSLDRYILVDIDDIFVGKEGTRMNVKDVKALLETQNLLRTQVANFTFNLGFSGKFYHTGTEEEDEGDDLLLRSVDEFWWFPHMWSHMQPHLFHNESSLVEQMILNKEFALEHGIPINMGYAVAPHHSGVYPVHIQLYAAWKKVWGIQVTSTEEYPHLKPARYRKGFIHNSIMVLPRQTCGLFTHTIFYKEYPGGPQELDKSIRGGELFLTILLNPISIFMTHLSNYGNDRLGLYTFVNLVNFVQSWTNLKLQTLPPVQLAHQYFELFPEQKDPLWQNPCDDKRHKDIWSREKTCDHLPKFLVIGPQKTGTTALYLFLLMHPSIISNLPSPKTFEEVQFFNGNNYHKGIDWYMDFFPTPSNTTSDFLFEKSANYFHSEEAPRRAASLVPKAKIITILIDPSDRAYSWYQHQRSHEDPAALRFNFYEVISTGHWAPSDLKTLQRRCLVPGWYAVHIERWLTYFATSQLLIIDGQQLRSDPATVMDEVQKFLGVTPRYNYSEALTFDPQKGFWCQLLEGGKTKCLGKSKGRKYPPMDPESRTFLSNYYRDHNVELSKLLHRLGQPLPSWLRQELQKVR

SEQ ID NO: 55560 - protein, 369 aa, Homo sapiens
  Payload ID: 10954
  Gene Symbol: NDST4
  Gene Name: N-deacetylase/N-sulfotransferase (heparan glucosaminyl) 4
  Uniprot ID: Q9H3R1
  ENSP ID: ENSP00000423218
MWSHMQPHLFHNESSLVEQMILNKEFALEHGIPINMGYAVAPHHSGVYPVHIQLYAAWKKVWGIQVTSTEEYPHLKPARYRKGFIHNSIMVLPRQTCGLFTHTIFYKEYPGGPQELDKSIRGGELFLTILLNPISIFMTHLSNYGNDRLGLYTFVNLVNFVQSWTNLKLQTLPPVQLAHQYFELFPEQKDPLWQNPCDDKRHKDIWSREKTCDHLPKFLVIGPQKTGTTALYLFLLMHPSIISNLPSPKTFEEVQFFNGNNYHKGIDWYMDFFPTPSNTTSDFLFEKSANYFHSEEAPRRAASLVPKAKIITILIDPSDRAYSWYQVGVQWRDLGSLQPSPPRFMPFSCLSLLSSWDYSTNDHMKIQLL

SEQ ID NO: 55561 - protein, 369 aa, Homo sapiens; identical to SEQ ID NO: 55560
  Payload ID: 10954
  Gene Symbol: NDST4
  Gene Name: N-deacetylase/N-sulfotransferase (heparan glucosaminyl) 4
  Uniprot ID: Q9H3R1
  ENSP ID: ENSP00000483949

SEQ ID NO: 55562 - protein, 328 aa, Homo sapiens
  Payload ID: 10955
  Gene Symbol: NDRG2
  Gene Name: NDRG family member 2
  Uniprot ID: Q9UN36
  ENSP ID: ENSP00000298684
MAELQEVQITEEKPLLPGQTPEAAKTHSVETPYGSVTFTVYGTPKPKRPAILTYHDVGLNYKSCFQPLFQFEDMQEIIQNFVRVHVDAPGMEEGAPVFPLGYQYPSLDQLADMIPCVLQYLNFSTIIGVGVGAGAYILARYALTGLTSSIPEMILGHLFSQEELSGNSELIQKYRNIITHAPNLDNIELYWNSYNNRRDLNFERGGDITLRCPVMLVVGDQAPHEDAVVECNSKLDPTQTSFLKMADSGGQPQLTQPGKLTEAFKYFLQGMGYMASSCMTRLSRSRTASLTSAASVDGNRSRSRTLSQSSESGTLSSGPPGHTMEVSC

SEQ ID NO: 55563 - protein, 371 aa, Homo sapiens
  Payload ID: 10955
  Gene Symbol: NDRG2
  Gene Name: NDRG family member 2
  Uniprot ID: Q9UN36
  ENSP ID: ENSP00000298687
MAELQEVQITEEKPLLPGQTPEAAKEAELAARILLDQGQTHSVETPYGSVTFTVYGTPKPKRPAILTYHDVGLNYKSCFQPLFQFEDMQEIIQNFVRVHVDAPGMEEGAPVFPLGYQYPSLDQLADMIPCVLQYLNFSTIIGVGVGAGAYILARYALNHPDTVEGLVLINIDPNAKGWMDWAAHKLTGLTSSIPEMILGHLFSQEELSGNSELIQKYRNIITHAPNLDNIELYWNSYNNRRDLNFERGGDITLRCPVMLVVGDQAPHEDAVVECNSKLDPTQTSFLKMADSGGQPQLTQPGKLTEAFKYFLQGMGYMASSCMTRLSRSRTASLTSAASVDGNRSRSRTLSQSSESGTLSSGPPGHTMEVSC

SEQ ID NO: 55564 - protein, 357 aa, Homo sapiens
  Payload ID: 10955
  Gene Symbol: NDRG2
  Gene Name: NDRG family member 2
  Uniprot ID: Q9UN36
  ENSP ID: ENSP00000344620
MAELQEVQITEEKPLLPGQTPEAAKTHSVETPYGSVTFTVYGTPKPKRPAILTYHDVGLNYKSCFQPLFQFEDMQEIIQNFVRVHVDAPGMEEGAPVFPLGYQYPSLDQLADMIPCVLQYLNFSTIIGVGVGAGAYILARYALNHPDTVEGLVLINIDPNAKGWMDWAAHKLTGLTSSIPEMILGHLFSQEELSGNSELIQKYRNIITHAPNLDNIELYWNSYNNRRDLNFERGGDITLRCPVMLVVGDQAPHEDAVVECNSKLDPTQTSFLKMADSGGQPQLTQPGKLTEAFKYFLQGMGYMASSCMTRLSRSRTASLTSAASVDGNRSRSRTLSQSSESGTLSSGPPGHTMEVSC

SEQ ID NO: 55565 - protein, 357 aa, Homo sapiens; identical to SEQ ID NO: 55564
  Payload ID: 10955
  Gene Symbol: NDRG2
  Gene Name: NDRG family member 2
  Uniprot ID: Q9UN36
  ENSP ID: ENSP00000353649

SEQ ID NO: 55566 - protein, 341 aa, Homo sapiens
  Payload ID: 10955
  Gene Symbol: NDRG2
  Gene Name: NDRG family member 2
  Uniprot ID: Q9UN36
  ENSP ID: ENSP00000380943
MAELQEVQITEEKPLLPGQTPEAAKTHSVETPYGSVTFTVYGTPKPKRPAILTYHDVGLNYKSCFQPLFQFEDMQEIIQNFVRVHVDAPGMEEGAPVFPLGYQYPSLDQLADMIPCVLQYLNFSTIIGVGVGAGAYILARYALNHPDTVEGLVLINIDPNAKGWMDWAAHKLTGLTSSIPEMILGHLFSQEELSGNSELIQKYRNIITHAPNLDNIELYWNSYNNRRDLNFERGGDITLRCPVMLVVGDQAPHEDAVMADSGGQPQLTQPGKLTEAFKYFLQGMGYMASSCMTRLSRSRTASLTSAASVDGNRSRSRTLSQSSESGTLSSGPPGHTMEVSC

SEQ ID NO: 55567 - protein, 360 aa, Homo sapiens
  Payload ID: 10955
  Gene Symbol: NDRG2
  Gene Name: NDRG family member 2
  Uniprot ID: Q9UN36
  ENSP ID: ENSP00000380945
MAELQEVQITEEKPLLPGQTPEAAKEAELAARILLDQGQTHSVETPYGSVTFTVYGTPKPKRPAILTYHDVGLNYKSCFQPLFQFEDMQEIIQNFVRVHVDAPGMEEGAPVFPLGYQYPSLDQLADMIPCVLQYLNFSTIIGVGVGAGAYILARYALNHPDTVEGLVLINIDPNAKGWMDWAAHKLTGLTSSIPEMILGHLFSQEELSGNSELIQKYRNIITHAPNLDNIELYWNSYNNRRDLNFERGGDITLRCPVMLVVECNSKLDPTQTSFLKMADSGGQPQLTQPGKLTEAFKYFLQGMGYMASSCMTRLSRSRTASLTSAASVDGNRSRSRTLSQSSESGTLSSGPPGHTMEVSC

SEQ ID NO: 55568 - protein, 371 aa, Homo sapiens; identical to SEQ ID NO: 55563
  Payload ID: 10955
  Gene Symbol: NDRG2
  Gene Name: NDRG family member 2
  Uniprot ID: Q9UN36
  ENSP ID: ENSP00000380949

SEQ ID NO: 55569 - protein, 371 aa, Homo sapiens; identical to SEQ ID NO: 55563
  Payload ID: 10955
  Gene Symbol: NDRG2
  Gene Name: NDRG family member 2
  Uniprot ID: Q9UN36
  ENSP ID: ENSP00000380951

SEQ ID NO: 55570 - protein, 356 aa, Homo sapiens [sequence omitted]

SEQ ID NO: 55571 - protein, 371 aa, Homo sapiens; identical to SEQ ID NO: 55563
  Payload ID: 10955
  Gene Symbol: NDRG2
  Gene Name: NDRG family member 2
  Uniprot ID: Q9UN36
  ENSP ID: ENSP00000380956

SEQ ID NO: 55572 - protein, 367 aa, Homo sapiens
  Payload ID: 10955
  Gene Symbol: NDRG2
  Gene Name: NDRG family member 2
  Uniprot ID: Q9UN36
  ENSP ID: ENSP00000385889
MENGGSMQATMAELQEVQITEEKPLLPGQTPEAAKTHSVETPYGSVTFTVYGTPKPKRPAILTYHDVGLNYKSCFQPLFQFEDMQEIIQNFVRVHVDAPGMEEGAPVFPLGYQYPSLDQLADMIPCVLQYLNFSTIIGVGVGAGAYILARYALNHPDTVEGLVLINIDPNAKGWMDWAAHKLTGLTSSIPEMILGHLFSQEELSGNSELIQKYRNIITHAPNLDNIELYWNSYNNRRDLNFERGGDITLRCPVMLVVGDQAPHEDAVVECNSKLDPTQTSFLKMADSGGQPQLTQPGKLTEAFKYFLQGMGYMASSCMTRLSRSRTASLTSAASVDGNRSRSRTLSQSSESGTLSSGPPGHTMEVSC

SEQ ID NO: 55573 - protein, 181 aa, Homo sapiens
  Payload ID: 10955
  Gene Symbol: NDRG2
  Gene Name: NDRG family member 2
  ENSP ID: ENSP00000397250
THSVETPYGSVTFTVYGTPKPKRPAILTYHDVGLNYKSCFQPLFQFEDMQEIIQNFVRVHVDAPGMEEGAPVFPLGYQYPSLDQLADMIPCVLQYLNFSTIIGVGVGAGAYILARYALNHPDTVEGLTSSIPEMILGHLFSQEELSGNSELIQKYRNIITHAPNLDNIELYWNSYNNRRDL

SEQ ID NO: 55574 - protein, 137 aa, Homo sapiens
  Payload ID: 10955
  Gene Symbol: NDRG2
  Gene Name: NDRG family member 2
  ENSP ID: ENSP00000450446
MAELQEVQITEEKPLLPGQTPEAAKTHSVETPYGSVTFTVYGTPKPKRPAILTYHDVGLNSTVSVRGHAGNHSELCAGSCGCPWNGRGSPCVPFGISVPISGPACRHDPLRPAVPKFLYNNWSWCWSWSLHPGEICS

SEQ ID NO: 55575 - protein, 92 aa, Homo sapiens
  Payload ID: 10955
  Gene Symbol: NDRG2
  Gene Name: NDRG family member 2
  ENSP ID: ENSP00000450450
MAELQEVQITEEKPLLPGQTPEAAKTHSVETPYGSVTFTVYGTPKPKRPAILTYHDVGLNYKSCFQPLFQFEDMQEIIQNFVRVHVDAPGME

SEQ ID NO: 55576 - protein, 167 aa, Homo sapiens
  Payload ID: 10955
  Gene Symbol: NDRG2
  Gene Name: NDRG family member 2
  ENSP ID: ENSP00000450493
MAELQEVQITEEKPLLPGQTPEAAKTHSVETPYGSVTFTVYGTPKPKRPAILTYHDVGLNYKSCFQPLFQFEDMQEIIQNFVRVHVDAPGMEEGAPVFPLGYQYPSLDQLADMIPCVLQYLNFSTIIGVGVGAGAYILARYALNHPDTVEGLVLINIDPNAKGWMDW

SEQ ID NO: 55577 - protein, 144 aa, Homo sapiens
  Payload ID: 10955
  Gene Symbol: NDRG2
  Gene Name: NDRG family member 2
  ENSP ID: ENSP00000450504
MAELQEVQITEEKPLLPGQTPEAAKTHSVETPYGSVTFTVYGTPKPKRPAILTYHDVGLNYKSCFQPLFQFEDMQEIIQNFVRVHVDAPGMEEGAPVFPLGYQYPSLDQLADMIPCVLQYLNFSTIIGVGVGAGAYILARYALN

SEQ ID NO: 55578 - protein, 153 aa, Homo sapiens
  Payload ID: 10955
  Gene Symbol: NDRG2
  Gene Name: NDRG family member 2
  ENSP ID: ENSP00000450513
MAELQEVQITEEKPLLPGQTPEAAKTHSVETPYGSVTFTVYGTPKPKRPAILTYHDVGLNYKSCFQPLFQFEDMQEIIQNFVRVHVDAPGMEEGAPVFPLGYQYPSLDQLADMIPCVLQYLNFSTIIGVGVGAGAYILARYALNHPDTVEGLV

SEQ ID NO: 55579 - protein, 173 aa, Homo sapiens
  Payload ID: 10955
  Gene Symbol: NDRG2
  Gene Name: NDRG family member 2
  ENSP ID: ENSP00000450545
MAELQEVQITEEKPLLPGQTPEAAKPLFQFEDMQEIIQNFVRVHVDAPGMEEGAPVFPLGYQYPSLDQLADMIPCVLQYLNFSTIIGVGVGAGAYILARYALNHPDTVEGLVLINIDPNAKGWMDWAAHKLTGLTSSIPEMILGHLFSQEELSGNSELIQKYRNIITHAPNLD

SEQ ID NO: 55580 - protein, 252 aa, Homo sapiens
  Payload ID: 10955
  Gene Symbol: NDRG2
  Gene Name: NDRG family member 2
  ENSP ID: ENSP00000450691
MAELQEVQITEEKPLLPGQTPEAAKEAELAARILLDQGQTHSVETPYGSVTFTVYGTPKPKRPAILTYHDVGLNYKSCFQPLFQFEDMQEIIQNFVRVHVDAPGMEEGAPVFPLGYQYPSLDQLADMIPCVLQYLNFSTIIGVGVGAGAYILARYALNHPDTVEGLVLINIDPNAKGWMDWAAHKLTGLTSSIPEMILGHLFSQEELSGNSELIQKYRNIITHAPNLDNIELYWNSYNNRRDLNFERGGDIT

SEQ ID NO: 55581 - protein, 118 aa, Homo sapiens
  Payload ID: 10955
  Gene Symbol: NDRG2
  Gene Name: NDRG family member 2
  ENSP ID: ENSP00000450825
MAELQEVQITEEKPLLPGQTPEAAKEAELAARILLDQGQTHSVETPYGSVTFTVYGTPKPKRPAILTYHDVGLNYKSCFQPLFQFEDMQEIIQNFVRVHVDAPGMEEGAPVFPLGYQY

SEQ ID NO: 55582 - protein, 139 aa, Homo sapiens
  Payload ID: 10955
  Gene Symbol: NDRG2
  Gene Name: NDRG family member 2
  ENSP ID: ENSP00000450835
PKPKRPAILTYHDVGLNYKSCFQPLFQFEDMQEIIQNFVRVHVDAPGMEEGAPVFPLGYQYPSLDQLADMIPCVLQYLNFSTIIGVGVGAGAYILARYALNHPDTVEGLVLINIDPNAKGWMDWAAHKLSLGWAAWGLA

SEQ ID NO: 55583 - protein, 141 aa, Homo sapiens
  Payload ID: 10955
  Gene Symbol: NDRG2
  Gene Name: NDRG family member 2
  ENSP ID: ENSP00000450852
MAELQEVQITEEKPLLPGQTPEAAKEAELAARILLDQGQTHSVETPYGSVTFTVYGTPKPKRPAILTYHDVGLNYKSCFQPLFQFEDMQEIIQNFVRVHVDAPGMEEGAPVFPLGYQYPSLDQLADMIPCVLQYLNFSTII

SEQ ID NO: 55584 - protein, 122 aa, Homo sapiens
  Payload ID: 10955
  Gene Symbol: NDRG2
  Gene Name: NDRG family member 2
  ENSP ID: ENSP00000450929
MAELQEVQITEEKPLLPGQTPEAAKTHSVETPYGSVTFTVYGTPKPKRPAILTYHDVGLNYKSCFQPLFQFEDMQEIIQNFVRVHVDAPGMEEGAPVFPLGYQYPSLDQLADMIPCVLQYLK

SEQ ID NO: 55585 - protein, 172 aa, Homo sapiens
  Payload ID: 10955
  Gene Symbol: NDRG2
  Gene Name: NDRG family member 2
  ENSP ID: ENSP00000451059
MAELQEVQITEEKPLLPGQTPEAAKEAELAARILLDQGQTHSVETPYGSVTFTVYGTPKPKRPAILTYHDVGLNYKSCFQPLFQFEDMQEIIQNFVRVHVDAPGMEEGAPVFPLGYQYPSLDQLADMIPCVLQYLNFSTIIGVGVGAGAYILARYALNHPDTVEGLVLINID

SEQ ID NO: 55586 - protein, 194 aa, Homo sapiens
  Payload ID: 10955
  Gene Symbol: NDRG2
  Gene Name: NDRG family member 2
  ENSP ID: ENSP00000451094
MAELQEVQITEEKPLLPGQTPEAAKEAELAARILLDQGQTHSVETPYGSVTFTVYGTPKPKRPAILTYHDVGLNYKSCFQPLFQFEDMQEIIQNFVRVHVDAPGMEEGAPVFPLGYQYPSLDQLADMIPCVLQYLNFSTIIGVGVGAGAYILARYALNHPDTVEGLVLINIDPNAKGWMDWAAHKLTGLTSSIP

SEQ ID NO: 55587 - protein, 221 aa, Homo sapiens
  Payload ID: 10955
  Gene Symbol: NDRG2
  Gene Name: NDRG family member 2
  ENSP ID: ENSP00000451105
MAELQEVQITEEKPLLPGQTPEAAKTHSVETPYGSVTFTVYGTPKPKRPAILTYHDVGLNYKSCFQPLFQFEDMQEIIQNFVRVHVDAPGMEEGAPVFPLGYQYPSLDQLADMIPCVLQYLNFSTIIGVGVGAGAYILARYALNHPDTVEGLVLINIDPNAKGWMDWAAHKLTGLTSSIPEMILGHLFSQEELSGNSELIQKYRNIITHAPNLDNIELYWN

SEQ ID NO: 55588 - protein, 120 aa, Homo sapiens
  Payload ID: 10955
  Gene Symbol: NDRG2
  Gene Name: NDRG family member 2
  ENSP ID: ENSP00000451163
MAELQEVQITEEKPLLPGQTPEAAKTHSVETPYGSVTFTVYGTPKPKRPAILTYHDVGLNYKSCFQPLFQFEDMQEIIQNFVRVHVDAPGMEEGAPVFPLGYQYPSLDQLADMIPCVLQY

SEQ ID NO: 55589 - protein, 149 aa, Homo sapiens
  Payload ID: 10955
  Gene Symbol: NDRG2
  Gene Name: NDRG family member 2
  ENSP ID: ENSP00000451185
MAELQEVQITEEKPLLPGQTPEAAKEAELAARILLDQGQTHSVETPYGSVTFTVYGTPKPKRPAILTYHDVGLNYKSCFQPLFQFEDMQEIIQNFVRVHVDAPGMEEGAPVFPLGYQYPSLDQLADMIPCVLQYLNFSTIIGVGVGAGA

SEQ ID NO: 55590 - protein, 273 aa, Homo sapiens
  Payload ID: 10955
  Gene Symbol: NDRG2
  Gene Name: NDRG family member 2
  ENSP ID: ENSP00000451274
MAELQEVQITEEKPLLPGQTPEAAKTHSVETPYGSVTFTVYGTPKPKRPAILTYHDVGLNYKSCFQPLFQFEDMQEIIQNFVRVHVDAPGMEEGAPVFPLGYQYPSLDQLADMIPCVLQYLNFSTIIGVGVGAGAYILARYALNHPDTVEGLVLINIDPNAKGWMDWAAHKLTGLTSSIPEMILGHLFSQEELSGNSELIQKYRNIITHAPNLDNIELYWNSYNNRRDLNFERGGDITLRCPVMLVVGDQAPHEDAVVECNSKLDPTQTSFLK

SEQ ID NO: 55591 - protein, 154 aa, Homo sapiens
  Payload ID: 10955
  Gene Symbol: NDRG2
  Gene Name: NDRG family member 2
  ENSP ID: ENSP00000451302
MVMCFCVNPCVSLQEAELAARILLDQGQTHSVETPYGSVTFTVYGTPKPKRPAILTYHDVGLNYKSCFQPLFQFEDMQEIIQNFVRVHVDAPGMEEGAPVFPLGYQYPSLDQLADMIPCVLQYLNFSTIIGVGVGAGAYILARYALNHPDTVEG

SEQ ID NO: 55592 - protein, 148 aa, Homo sapiens
  Payload ID: 10955
  Gene Symbol: NDRG2
  Gene Name: NDRG family member 2
  ENSP ID: ENSP00000451348
MAELQEVQITEEKPLLPGQTPEAAKEAELAARILLDQGQTHSVETPYGSVTFTVYGTPKPKRPAILTYHDVGLNYKSCFQPLFQFEDMQEIIQNFVRVHVDAPGMEEGAPVFPLGYQYPSLDQLADMIPCVLQYLNFSTIIGVGVGAG

SEQ ID NO: 55593 - protein, 136 aa, Homo sapiens
  Payload ID: 10955
  Gene Symbol: NDRG2
  Gene Name: NDRG family member 2
  ENSP ID: ENSP00000451353
MAELQEVQITEEKPLLPGQTPEAAKEAELAARILLDQGQTHSVETPYGSVTFTVYGTPKPKRPAILTYHDVGLNYKSCFQPLFQFEDMQEIIQNFVRVHVDAPGMEEGAPVFPLGYQYPSLDQLADMIPCVLQYLK

SEQ ID NO: 55594 - protein, 122 aa, Homo sapiens; identical to SEQ ID NO: 55584
  Payload ID: 10955
  Gene Symbol: NDRG2
  Gene Name: NDRG family member 2
  ENSP ID: ENSP00000451414

SEQ ID NO: 55595 - protein, 150 aa, Homo sapiens
  Payload ID: 10955
  Gene Symbol: NDRG2
  Gene Name: NDRG family member 2
  ENSP ID: ENSP00000451471
MAELQEVQITEEKPLLPGQTPEAAKTHSVETPYGSVTFTVYGTPKPKRPAILTYHDVGLNYKSCFQPLFQFEDMQEIIQNFVRVHVDAPGMEEGAPVFPLGYQYPSLDQLADMIPCVLQYLNFSTIIGVGVGAGAYILARYALNHPDTVE

SEQ ID NO: 55596 - protein, 133 aa, Homo sapiens
  Payload ID: 10955
  Gene Symbol: NDRG2
  Gene Name: NDRG family member 2
  ENSP ID: ENSP00000451472
MAELQEVQITEEKPLLPGQTPEAAKTHSVETPYGSVTFTVYGTPKPKRPAILTYHDVGLNYKSCFQPLFQFEDMQEIIQNFVRVHVDAPGMEEGAPVFPLGYQYPSLDQLADMIPCVLQYLNFSTIIGVGVGA

SEQ ID NO: 55597 - protein, 108 aa, Homo sapiens
  Payload ID: 10955
  Gene Symbol: NDRG2
  Gene Name: NDRG family member 2
  ENSP ID: ENSP00000451541
MAELQEVQITEEKPLLPGQTPEAAKTHSVETPYGSVTFTVYGTPKPKRPAILTYHDVGLNSTVSVRGHAGNHSELCAGSCGCPWNGRGSPCVPFGISVPISGPACRHD

SEQ ID NO: 55598 - protein, 371 aa, Homo sapiens; identical to SEQ ID NO: 55563
  Payload ID: 10955
  Gene Symbol: NDRG2
  Gene Name: NDRG family member 2
  Uniprot ID: Q9UN36
  ENSP ID: ENSP00000451712

SEQ ID NO: 55599 - protein, 160 aa, Homo sapiens
  Payload ID: 10955
  Gene Symbol: NDRG2
  Gene Name: NDRG family member 2
  ENSP ID: ENSP00000451951
MAELQEVQITEEKPLLPGQTPEAAKTHSVETPYGSVTFTVYGTPKPKRPAILTYHDVGLNYKSCFQPLFQFEDMQEIIQNFVRVHVDAPGMEEGAPVFPLGYQYPSLDQLADMIPCVLQYLNFSTIIGVGVGAGAYILARYALNHPDTVEGLVLINIDPN

SEQ ID NO: 55600 - protein, 300 aa, Homo sapiens
  Payload ID: 10955
  Gene Symbol: NDRG2
  Gene Name: NDRG family member 2
  ENSP ID: ENSP00000451966
MAELQEVQITEEKPLLPGQTPEAAKTHSVETPYGSVTFTVYGTPKPKRPAILTYHDVGLNYKSCFQPLFQFEDMQEIIQNFVRVHVDAPGMEEGAPVFPLGYQYPSLDQLADMIPCVLQYLNFSTIIGVGVGAGAYILARYALNHPDTVEGLVLINIDPNAKGWMDWAAHKLTGLTSSIPEMILGHLFSQEELSGNSELIQKYRNIITHAPNLDNIELYWNSYNNRRDLNFERGGDITLRCPVMLVVGDQAPHEDAVVECNSKLDPTQTSFLKMADSGGQPQLTQPGKLTEAFKYFLQGM

SEQ ID NO: 55601 - protein, 140 aa, Homo sapiens
  Payload ID: 10955
  Gene Symbol: NDRG2
  Gene Name: NDRG family member 2
  ENSP ID: ENSP00000451981
MAELQEVQITEEKPLLPGQTPEAAKEAELAARILLDQGQTHSVETPYGSVTFTVYGTPKPKRPAILTYHDVGLNYKSCFQPLFQFEDMQEIIQNFVRVHVDAPGMEEGAPVFPLGYQYPSLDQLADMIPCVLQYLNFSTI

SEQ ID NO: 55602 - protein, 357 aa, Homo sapiens; identical to SEQ ID NO: 55564
  Payload ID: 10955
  Gene Symbol: NDRG2
  Gene Name: NDRG family member 2
  Uniprot ID: Q9UN36
  ENSP ID: ENSP00000452006

SEQ ID NO: 55603 - protein, 357 aa, Homo sapiens; identical to SEQ ID NO: 55564
  Payload ID: 10955
  Gene Symbol: NDRG2
  Gene Name: NDRG family member 2
  Uniprot ID: Q9UN36
  ENSP ID: ENSP00000452038

SEQ ID NO: 55604 - protein, 77 aa, Homo sapiens
  Payload ID: 10955
  Gene Symbol: NDRG2
  Gene Name: NDRG family member 2
  ENSP ID: ENSP00000452053
MAELQEVQITEEKPLLPGQTPEAAKINLASSHCFSSRTCRKSFRTLCGFMWMPLEWKREPLCSLWDISTHLWTSLQT

SEQ ID NO: 55605 - protein, 287 aa, Homo sapiens
  Payload ID: 10955
  Gene Symbol: NDRG2
  Gene Name: NDRG family member 2
  ENSP ID: ENSP00000452117
  MOD_RES (1)..(1): Any amino acid
XTVCWLAGGWVFVFKTLALQQKAGDRLQVSTLTTRANLWLLGPFFFASSKESFSTIIGVGVGAGAYILARYALNHPDTVEGLVLINIDPNAKGWMDWAAHKLTGLTSSIPEMILGHLFSQEELSGNSELIQKYRNIITHAPNLDNIELYWNSYNNRRDLNFERGGDITLRCPVMLVVGDQAPHEDAVVECNSKLDPTQTSFLKMADSGGQPQLTQPGKLTEAFKYFLQGMGYMASSCMTRLSRSRTASLTSAASVDGNRSRSRTLSQSSESGTLSSGPPGHTMEVSC

SEQ ID NO: 55606 - protein, 129 aa, Homo sapiens
  Payload ID: 10955
  Gene Symbol: NDRG2
  Gene Name: NDRG family member 2
  ENSP ID: ENSP00000452179
MAELQEVQITEEKPLLPGQTPEAAKEAELAARILLDQGQTHSVETPYGSVTFTVYGTPKPKRPAILTYHDVGLNYKSCFQPLFQFEDMQEIIQNFVRVHVDAPGMEEGAPVFPLGYQYPSLDQLADMIP

SEQ ID NO: 55607 - protein, 284 aa, Homo sapiens
  Payload ID: 10955
  Gene Symbol: NDRG2
  Gene Name: NDRG family member 2
  ENSP ID: ENSP00000452216
MQEIIQNFVRVHVDAPGMEEGAPVFPLGYQYPSLDQLADMIPCVLQYLNFSTIIGVGVGAGAYILARYALNHPDTVEGLVLINIDPNAKGWMDWAAHKLTGLTSSIPEMILGHLFSQEELSGNSELIQKYRNIITHAPNLDNIELYWNSYNNRRDLNFERGGDITLRCPVMLVVGDQAPHEDAVVECNSKLDPTQTSFLKMADSGGQPQLTQPGKLTEAFKYFLQGMGYMASSCMTRLSRSRTASLTSAASVDGNRSRSRTLSQSSESGTLSSGPPGHTMEVSC

SEQ ID NO: 55608 - protein, 127 aa, Homo sapiens
  Payload ID: 10955
  Gene Symbol: NDRG2
  Gene Name: NDRG family member 2
  ENSP ID: ENSP00000452247
MAELQEVQITEEKPLLPGQTPEAAKTHSVETPYGSVTFTVYGTPKPKRPAILTYHDVGLNYKSCFQPLFQFEDMQEIIQNFVRVHVDAPGMEEGAPVFPLGYQYPSLDQLADMIPCVLQYLNFSTII

SEQ ID NO: 55609 - protein, 142 aa, Homo sapiens
  Payload ID: 10955
  Gene Symbol: NDRG2
  Gene Name: NDRG family member 2
  ENSP ID: ENSP00000452262
MAELQEVQITEEKPLLPGQTPEAAKTHSVETPYGSVTFTVYGTPKPKRPAILTYHDVGLNYKSCFQPLFQFEDMQEIIQNFVRVHVDAPGMEEGAPVFPLGYQYPSLDQLADMIPCVLQYLNFSTIIGVGVGAGAYILARYA

SEQ ID NO: 55610 - protein, 86 aa, Homo sapiens
  Payload ID: 10955
  Gene Symbol: NDRG2
  Gene Name: NDRG family member 2
  ENSP ID: ENSP00000452274
MAELQEVQITEEKPLLPGQTPEAAKEAELAARILLDQGQTHSVETPYGSVTFTVYGTPKPKRPAILTYHDVGLNYKSCFQPLFQFE

SEQ ID NO: 55611 - protein, 174 aa, Homo sapiens
  Payload ID: 10955
  Gene Symbol: NDRG2
  Gene Name: NDRG family member 2
  ENSP ID: ENSP00000452278
MAELQEVQITEEKPLLPGQTPEAAKTHSVETPYGSVTFTVYGTPKPKRPAILTYHDVGLNYKSCFQPLFQFEDMQEIIQNFVRVHVDAPGMEEGAPVFPLGYQYPSLDQLADMIPCVLQYLNFSTIIGVGVGAGAYILARYALNHPDTVEGLVLINIDPNAKGWMDWAAHKLTG

SEQ ID NO: 55612 - protein, 108 aa, Homo sapiens
  Payload ID: 10955
  Gene Symbol: NDRG2
  Gene Name: NDRG family member 2
  ENSP ID: ENSP00000452302
MAELQEVQITEEKPLLPGQTPEAAKTHSVETPYGSVTFTVYGTPKPKRPAILTYHDVGLNYKSCFQPLFQFEDMQEIIQNFVRVHVDAPGMEEGAPVFPLGYQYPSLD

SEQ ID NO: 55613 - protein, 357 aa, Homo sapiens; identical to SEQ ID NO: 55564
  Payload ID: 10955
  Gene Symbol: NDRG2
  Gene Name: NDRG family member 2
  Uniprot ID: Q9UN36
  ENSP ID: ENSP00000452306

SEQ ID NO: 55614 - protein, 224 aa, Homo sapiens
  Payload ID: 10955
  Gene Symbol: NDRG2
  Gene Name: NDRG family member 2
  ENSP ID: ENSP00000452334
MAELQEVQITEEKPLLPGQTPEAAKTHSVETPYGSVTFTVYGTPKPKRPAILTYHDVGLNYKSCFQPLFQFEDMQEIIQNFVRVHVDAPGMEEGAPVFPLGYQYPSLDQLADMIPCVLQYLNFSTIIGVGVGAGAYILARYALNHPDTVEGLVLINIDPNAKGWMDWAAHKLTGLTSSIPEMILGHLFSQEELSGNSELIQKYRNIITHAPNLDNIELYWNSYN

SEQ ID NO: 55615 - protein, 127 aa, Homo sapiens; identical to SEQ ID NO: 55608
  Payload ID: 10955
  Gene Symbol: NDRG2
  Gene Name: NDRG family member 2
  ENSP ID: ENSP00000452344

SEQ ID NO: 55616 - protein, 273 aa, Homo sapiens; identical to SEQ ID NO: 55590
  Payload ID: 10955
  Gene Symbol: NDRG2
  Gene Name: NDRG family member 2
  ENSP ID: ENSP00000452362

SEQ ID NO: 55617 - protein, 218 aa, Homo sapiens
  Payload ID: 10955
  Gene Symbol: NDRG2
  Gene Name: NDRG family member 2
  ENSP ID: ENSP00000452413
MQEIIQNFVRVHVDAPGMEEGAPVFPLGYQYPSLDQLADMIPCVLQYLNFSTIIGVGVGAGAYILARYALNHPDTVEGLVLINIDPNAKGWMDWAAHKLTGLTSSIPEMILGHLFSQEELSGNSELIQKYRNIITHAPNLDNIELYWNSYNNRRDLNFERGGDITLRCPVMLVVGDQAPHEDAVVECNSKLDPTQTSFLKMADSGGQPQLTQPGKLTE

SEQ ID NO: 55618 - protein, 99 aa, Homo sapiens
  Payload ID: 10955
  Gene Symbol: NDRG2
  Gene Name: NDRG family member 2
  ENSP ID: ENSP00000452458
MAELQEVQITEEKPLLPGQTPEAAKEAELAARILLDQGQTHSVETPYGSVTFTVYGTPKPKRPAILTYHDVGLNYKSCFQPLFQFEDMQEIIQNFVRVH

SEQ ID NO: 55619 - protein, 219 aa, Homo sapiens
  Payload ID: 10955
  Gene Symbol: NDRG2
  Gene Name: NDRG family member 2
  ENSP ID: ENSP00000452482
MAELQEVQITEEKPLLPGQTPEAAKEAELAARILLDQGQTHSVETPYGSVTFTVYGTPKPKRPAILTYHDVGLNYKSCFQPLFQFEDMQEIIQNFVRVHVDAPGMEEGAPVFPLGYQYPSLDQLADMIPCVLQYLNFSTIIGVGVGAGAYILARYALNHPDTVEGLVLINIDPNAKGWMDWAAHKLTGLTSSIPEMILGHLFSQEELSGNSELIQKYRN

SEQ ID NO: 55620 - protein, 149 aa, Homo sapiens
  Payload ID: 10955
  Gene Symbol: NDRG2
  Gene Name: NDRG family member 2
  ENSP ID: ENSP00000452548
MAELQEVQITEEKPLLPGQTPEAAKTHSVETPYGSVTFTVYGTPKPKRPAILTYHDVGLNYKSCFQPLFQFEDMQEIIQNFVRVHVDAPGMEEGAPVFPLGYQYPSLDQLADMIPCVLQYLNFSTIIGVGVGAGAYILARYALNHPDTV

SEQ ID NO: 55621 - protein, 153 aa, Homo sapiens; identical to SEQ ID NO: 55578
  Payload ID: 10955
  Gene Symbol: NDRG2
  Gene Name: NDRG family member 2
  ENSP ID: ENSP00000452592

SEQ ID NO: 55622 - protein, 224 aa, Homo sapiens
  Payload ID: 10955
  Gene Symbol: NDRG2
  Gene Name: NDRG family member 2
  ENSP ID: ENSP00000489341
  MOD_RES (1)..(1): Any amino acid
XKSCFQPLFQFEDMQEIIQNFVRVHVDAPGMEEGAPVFPLGYQYPSLDQLADMIPCVLQYLNFSTIIGVGVGAGAYILARYALNHPDTVEGLVLINIDPNAKGWMDWAAHKLTGLTSSIPEMILGHLFSQEELSGNSELIQKYRNIITHAPNLDNIELYWNSYNNRRDLNFERGGDITLRCPVMLVVGDQAPHEDAVTSFLKMADSGGQPQLTQPGKLTEAFKY

SEQ ID NO: 55623 - protein, 375 aa, Homo sapiens
  Payload ID: 10956
  Gene Symbol: NDRG3
  Gene Name: NDRG family member 3
  Uniprot ID: Q9UGV2
  ENSP ID: ENSP00000345292
MDELQDVQLTEIKPLLNDKNGTRNFQDFDCQEHDIETTHGVVHVTIRGLPKGNRPVILTYHDIGLNHKSCFNAFFNFEDMQEITQHFAVCHVDAPGQQEGAPSFPTGYQYPTMDELAEMLPPVLTHLSLKSIIGIGVGAGAYILSRFALNHPELVEGLVLINVDPCAKGWIDWAASKLSGLTTNVVDIILAHHFGQEELQANLDLIQTYRMHIAQDINQDNLQLFLNSYNGRRDLEIERPILGQNDNKSKTLKCSTLLVVGDNSPAVEAVVECNSRLNPINTTLLKMADCGGLPQVVQPGKLTEAFKYFLQGMGYIPSASMTRLARSRTHSTSSSLGSGESPFSRSVTSNQSDGTQESCESPDVLDRHQTMEVSC

SEQ ID NO: 55624 - protein, 363 aa, Homo sapiens
  Payload ID: 10956
  Gene Symbol: NDRG3
  Gene Name: NDRG family member 3
  Uniprot ID: Q9UGV2
  ENSP ID: ENSP00000352703
MDELQDVQLTEIKPLLNDKEHDIETTHGVVHVTIRGLPKGNRPVILTYHDIGLNHKSCFNAFFNFEDMQEITQHFAVCHVDAPGQQEGAPSFPTGYQYPTMDELAEMLPPVLTHLSLKSIIGIGVGAGAYILSRFALNHPELVEGLVLINVDPCAKGWIDWAASKLSGLTTNVVDIILAHHFGQEELQANLDLIQTYRMHIAQDINQDNLQLFLNSYNGRRDLEIERPILGQNDNKSKTLKCSTLLVVGDNSPAVEAVVECNSRLNPINTTLLKMADCGGLPQVVQPGKLTEAFKYFLQGMGYIPSASMTRLARSRTHSTSSSLGSGESPFSRSVTSNQSDGTQESCESPDVLDRHQTMEVSC

SEQ ID NO: 55625 - protein, 280 aa, Homo sapiens
  Payload ID: 10956
  Gene Symbol: NDRG3
  Gene Name: NDRG family member 3
  ENSP ID: ENSP00000362878
MVQETSRTLTVRYQYPTMDELAEMLPPVLTHLSLKSIIGIGVGAGAYILSRFALNHPELVEGLVLINVDPCAKGWIDWAASKLSGLTTNVVDIILAHHFGQEELQANLDLIQTYRMHIAQDINQDNLQLFLNSYNGRRDLEIERPILGQNDNKSKTLKCSTLLVVGDNSPAVEAVVECNSRLNPINTTLLKMADCGGLPQVVQPGKLTEAFKYFLQGMGYIPSASMTRLARSRTHSTSSSLGSGESPFSRSVTSNQSDGTQESCESPDVLDRHQTMEVSC

SEQ ID NO: 55626 - protein, 388 aa, Homo sapiens
  Payload ID: 10956
  Gene Symbol: NDRG3
  Gene Name: NDRG family member 3
  ENSP ID: ENSP00000362909
MDELQDVQLTEIKPLLNDKNGTRNFQDFDCQEHDIETTHGVVHVTIRGLPKGNRPVILTYHDIGLNHKSCFNAFFNFEDMQEITQHFAVCHVDAPGQQEGAPSFPTGYQYPTMDELAEMLPPVLTHLSLKSIIGIGVGAGAYILSRFALNHPELVEGLVLINVDPCAKGWIDWAASKLSGLTTNVVDIILAHHFGQEELQANLDLIQTYRMHIAQDINQDNLQLFLNSYNGRRDLEIERPILGQNDNKSKTLKCSTLLVVGDNSPAVEAVVECNSRLNPINTTLLKMADCGGLPQVVQPGKLTEAFKYFLQGMGYIPYVQLSHLSTESVPSASMTRLARSRTHSTSSSLGSGESPFSRSVTSNQSDGTQESCESPDVLDRHQTMEVSC

SEQ ID NO: 55627 - protein, 187 aa, Homo sapiens
  Payload ID: 10956
  Gene Symbol: NDRG3
  Gene Name: NDRG family member 3
  ENSP ID: ENSP00000416636
MEFFSSCSFTRSRKICMPITMEEHDIETTHGVVHVTIRGLPKGNRPVILTYHDIGLNHKSCFNAFFNFEDMQEITQHFAVCHVDAPGQQEGAPSFPTGYQYPTMDELAEMLPPVLTHLSLKSIIGIGVGAGAYILSRFALNHPELVEGLVLINVDPCAKGWIDWAASKLSGLTTNVVDIILAHHFGQ

SEQ ID NO: 55628 - protein, 371 aa, Homo sapiens
  Payload ID: 10957
  Gene Symbol: NDRG4
  Gene Name: NDRG family member 4
  Uniprot ID: Q9ULP0
  ENSP ID: ENSP00000258187
MAGLQELRFPEEKPLLRGQDATELESSDAFLLAADTDWKEHDIETPYGLLHVVIRGSPKGNRPAILTYHDVGLNHKLCFNTFFNFEDMQEITKHFVVCHVDAPGQQVGASQFPQGYQFPSMEQLAAMLPSVVQHFGFKYVIGIGVGAGAYVLAKFALIFPDLVEGLVLVNIDPNGKGWIDWAATKLSGLTSTLPDTVLSHLFSQEELVNNTELVQSYRQQIGNVVNQANLQLFWNMYNSRRDLDINRPGTVPNAKTLRCPVMLVVGDNAPAEDGVVECNSKLDPTTTTFLKMADSGGLPQVTQPGKLTEAFKYFLQGMGYMPSASMTRLARSRTASLTSASSVDGSRPQACTHSESSEGLGQVNHTMEVSC

SEQ ID NO: 55629 - protein, 369 aa, Homo sapiens
  Payload ID: 10957
  Gene Symbol: NDRG4
  Gene Name: NDRG family member 4
  Uniprot ID: Q9ULP0
  ENSP ID: ENSP00000349193
MPECWDGVGEGNAGAVKLAGLGDPRWSPGHLLSPGHQEHDIETPYGLLHVVIRGSPKGNRPAILTYHDVGLNHKLCFNTFFNFEDMQEITKHFVVCHVDAPGQQVGASQFPQGYQFPSMEQLAAMLPSVVQHFGFKYVIGIGVGAGAYVLAKFALIFPDLVEGLVLVNIDPNGKGWIDWAATKLSGLTSTLPDTVLSHLFSQEELVNNTELVQSYRQQIGNVVNQANLQLFWNMYNSRRDLDINRPGTVPNAKTLRCPVMLVVGDNAPAEDGVVECNSKLDPTTTTFLKMADSGGLPQVTQPGKLTEAFKYFLQGMGYMPSASMTRLARSRTASLTSASSVDGSRPQACTHSESSEGLGQVNHTMEVSC

SEQ ID NO: 55630 - protein, 371 aa, Homo sapiens; identical to SEQ ID NO: 55628
  Payload ID: 10957
  Gene Symbol: NDRG4
  Gene Name: NDRG family member 4
  Uniprot ID: Q9ULP0
  ENSP ID: ENSP00000377820

SEQ ID NO: 55631 - protein, 391 aa, Homo sapiens
  Payload ID: 10957
  Gene Symbol: NDRG4
  Gene Name: NDRG family member 4
  Uniprot ID: Q9ULP0
  ENSP ID: ENSP00000377823
MKVLGHRLELLTGLLLHDVTMAGLQELRFPEEKPLLRGQDATELESSDAFLLAADTDWKEHDIETPYGLLHVVIRGSPKGNRPAILTYHDVGLNHKLCFNTFFNFEDMQEITKHFVVCHVDAPGQQVGASQFPQGYQFPSMEQLAAMLPSVVQHFGFKYVIGIGVGAGAYVLAKFALIFPDLVEGLVLVNIDPNGKGWIDWAATKLSGLTSTLPDTVLSHLFSQEELVNNTELVQSYRQQIGNVVNQANLQLFWNMYNSRRDLDINRPGTVPNAKTLRCPVMLVVGDNAPAEDGVVECNSKLDPTTTTFLKMADSGGLPQVTQPGKLTEAFKYFLQGMGYMPSASMTRLARSRTASLTSASSVDGSRPQACTHSESSEGLGQVNHTMEVSC

SEQ ID NO: 55632 - protein, 199 aa, Homo sapiens
  Payload ID: 10957
  Gene Symbol: NDRG4
  Gene Name: NDRG family member 4
  ENSP ID: ENSP00000454216
MAGLQELRFPEEKPLLRGQDATELESSDAFLLAADTDWKRSQERRLPRVSSTVSPLQEHDIETPYGLLHVVIRGSPKGNRPAILTYHDVGLNHKLCFNTFFNFEDMQEITKHFVVCHVDAPGQQVGASQFPQGYQFPSMEQLAAMLPSVVQHFGFKYVIGIGVGAGAYVLAKFALIFPDLVEGLVLVNIDPNGKGWIDW

SEQ ID NO: 55633 - protein, 81 aa, Homo sapiens
  Payload ID: 10957
  Gene Symbol: NDRG4
  Gene Name: NDRG family member 4
  ENSP ID: ENSP00000454221
  MOD_RES (1)..(1): Any amino acid
XANLQLFWNMYNRPAPTQRAARGWARSTTPWRCPVEALDPADDAHVEAPPPSLRRLMFPLVYFCEGKGEEMGFCLKKMRGS

SEQ ID NO: 55634 - protein, 84 aa, Homo sapiens
  Payload ID: 10957
  Gene Symbol: NDRG4
  Gene Name: NDRG family member 4
  ENSP ID: ENSP00000454274
MQEITKHFVVCHVDAPGQQVGASQFPQGYQFPSMEQLAAMLPSVVQHFGFKYVIGIGVGAGAYVLAKFALIFPDLVEGLVLVNI

SEQ ID NO: 55635 - protein, 63 aa, Homo sapiens
  Payload ID: 10957
  Gene Symbol: NDRG4
  Gene Name: NDRG family member 4
  ENSP ID: ENSP00000454372
MPECWDGVGEGNAGAVKLAGLGDPRWSPGHLLSPGHQPHPPELRELTGGCERAAWSGAPSGGT

SEQ ID NO: 55636 - protein, 339 aa, Homo sapiens
  Payload ID: 10957
  Gene Symbol: NDRG4
  Gene Name: NDRG family member 4
  Uniprot ID: Q9ULP0
  ENSP ID: ENSP00000454410
MPECWDGEHDIETPYGLLHVVIRGSPKGNRPAILTYHDVGLNHKLCFNTFFNFEDMQEITKHFVVCHVDAPGQQVGASQFPQGYQFPSMEQLAAMLPSVVQHFGFKYVIGIGVGAGAYVLAKFALIFPDLVEGLVLVNIDPNGKGWIDWAATKLSGLTSTLPDTVLSHLFSQEELVNNTELVQSYRQQIGNVVNQANLQLFWNMYNSRRDLDINRPGTVPNAKTLRCPVMLVVGDNAPAEDGVVECNSKLDPTTTTFLKMADSGGLPQVTQPGKLTEAFKYFLQGMGYMPSASMTRLARSRTASLTSASSVDGSRPQACTHSESSEGLGQVNHTMEVSC

SEQ ID NO: 55637 - protein, 149 aa, Homo sapiens
  Payload ID: 10957
  Gene Symbol: NDRG4
  Gene Name: NDRG family member 4
  ENSP ID: ENSP00000454509
MAGLQELRFPEEKPLLRGQDATELESSDAFLLAADTDWKEHDIETPYGLLHVVIRGSPKGNRPAILTYHDVGLNHKLCFNTFFNFEDMQEITKHFVVCHVDAPGQQVGASQFPQGYQFPSMEQLAAMLPSVVQHFGFKYVIGIGVGAGA

SEQ ID NO: 55638 - protein, 145 aa, Homo sapiens
  Payload ID: 10957
  Gene Symbol: NDRG4
  Gene Name: NDRG family member 4
  ENSP ID: ENSP00000454693
MAGLQELRFPEEKPLLRGQDATELEHDIETPYGLLHVVIRGSPKGNRPAILTYHDVGLNHKLCFNTFFNFEDMQEITKHFVVCHVDAPGQQVGASQFPQGYQFPSMEQLAAMLPSVVQHFGFKYVIGIGVGAGAYVLAKFAVSLP

SEQ ID NO: 55639 - protein, 156 aa, Homo sapiens
  Payload ID: 10957
  Gene Symbol: NDRG4
  Gene Name: NDRG family member 4
  ENSP ID: ENSP00000454745
MAGLQELRFPEEKPLLRGQDATELESSDAFLLAADTDWKEHDIETPYGLLHVVIRGSPKGNRPAILTYHDVGLNHKLCFNTFFNFEDMQEITKHFVVCHVDAPGQQVGASQFPQGYQFPSMEQLAAMLPSVVQHFGFKYVIGIGVGAGAYVLAKFA

SEQ ID NO: 55640 - protein, 39 aa, Homo sapiens
  Payload ID: 10957
  Gene Symbol: NDRG4
  Gene Name: NDRG family member 4
  ENSP ID: ENSP00000454767
MAGLQELRFPEEKPLLRGQDATELESSDAFLLAADTDWK

SEQ ID NO: 55641 - protein, 191 aa, Homo sapiens
  Payload ID: 10957
  Gene Symbol: NDRG4
  Gene Name: NDRG family member 4
  ENSP ID: ENSP00000454811
  MOD_RES (1)..(1): Any amino acid
XVVIRGSPKGNRPAILTYHDVGLNHKLCFNTFFNFEDMQEITKHFVVCHVDAPGQQVGASQFPQGYQFPSMEQLAAMLPSVVQHFGFKYVIGIGVGAGAYVLAKFALIFPDLVEGLVLVNIDPNGKGWIDWAATKLSGLTSTLPDTVLSHLFSQELVNNTELVQSYRQQIGNVVNQANLQLFWNMYNSRRD

SEQ ID NO: 55642 - protein, 157 aa, Homo sapiens
  Payload ID: 10957
  Gene Symbol: NDRG4
  Gene Name: NDRG family member 4
  ENSP ID: ENSP00000454893
MAGLQELRFPEEKPLLRGQDATELESSDAFLLAADTDWKVGEGNAGAVKLAGLGDPRWSPGHLLSPGHQEHDIETPYGLLHVVIRGSPKGNRPAILTYHDVGLNHKLCFNTFFNFEDMQEITKHFVVCHVDAPGQQVGASQFPQGYQFPSMEQLAAM

SEQ ID NO: 55643 - protein, 153 aa, Homo sapiens
  Payload ID: 10957
  Gene Symbol: NDRG4
  Gene Name: NDRG family member 4
  ENSP ID: ENSP00000454956
MAGLQELRFPEEKPLLRGQDATELESSDAFLLAADTDWKEHDIETPYGLLHVVIRGSPKGNRPAILTYHDVGLNHKLCFNTFFNFEDMQEITKHFVVCHVDAPGQQVGASQFPQGYQFPSMEQLAAMLPSVVQHFGFKYVIGIGVGAGAYVLA

SEQ ID NO: 55644 - protein, 153 aa, Homo sapiens
  Payload ID: 10957
  Gene Symbol: NDRG4
  Gene Name: NDRG family member 4
  ENSP ID: ENSP00000455054
MKVLGHRLELLTGLLLHDVTMAGLQELRFPEEKPLLRGQDATELESSDAFLLAADTDWKRSQERRLPRVSSTVSPLQEHDIETPYGLLHVVIRGSPKGNRPAILTYHDVGLNHKLCFNTFFNFEDMQEITKHFVVCHVDAPGQQVGASQFPQG

SEQ ID NO: 55645 - protein, 111 aa, Homo sapiens
  Payload ID: 10957
  Gene Symbol: NDRG4
  Gene Name: NDRG family member 4
  ENSP ID: ENSP00000455324
MAGLQELRFPEEKPLLRGQDATELESSDAFLLAADTDWKEHDIETPYGLLHVVIRGSPKGNRPAILTYHDVGLNHKLCFNTFFNFEDMQEITKHFVVCHVDAPGQQVGASQ

SEQ ID NO: 55646 - protein, 154 aa, Homo sapiens
  Payload ID: 10957
  Gene Symbol: NDRG4
  Gene Name: NDRG family member 4
  ENSP ID: ENSP00000455421
  MOD_RES (1)..(1): Any amino acid
XQLIFPDLVEGLVLVNIDPNGKGWIDWAATKLSGLTSTLPDTVLSHLFSQEELVNNTELVQSYRQQIGNVVNQANLQLFWNMYNSRRDLDINRPGTVPNAKTLRCPVMLVVGDNAPAEDGVVECNSKLDPTTTTFLKMADSGGLPQVTQCPQPA

SEQ ID NO: 55647 - protein, 40 aa, Homo sapiens
  Payload ID: 10957
  Gene Symbol: NDRG4
  Gene Name: NDRG family member 4
  ENSP ID: ENSP00000455465
MAGLQELRFPEEKPLLRGQDATELESSDAFLLAADTDWKA

SEQ ID NO: 55648 - protein, 38 aa, Homo sapiens
  Payload ID: 10957
  Gene Symbol: NDRG4
  Gene Name: NDRG family member 4
  ENSP ID: ENSP00000455518
MPECWDGVGEGNAGAVKLAGLGDPRWSPGHLLSPGHQA

SEQ ID NO: 55649 - protein, 83 aa, Homo sapiens
  Payload ID: 10957
  Gene Symbol: NDRG4
  Gene Name: NDRG family member 4
  ENSP ID: ENSP00000455541
MMWASTDMQEITKHFVVCHVDAPGQQVGASQFPQGYQFPSMEQLAAMLPSVVQHFGFKYVIGIGVGAGAYVLAKFALIFPDLV

SEQ ID NO: 55650 - protein, 173 aa, Homo sapiens
  Payload ID: 10957
  Gene Symbol: NDRG4
  Gene Name: NDRG family member 4
  ENSP ID: ENSP00000455660
MSTDSSLLLHDVTMAGLQELRFPEEKPLLRGQDATELESSDAFLLAADTDWKEHDIETPYGLLHVVIRGSPKGNRPAILTYHDVGLNHKLCFNTFFNFEDMQEITKHFVVCHVDAPGQQVGASQFPQGYQFPSMEQLAAMLPSVVQHFGFKYVIGIGVGAGAYVLAKFAVSLP

SEQ ID NO: 55651 - protein, 327 aa, Homo sapiens
  Payload ID: 10957
  Gene Symbol: NDRG4
  Gene Name: NDRG family member 4
  ENSP ID: ENSP00000455806
MPECWDGEHDIETPYGLLHVVIRGSPKGNRPAILTYHDVGLNHKLCFNTFFNFEDMQEITKHFVVCHVDAPGQQVGASQFPQGYQFPSMEQLAAMLPSVVQHFGFKYVIGIGVGAGAYVLAKFALIFPDLVEGLVLVNIDPNGKGWIDWAATKLSGLTSTLPDTVLSHLFSQEELVNNTELVQSYRQQIGNVVNQANLQLFWNMYNSRRDLDINRPGTVPNAKTLRCPVMLVVGDNAPAEDGVVECNSKLDPTTTTFLKPGKLTEAFKYFLQGMGYMPSASMTRLARSRTASLTSASSVDGSRPQACTHSESSEGLGQVNHTMEVSC

SEQ ID NO: 55652 - protein, 150 aa, Homo sapiens
  Payload ID: 10957
  Gene Symbol: NDRG4
  Gene Name: NDRG family member 4
  ENSP ID: ENSP00000456135
MAGLQELRFPEEKPLLRGQDATELESSDAFLLAADTDWKEHDIETPYGLLHVVIRGSPKGNRPAILTYHDVGLNHKLCFNTFFNFEDMQEITKHFVVCHVDAPGQQVGASQFPQGYQFPSMEQLAAMLPSVVQHFGFKYVIGIGVGAGAY

SEQ ID NO: 55653 - protein, 357 aa, Homo sapiens
  Payload ID: 10957
  Gene Symbol: NDRG4
  Gene Name: NDRG family member 4
  Uniprot ID: Q9ULP0
  ENSP ID: ENSP00000456338
MPECWDGRSQERRLPRVSSTVSPLQEHDIETPYGLLHVVIRGSPKGNRPAILTYHDVGLNHKLCFNTFFNFEDMQEITKHFVVCHVDAPGQQVGASQFPQGYQFPSMEQLAAMLPSVVQHFGFKYVIGIGVGAGAYVLAKFALIFPDLVEGLVLVNIDPNGKGWIDWAATKLSGLTSTLPDTVLSHLFSQEELVNNTELVQSYRQQIGNVVNQANLQLFWNMYNSRRDLDINRPGTVPNAKTLRCPVMLVVGDNAPAEDGVVECNSKLDPTTTTFLKMADSGGLPQVTQPGKLTEAFKYFLQGMGYMPSASMTRLARSRTASLTSASSVDGSRPQACTHSESSEGLGQVNHTMEVSC

SEQ ID NO: 55654 - protein, 142 aa, Homo sapiens
  Payload ID: 10957
  Gene Symbol: NDRG4
  Gene Name: NDRG family member 4
  ENSP ID: ENSP00000456400
MAGLQELRFPEEKPLLRGQDATELESSDAFLLAADTDWKEHDIETPYGLLHVVIRGSPKGNRPAILTYHDVGLNHKLCFNTFFNFEDMQEITKHFVVCHVDAPGQQVGASQFPQGYQFPSMEQLAAMLPSVVQHFGFKYVIG

SEQ ID NO: 55655 - protein, 65 aa, Homo sapiens
  Payload ID: 10957
  Gene Symbol: NDRG4
  Gene Name: NDRG family member 4
  ENSP ID: ENSP00000456583
MKVLGHRLELLTGLLLHDVTMAGLQELRFPEEKPLLRGQDATELESSDAFLLAADTDWKPQRPGH

SEQ ID NO: 55656 - protein, 109 aa, Homo sapiens
  Payload ID: 10957
  Gene Symbol: NDRG4
  Gene Name: NDRG family member 4
  ENSP ID: ENSP00000456641
MQEITKHFVVCHVDAPGQQVGASQFPQGYQFPSMEQLAAMLPSVVQHFGFKYVIGIGVGAGAYVLAKFALIFPDLVEGLVLVNIDPNGKGWIDWAATKLSGLTSTLPDT

SEQ ID NO: 55657 - protein, 35 aa, Homo sapiens
  Payload ID: 10957
  Gene Symbol: NDRG4
  Gene Name: NDRG family member 4
  ENSP ID: ENSP00000456863
MQEITKHFVVCHVDAPGQQVGASQFPQGYQFPSME

SEQ ID NO: 55658 - protein, 284 aa, Homo sapiens
  Payload ID: 10957
  Gene Symbol: NDRG4
  Gene Name: NDRG family member 4
  ENSP ID: ENSP00000457119
MQEITKHFVVCHVDAPGQQVGASQFPQGYQFPSMEQLAAMLPSVVQHFGFKYVIGIGVGAGAYVLAKFALIFPDLVEGLVLVNIDPNGKGWIDWAATKLSGLTSTLPDTVLSHLFSQEELVNNTELVQSYRQQIGNVVNQANLQLFWNMYNSRRDLDINRPGTVPNAKTLRCPVMLVVGDNAPAEDGVVECNSKLDPTTTTFLKMADSGGLPQVTQPGKLTEAFKYFLQGMGYMPSASMTRLARSRTASLTSASSVDGSRPQACTHSESSEGLGQVNHTMEVSC

SEQ ID NO: 55659 - protein, 143 aa, Homo sapiens
  Payload ID: 10957
  Gene Symbol: NDRG4
  Gene Name: NDRG family member 4
  ENSP ID: ENSP00000457413
MPECWDGVGEGNAGAVKLAGLGDPRWSPGHLLSPGHQEHDIETPYGLLHVVIRGSPKGNRPAILTYHDVGLNHKLCFNTFFNFEDMQEITKHFVVCHVDAPGQQVGASQFPQGYQFPSMEQLAAMLPSVVQHFGFKYVIGIGV

SEQ ID NO: 55660 - protein, 128 aa, Homo sapiens
  Payload ID: 10957
  Gene Symbol: NDRG4
  Gene Name: NDRG family member 4
  ENSP ID: ENSP00000457435
MQEITKHFVVCHVDAPGQQVGASQFPQGYQFPSMEQLAAMLPSVVQHFGFKYVIGIGVGAGAYVLAKFALIFPDLVEGLVLVNIDPNGKGWIDWAATKLSGLTSTLPDTVLSHLFSQEELVNNTELVQ

SEQ ID NO: 55661 - protein, 45 aa, Homo sapiens
  Payload ID: 10957
  Gene Symbol: NDRG4
  Gene Name: NDRG family member 4
  ENSP ID: ENSP00000457638
MKVLGHRLELLTGSQNRGFPNHGFMILRPPAPRRDHGRAAGAAIP

SEQ ID NO: 55662 - protein, 352 aa, Homo sapiens
  Payload ID: 10957
  Gene Symbol: NDRG4
  Gene Name: NDRG family member 4
  Uniprot ID: Q9ULP0
  ENSP ID: ENSP00000457659
MPECWDGEHDIETPYGLLHVVIRGSPKGNRPAILTYHDVGLNHKLCFNTFFNFEDMQEITKHFVVCHVDAPGQQVGASQFPQGYQFPSMEQLAAMLPSVVQHFGFKYVIGIGVGAGAYVLAKFALIFPDLVEGLVLVNIDPNGKGWIDWAATKLSGLTSTLPDTVLSHLFSQEELVNNTELVQSYRQQIGNVVNQANLQLFWNMYNSRRDLDINRPGTVPNAKTLRCPVMLVVGDNAPAEDGVVECNSKLDPTTTTFLKMADSGGLPQVTQPGKLTEAFKYFLQGMGYIAYLKDRRLSGGAVPSASMTRLARSRTASLTSASSVDGSRPQACTHSESSEGLGQVNHTMEVSC

SEQ ID NO: 55663 - protein, 64 aa, Homo sapiens
  Payload ID: 10957
  Gene Symbol: NDRG4
  Gene Name: NDRG family member 4
  ENSP ID: ENSP00000457678
MQEITKHFVVCHVDAPGQQVGASQFPQGYQFPSMEQLAAMLPSVVQHFGFKYVIGIGVGAGAYV

SEQ ID NO: 55664 - protein, 19 aa, Homo sapiens
  Payload ID: 10957
  Gene Symbol: NDRG4
  Gene Name: NDRG family member 4
  ENSP ID: ENSP00000458032
MMWASTTNYASTPSSTSRT

SEQ ID NO: 55665 - protein, 153 aa, Homo sapiens
  Payload ID: 10957
  Gene Symbol: NDRG4
  Gene Name: NDRG family member 4
  ENSP ID: ENSP00000458092
MKVLGHRLELLTGLLLHDVTMAGLQELRFPEEKPLLRGQDATELESSDAFLLAADTDWKVGEGNAGAVKLAGLGDPRWSPGHLLSPGHQEHDIETPYGLLHVVIRGSPKGNRPAILTYHDVGLNHKLCFNTFFNFEDMQEITKHFVVCHVDAP

SEQ ID NO: 55666 - protein, 357 aa, Homo sapiens
  Payload ID: 10957
  Gene Symbol: NDRG4
  Gene Name: NDRG family member 4
  Uniprot ID: Q9ULP0
  ENSP ID: ENSP00000458113
MPECWDGEHDIETPYGLLHVVIRGSPKGNRPAILTYHDVGLNRKCSPASVSPPLPPISQSDKLCFNTFFNFEDMQEITKHFVVCHVDAPGQQVGASQFPQGYQFPSMEQLAAMLPSVVQHFGFKYVIGIGVGAGAYVLAKFALIFPDLVEGLVLVNIDPNGKGWIDWAATKLSGLTSTLPDTVLSHLFSQEELVNNTELVQSYRQQIGNVVNQANLQLFWNMYNSRRDLDINRPGTVPNAKTLRCPVMLVVGDNAPAEDGVVECNSKLDPTTTTFLKMADSGGLPQVTQPGKLTEAFKYFLQGMGYMPSASMTRLARSRTASLTSASSVDGSRPQACTHSESSEGLGQVNHTMEVSC

SEQ ID NO: 55667 - protein, 81 aa, Homo sapiens
  Payload ID: 10958
  Gene Symbol: NDUFA4
  Gene Name: NDUFA4, mitochondrial complex associated
  Uniprot ID: O00483
  ENSP ID: ENSP00000339720
MLRQIIGQAKKHPSLIPLFVFIGTGATGATLYLLRLALFNPDVCWDRNNPEPWNKLGPNDQYKFYSVNVDYSKLKKERPDF

SEQ ID NO: 55668 - protein, 114 aa, Homo sapiens
  Payload ID: 10959
  Gene Symbol: NDUFC2-KCTD14
  Gene Name: NDUFC2-KCTD14 readthrough
  Uniprot ID: E9PQ53
  ENSP ID: ENSP00000432614
MIARRNPEPLRFLPDEARSLPPPKLTDPRLLYIGFLGYCSGLIDNLIRRRPIATAGLHRQLLYITAFFFAGYYLVKREDYLYAVRDREMFGYMKLHPEDFPEEDVYCCGAERRG

SEQ ID NO: 55669 - protein, 66 aa, Homo sapiens
  Payload ID: 10959
  Gene Symbol: NDUFC2-KCTD14
  Gene Name: NDUFC2-KCTD14 readthrough
  ENSP ID: ENSP00000435967
MIARRNPEPLRFLPDEARSLPPPKLTDPRLLYIGFLGYCSGLIDNLIRRRPIATADVYCCGAERRG

SEQ ID NO: 55670 - protein, 134 aa, Homo sapiens
  Payload ID: 10959
  Gene Symbol: NDUFC2-KCTD14
  Gene Name: NDUFC2-KCTD14 readthrough
  ENSP ID: ENSP00000478766
MIARRNPEPLRFLPDEARSLPPPKLTDPRLLYIGFLGYCSGLIDNLIRRRPIATAGLHRQLLYITAFFFAGYYLVKREDYLYAVRDREMFGYMKLHPEDFPEEGGDIGLCCLSPGSLSDTPAVFAVGSSAATTH

SEQ ID NO: 55671 - protein, 86 aa, Homo sapiens
  Payload ID: 10959
  Gene Symbol: NDUFC2-KCTD14
  Gene Name: NDUFC2-KCTD14 readthrough
  ENSP ID: ENSP00000481472
MIARRNPEPLRFLPDEARSLPPPKLTDPRLLYIGFLGYCSGLIDNLIRRRPIATAGGDIGLCCLSPGSLSDTPAVFAVGSSAATTH

SEQ ID NO: 55672 - protein, 1014 aa, Homo sapiens
  Payload ID: 10960
  Gene Symbol: NEBL
  Gene Name: nebulette
  Uniprot ID: O76041
  ENSP ID: ENSP00000366326
MRVPVFEDIKDETEEEKIGEEENEEDQVFYKPVIEDLSMELARKCTELISDIRYKEEFKKSKDKCTFVTDSPMLNHVKNIGAFISEAKYKGTIKADLSNSLYKRMPATIDSVFAGEVTQLQSEVAYKQKHDAAKGFSDYAHMKEPPEVKHAMEVNKHQSNISYRKDVQDTHTYSAELDRPDIKMATQISKIISNAEYKKGQGIMNKEPAVIGRPDFEHAVEASKLSSQIKYKEKFDNEMKDKKHHYNPLESASFRQNQLAATLASNVKYKKDIQNMHDPVSDLPNLLFLDHVLKASKMLSGREYKKLFEENKGMYHFDADAVEHLHHKGNAVLQSQVKYKEEYEKNKGKPMLEFVETPSYQASKEAQKMQSEKVYKEDFEKEIKGRSSLDLDKTPEFLHVKYITNLLREKEYKKDLENEIKGKGMELNSEVLDIQRAKRASEMASEKEYKKDLESIIKGKGMQAGTDTLEMQHAKKAAEIASEKDYKRDLETEIKGKGMQVSTDTLDVQRAKKASEMASQKQYKKDLENEIKGKGMQVSMDIPDILRAKRTSEIYSQRKYKDEAEKMLSNYSTIADTPEIQRIKTTQQNISAVFYKKEVGAGTAVKDSPEIERVKKNQQNISSVKYKEEIKHATAISDPPELKRVKENQKNISNLQYKEQNYKATPVSMTPEIERVRRNQEQLSAVKYKGELQRGTAISDPPELKRAKENQKNISNVYYRGQLGRATTLSVTPEMERVKKNQENISSVKYTQDHKQMKGRPSLILDTPAMRHVKEAQNHISMVKYHEDFEKTKGRGFTPVVDDPVTERVRKNTQVVSDAAYKGVHPHIVEMDRRPGIIVDLKVWRTDPGSIFDLDPLEDNIQSRSLHMLSEKASHYRRHWSRSHSSSTFGTGLGDDRSEISEIYPSFSCCSEVTRPSDEGAPVLPGAYQQSHSQGYGYMHQTSVSSMRSMQHSPNLRTYRAMYDYSAQDEDEVSFRDGDYIVNVQPIDDGWMYGTVQRTGRTGMLPANYIEFVN

SEQ ID NO: 55673 - protein, 270 aa, Homo sapiens
  Payload ID: 10960
  Gene Symbol: NEBL
  Gene Name: nebulette
  Uniprot ID: O76041
  ENSP ID: ENSP00000393896
MNPQCARCGKVVYPTEKVNCLDKYWHKGCFHCEVCKMALNMNNYKGYEKKPYCNAHYPKQSFTTVADTPENLRLKQQSELQSQVKYKRDFEESKGRGFSIVTDTPELQRLKRTQEQISNVKYHEDFEKTKGRGFTPVVDDPVTERVRKNTQVVSDAAYKGVHPHIVEMDRRPGIIVAPVLPGAYQQSHSQGYGYMHQTSVSSMRSMQHSPNLRTYRAMYDYSAQDEDEVSFRDGDYIVNVQPIDDGWMYGTVQRTGRTGMLPANYIEFVN

SEQ ID NO: 55674 - protein, 117 aa, Homo sapiens
  Payload ID: 10960
  Gene Symbol: NEBL
  Gene Name: nebulette
  ENSP ID: ENSP00000396512
MRNNCTASLMKVFYKPVIEDLSMELARKCTELISDIRYKEEFKKSKDKCTFVTDSPMLNHVKNIGAFISEAKYKGTIKADLSNSLYKRMPATIDSVFAGEVTQLQSEVAYKQKHDAA

SEQ ID NO: 55675 - protein, 115 aa, Homo sapiens
  Payload ID: 10960
  Gene Symbol: NEBL
  Gene Name: nebulette
  ENSP ID: ENSP00000489224
  MOD_RES (1)..(1): Any amino acid
XKNQQNISSVKYKEEIKHATAISDPPELKRVKENQKNISNLQYKEQNYKATPVSMTPEIERVRRNQEQLSAVKYKGELQRGTAISDPPELKRAKENQKNISNVFITEVSWEELPL

SEQ ID NO: 55676 - protein, 63 aa, Homo sapiens
  Payload ID: 10960
  Gene Symbol: NEBL
  Gene Name: nebulette
  ENSP ID: ENSP00000489545
VSMTPEIERVRRNQEQLSAGMNCVSRKFGTVLLYLSCVCLFKRSSLSTQMYWALSWSPRHKDG

SEQ ID NO: 55677 - protein, 94 aa, Homo sapiens
  Payload ID: 10960
  Gene Symbol: NEBL
  Gene Name: nebulette
  ENSP ID: ENSP00000489562
DPPELKRAKENQKNISNVYYRGQLGRATTLSVTPEMERVKKNQENISSVKYTQDHKQMKGRPSLILDTPAMRHVKEAQNHISMVGSNQIILKTC

SEQ ID NO: 55678 - protein, 6669 aa, Homo sapiens
  Payload ID: 10961
  Gene Symbol: NEB
  Gene Name: nebulin
  Uniprot ID: P20929
  ENSP ID: ENSP00000172853
MADDEDYEEVVEYYTEEVVYEEVPGETITKIYETTTTRTSDYEQSETSKPALAQPALAQPASAKPVERRKVIRKKVDPSKFMTPYIAHSQKMQDLFSPNKYKEKFEKTKGQPYASTTDTPELRRIKKVQDQLSEVKYRMDGDVAKTICHVDEKAKDIEHAKKVSQQVSKVLYKQNWEDTKDKYLLPPDAPELVQAVKNTAMFSKKLYTEDWEADKSLFYPYNDSPELRRVAQAQKALSDVAYKKGLAEQQAQFTPLADPPDIEFAKKVTNQVSKQKYKEDYENKIKGKWSETPCFEVANARMNADNISTRKYQEDFENMKDQIYFMQTETPEYKMNKKAGVAASKVKYKEDYEKNKGKADYNVLPASENPQLRQLKAAGDALSDKLYKENYEKTKAKSINYCETPKFKLDTVLQNFSSDKKYKDSYLKDILGHYVGSFEDPYHSHCMKVTAQNSDKNYKAEYEEDRGKGFFPQTITQEYEAIKKLDQCKDHTYKVHPDKTKFTQVTDSPVLLQAQVNSKQLSDLNYKAKHESEKFKCHIPPDTPAFIQHKVNAYNLSDNLYKQDWEKSKAKKFDIKVDAIPLLAAKANTKNTSDVMYKKDYEKNKGKMIGVLSINDDPKMLHSLKVAKNQSDRLYKENYEKTKAKSMNYCETPKYQLDTQLKNFSEARYKDLYVKDVLGHYVGSMEDPYHTHCMKVAAQNSDKSYKAEYEEDKGKCYFPQTITQEYEAIKKLDQCKDHTYKVHPDKTKFTAVTDSPVLLQAQLNTKQLSDLNYKAKHEGEKFKCHIPADAPQFIQHRVNAYNLSDNVYKQDWEKSKAKKFDIKVDAIPLLAAKANTKNTSDVMYKKDYEKSKGKMIGALSINDDPKMLHSLKTAKNQSDREYRKDYEKSKTIYTAPLDMLQVTQAKKSQAIASDVDYKHILHSYSYPPDSINVDLAKKAYALQSDVEYKADYNSWMKGCGWVPFGSLEMEKAKRASDILNEKKYRQHPDTLKFTSIEDAPITVQSKINQAQRSDIAYKAKGEEIIHKYNLPPDLPQFIQAKVNAYNISENMYKADLKDLSKKGYDLRTDAIPIRAAKAARQAASDVQYKKDYEKAKGKMVGFQSLQDDPKLVHYMNVAKIQSDREYKKDYEKTKSKYNTPHDMFNVVAAKKAQDVVSNVNYKHSLHHYTYLPDAMDLELSKNMMQIQSDNVYKEDYNNWMKGIGWIPIGSLDVEKVKKAGDALNEKKYRQHPDTLKFTSIVDSPVMVQAKQNTKQVSDILYKAKGEDVKHKYTMSPDLPQFLQAKCNAYNISDVCYKRDWYDLIAKGNNVLGDAIPITAAKASRNIASDYKYKEAYEKSKGKHVGFRSLQDDPKLVHYMNVAKLQSDREYKKNYENTKTSYHTPGDMVSITAAKMAQDVATNVNYKQPLHHYTYLPDAMSLEHTRNVNQIQSDNVYKDEYNSFLKGIGWIPIGSLEVEKVKKAGDALNERKYRQHPDTVKFTSVPDSMGMVLAQHNTKQLSDLNYKVEGEKLKHKYTIDPELPQFIQAKVNALNMSDAHYKADWKKTIAKGYDLRPDAIPIVAAKSSRNIASDCKYKEAYEKAKGKQVGFLSLQDDPKLVHYMNVAKIQSDREYKKGYEASKTKYHTPLDMVSVTAAKKSQEVATNANYRQSYHHYTLLPDALNVEHSRNAMQIQSDNLYKSDFTNWMKGIGWVPIESLEVEKAKKAGEILSEKKYRQHPEKLKFTYAMDTMEQALNKSNKLNMDKRLYTEKWNKDKTTIHVMPDTPDILLSRVNQITMSDKLYKAGWEEEKKKGYDLRPDAIAIKAARASRDIASDYKYKKAYEQAKGKHIGFRSLEDDPKLVHFMQVAKMQSDREYKKGYEKSKTSFHTPVDMLSVVAAKKSQEVATNANYRNVIHTYNMLPDAMSFELAKNMMQIQSDNQYKADYADFMKGIGWLPLGSLEAEKNKKAMEIISEKKYRQHPDTLKYSTLMDSMNMVLAQNNAKIMNEHLYKQAWEADKTKVHIMPDIPQIILAKANAINMSDKLYKLSLEESKKKGYDLRPDAIPIKAAKASRDIASDYKYKYNYEKGKGKMVGFRSLEDDPKLVHSMQVAKMQSDREYKKNYENTKTSYHTPADMLSVTAAKDAQANITNTNYKHLIHKYILLPDAMNIELTRNMNRIQSDNEYKQDYNEWYKGLGWSPAGSLEVEKAKKATEYASDQKYRQHPSNFQFKKLTDSMDMVLAKQNAHTMNKHLYTIDWNKDKTKIHVMPDTPDILQAKQNQTLYSQKLYKLGWEEALKKGYDLPVDAISVQLAKASRDIASDYKYKQGYRKQLGHHVGFRSLQDDPKLVLSMNVAKMQSEREYKKDFEKWKTKFSSPVDMLGVVLAKKCQELVSDVDYKNYLHQWTCLPDQNDVVQAKKVYELQSENLYKSDLEWLRGIGWSPLGSLEAEKNKRASEIISEKKYRQPPDRNKFTSIPDAMDIVLAKTNAKNRSDRLYREAWDKDKTQIHIMPDTPDIVLAKANLINTSDKLYRMGYEELKRKGYDLPVDAIPIKAAKASREIASEYKYKEGFRKQLGHHIGARNIEDDPKMMWSMHVAKIQSDREYKKDFEKWKTKFSSPVDMLGVVLAKKCQTLVSDVDYKNYLHQWTCLPDQSDVIHARQAYDLQSDNLYKSDLQWLKGIGWMTSGSLEDEKNKRATQILSDHVYRQHPDQFKFSSLMDSIPMVLAKNNAITMNHRLYTEAWDKDKTTVHIMPDTPEVLLAKQNKVNYSEKLYKLGLEEAKRKGYDMRVDAIPIKAAKASRDIASEFKYKEGYRKQLGHHIGARAIRDDPKMMWSMHVAKIQSDREYKKDFEKWKTKFSSPVDMLGVVLAKKCQTLVSDVDYKNYLHQWTCLPDQSDVIHARQAYDLQSDNMYKSDLQWMRGIGWVSIGSLDVEKCKRATEILSDKIYRQPPDRFKFTSVTDSLEQVLAKNNAITMNKRLYTEAWDKDKTQIHIMPDTPEIMLARQNKINYSETLYKLANEEAKKKGYDLRSDAIPIVAAKASRDVISDYKYKDGYRKQLGHHIGARNIEDDPKMMWSMHVAKIQSDREYKKDFEKWKTKFSSPVDMLGVVLAKKCQTLVSDVDYKNYLHEWTCLPDQNDVIHARQAYDLQSDNIYKSDLQWLRGIGWVPIGSMDVVKCKRAAEILSDNIYRQPPDKLKFTSVTDSLEQVLAKNNALNMNKRLYTEAWDKDKTQVHIMPDTPEIMLARQNKINYSESLYRQAMEEAKKEGYDLRSDAIPIVAAKASRDIASDYKYKEAYRKQLGHHIGARAVHDDPKIMWSLHIAKVQSDREYKKDFEKYKTRYSSPVDMLGIVLAKKCQTLVSDVDYKHPLHEWICLPDQNDIIHARKAYDLQSDNLYKSDLEWMKGIGWVPIDSLEVVRAKRAGELLSDTIYRQRPETLKFTSITDTPEQVLAKNNALNMNKRLYTEAWDNDKKTIHVMPDTPEIMLAKLNRINYSDKLYKLALEESKKEGYDLRLDAIPIQAAKASRDIASDYKYKEGYRKQLGHHIGARNIKDDPKMMWSIHVAKIQSDREYKKEFEKWKTKFSSPVDMLGVVLAKKCQILVSDIDYKHPLHEWTCLPDQNDVIQARKAYDLQSDAIYKSDLEWLRGIGWVPIGSVEVEKVKRAGEILSDRKYRQPADQLKFTCITDTPEIVLAKNNALTMSKHLYTEAWDADKTSIHVMPDTPDILLAKSNSANISQKLYTKGWDESKMKDYDLRADAISIKSAKASRDIASDYKYKEAYEKQKGHHIGAQSIEDDPKIMCAIHAGKIQSEREYKKEFQKWKTKFSSPVDMLSILLAKKCQTLVTDIDYRNYLHEWTCMPDQNDIIQAKKAYDLQSDALYKADLEWLRGIGWMPQGSPEVLRVKNAQNIFCDSVYRTPVVNLKYTSIVDTPEVVLAKSNAENISIPKYREVWDKDKTSIHIMPDTPEINLARANALNVSNKLYREGWDEMKAGCDVRLDAIPIQAAKASREIASDYKYKLDHEKQKGHYVGTLTARDDNKIRWALIADKLQNEREYRLDWAKWKAKIQSPVDMLSILHSKNSQALVSDMDYRNYLHQWTCMPDQNDVIQAKKAYELQSDNVYKADLEWLRGIGWMPNDSVSVNHAKHAADIFSEKKYRTKIETLNFTPVDDRVDYVTAKQSGEILDDIKYRKDWNATKSKYTLTETPLLHTAQEAARILDQYLYKEGWERQKATGYILPPDAVPFVHAHHCNDVQSELKYKAEHVKQKGHYVGVPTMRDDPKLVWFEHAGQIQNERLYKEDYHKTKAKINIPADMVSVLAAKQGQTLVSDIDYRNYLHQWMCHPDQNDVIQARKAYDLQSDNVYRADLEWLRGIGWIPLDSVDHVRVTKNQEMMSQIKYKKNALENYPNFRSVVDPPEIVLAKINSVNQSDVKYKETFNKAKGKYTFSPDTPHISHSKDMGKLYSTILYKGAWEGTKAYGYTLDERYIPIVGAKHADLVNSELKYKETYEKQKGHYLAGKVIGEFPGVVHCLDFQKMRSALNYRKHYEDTKANVHIPNDMMNHVLAKRCQYILSDLEYRHYFHQWTSLLEEPNVIRVRNAQEILSDNVYKDDLNWLKGIGCYVWDTPQILHAKKSYDLQSQLQYTAAGKENLQNYNLVTDTPLYVTAVQSGINASEVKYKENYHQIKDKYTTVLETVDYDRTRNLKNLYSSNLYKEAWDRVKATSYILPSSTLSLTHAKNQKHLASHIKYREEYEKFKALYTLPRSVDDDPNTARCLRVGKLNIDRLYRSVYEKNKMKIHIVPDMVEMVTAKDSQKKVSEIDYRLRLHEWICHPDLQVNDHVRKVTDQISDIVYKDDLNWLKGIGCYVWDTPEILHAKHAYDLRDDIKYKAHMLKTRNDYKLVTDTPVYVQAVKSGKQLSDAVYHYDYVHSVRGKVAPTTKTVDLDRALHAYKLQSSNLYKTSLRTLPTGYRLPGDTPHFKHIKDTRYMSSYFKYKEAYEHTKAYGYTLGPKDVPFVHVRRVNNVTSERLYRELYHKLKDKIHTTPDTPEIRQVKKTQEAVSELIYKSDFFKMQGHMISLPYTPQVIHCRYVGDITSDIKYKEDLQVLKGFGCFLYDTPDMVRSRHLRKLWSNYLYTDKARKMRDKYKVVLDTPEYRKVQELKTHLSELVYRAAGKKQKSIFTSVPDTPDLLRAKRGQKLQSQYLYVELATKERPHHHAGNQTTALKHAKDVKDMVSEKKYKIQYEKMKDKYTPVPDTPILIRAKRAYWNASDLRYKETFQKTKGKYHTVKDALDIVYHRKVTDDISKIKYKENYMSQLGIWRSIPDRPEHFHHRAVTDTVSDVKYKEDLTWLKGIGCYAYDTPDFTLAEKNKTLYSKYKYKEVFERTKSDFKYVADSPINRHFKYATQLMNEKKYRADYEQRKDKYHLVVDEPRHLLAKTAGDQISQIKYRKNYEKSKDKFTSIVDTPEHLRTTKVNKQISDILYKLEYNKAKPRGYTTIHDTPMLLHVRKVKDEVSDLKYKEVYQRNKSNCTIEPDAVHIKAAKDAYKVNTNLDYKKQYEANKAHWKWTPDRPDFLQAAKSSLQQSDFEYKLDREFLKGCKLSVTDDKNTVLALRNTLIESDLKYKEKHVKERGTCHAVPDTPQILLAKTVSNLVSENKYKDHVKKHLAQGSYTTLPETRDTVHVKEVTKHVSDTNYKKKFVKEKGKSNYSIMLEPPEVKHAMEVAKKQSDVAYRKDAKENLHYTTVADRPDIKKATQAAKQASEVEYRAKHRKEGSHGLSMLGRPDIEMAKKAAKLSSQVKYRENFDKEKGKTPKYNPKDSQLYKVMKDANNLASEVKYKADLKKLHKPVTDMKESLIMNHVLNTSQLASSYQYKKKYEKSKGHYHTIPDNLEQLHLKEATELQSIVKYKEKYEKERGKPMLDFETPTYITAKESQQMQSGKEYRKDYEESIKGRNLTGLEVTPALLHVKYATKIASEKEYRKDLEESIRGKGLTEMEDTPDMLRAKNATQILNEKEYKRDLELEVKGRGLNAMANETPDFMRARNATDIASQIKYKQSAEMEKANFTSVVDTPEIIHAQQVKNLSSQKKYKEDAEKSMSYYETVLDTPEIQRVRENQKNFSLLQYQCDLKNSKGKITVVQDTPEILRVKENQKNFSSVLYKEDVSPGTAIGKTPEMMRVKQTQDHISSVKYKEAIGQGTPIPDLPEVKRVKETQKHISSVMYKENLGTGIPTTVTPEIERVKRNQENFSSVLYKENLGKGIPTPITPEMERVKRNQENFSSVLYKENMGKGTPLAVTPEMERVKHNQENISSVLYKENVGKATATPVTPEMQRVKRNQENISSVLYKENLGKATPTPFTPEMERVKRNQENFSSVLYKENMRKATPTPVTPEMERAKRNQENISSVLYSDSFRKQIQGKAAYVLDTPEMRRVRETQRHISTVKYHEDFEKHKGCFTPVVTDPITERVKKNMQDFSDINYRGIQRKVVEMEQKRNDQDQETITGLRVWRTNPGSVFDYDPAEDNIQSRSLHMINVQAQRRSREQSRSASALSISGGEEKSEHSEAPDHHLSTYSDGGVFAVSTAYKHAKTTELPQQRSSSVATQQTTVSSIPSHPSTAGKIFRAMYDYMAADADEVSFKDGDAIINVQAIDEGWMYGTVQRTGRTGMLPANYVEAI

SEQ ID NO: 55679 - protein, 659 aa, Homo sapiens
  Payload ID: 10961
  Gene Symbol: NEB
  Gene Name: nebulin
  ENSP ID: ENSP00000380498
  MOD_RES (1)..(1): Any amino acid
XQRVRENQKNFSLLQYQCDLKNSKGKITVVQDTPEILRVKENQKNFSSVLYKEDVSPGTAIGKTPEMMRVKQTQDHISSVKYKEAIGQGTPIPDLPEVKRVKETQKHISSVMYKENLGTGIPTTVTPEIERVKRNQENFSSVLYKENLGKGIPTPITPEMERVKRNQENFSSVLYKENLGTGIPIPITPEMQRVKHNQENLSSVLYKENMGKGTPLPVTPEMERVKHNQENISSVLYKENMGKGTPLPVTPEMERVKHNQENISSVLYKENMGKGTPLAVTPEMERVKHNQENISSVLYKENVGKATATPVTPEMQRVKRNQENISSVLYKENLGKATPTPFTPEMERVKRNQENFSSVLYKENMRKATPTPVTPEMERAKRNQENISSVLYSDSFRKQIQGKAAYVLDTPEMRRVRETQRHISTVKYHEDFEKHKGCFTPVVTDPITERVKKNMQDFSDINYRGIQRKVVEMEQKRNDQDQETITGLRVWRTNPGSVFDYDPAEDNIQSRSLHMINVQAQRRSREQSRSASALSISGGEEKSEHSEAPDHHLSTYSDGGVFAVSTAYKHAKTTELPQQRSSSVATQQTTVSSIPSHPSTAGKIFRAMYDYMAADADEVSFKDGDAIINVQAIDEGWMYGTVQRTGRTGMLPANYVEAI

SEQ ID NO: 55680 - protein, 8525 aa, Homo sapiens
  Payload ID: 10961
  Gene Symbol: NEB
  Gene Name: nebulin
  Uniprot ID: P20929
  ENSP ID: ENSP00000380505
MADDEDYEEVVEYYTEEVVYEEVPGETITKIYETTTTRTSDYEQSETSKPALAQPALAQPASAKPVERRKVIRKKVDPSKFMTPYIAHSQKMQDLFSPNKYKEKFEKTKGQPYASTTDTPELRRIKKVQDQLSEVKYRMDGDVAKTICHVDEKAKDIEHAKKVSQQVSKVLYKQNWEDTKDKYLLPPDAPELVQAVKNTAMFSKKLYTEDWEADKSLFYPYNDSPELRRVAQAQKALSDVAYKKGLAEQQAQFTPLADPPDIEFAKKVTNQVSKQKYKEDYENKIKGKWSETPCFEVANARMNADNISTRKYQEDFENMKDQIYFMQTETPEYKMNKKAGVAASKVKYKEDYEKNKGKADYNVLPASENPQLRQLKAAGDALSDKLYKENYEKTKAKSINYCETPKFKLDTVLQNFSSDKKYKDSYLKDILGHYVGSFEDPYHSHCMKVTAQNSDKNYKAEYEEDRGKGFFPQTITQEYEAIKKLDQCKDHTYKVHPDKTKFTQVTDSPVLLQAQVNSKQLSDLNYKAKHESEKFKCHIPPDTPAFIQHKVNAYNLSDNLYKQDWEKSKAKKFDIKVDAIPLLAAKANTKNTSDVMYKKDYEKNKGKMIGVLSINDDPKMLHSLKVAKNQSDRLYKENYEKTKAKSMNYCETPKYQLDTQLKNFSEARYKDLYVKDVLGHYVGSMEDPYHTHCMKVAAQNSDKSYKAEYEEDKGKCYFPQTITQEYEAIKKLDQCKDHTYKVHPDKTKFTAVTDSPVLLQAQLNTKQLSDLNYKAKHEGEKFKCHIPADAPQFIQHRVNAYNLSDNVYKQDWEKSKAKKFDIKVDAIPLLAAKANTKNTSDVMYKKDYEKSKGKMIGALSINDDPKMLHSLKTAKNQSDREYRKDYEKSKTIYTAPLDMLQVTQAKKSQAIASDVDYKHILHSYSYPPDSINVDLAKKAYALQSDVEYKADYNSWMKGCGWVPFGSLEMEKAKRASDILNEKKYRQHPDTLKFTSIEDAPITVQSKINQAQRSDIAYKAKGEEIIHKYNLPPDLPQFIQAKVNAYNISENMYKADLKDLSKKGYDLRTDAIPIRAAKAARQAASDVQYKKDYEKAKGKMVGFQSLQDDPKLVHYMNVAKIQSDREYKKDYEKTKSKYNTPHDMFNVVAAKKAQDVVSNVNYKHSLHHYTYLPDAMDLELSKNMMQIQSDNVYKEDYNNWMKGIGWIPIGSLDVEKVKKAGDALNEKKYRQHPDTLKFTSIVDSPVMVQAKQNTKQVSDILYKAKGEDVKHKYTMSPDLPQFLQAKCNAYNISDVCYKRDWYDLIAKGNNVLGDAIPITAAKASRNIASDYKYKEAYEKSKGKHVGFRSLQDDPKLVHYMNVAKLQSDREYKKNYENTKTSYHTPGDMVSITAAKMAQDVATNVNYKQPLHHYTYLPDAMSLEHTRNVNQIQSDNVYKDEYNSFLKGIGWIPIGSLEVEKVKKAGDALNERKYRQHPDTVKFTSVPDSMGMVLAQHNTKQLSDLNYKVEGEKLKHKYTIDPELPQFIQAKVNALNMSDAHYKADWKKTIAKGYDLRPDAIPIVAAKSSRNIASDCKYKEAYEKAKGKQVGFLSLQDDPKLVHYMNVAKIQSDREYKKGYEASKTKYHTPLDMVSVTAAKKSQEVATNANYRQSYHHYTLLPDALNVEHSRNAMQIQSDNLYKSDFTNWMKGIGWVPIESLEVEKAKKAGEILSEKKYRQHPEKLKFTYAMDTMEQALNKSNKLNMDKRLYTEKWNKDKTTIHVMPDTPDILLSRVNQITMSDKLYKAGWEEEKKKGYDLRPDAIAIKAARASRDIASDYKYKKAYEQAKGKHIGFRSLEDDPKLVHFMQVAKMQSDREYKKGYEKSKTSFHTPVDMLSVVAAKKSQEVATNANYRNVIHTYNMLPDAMSFELAKNMMQIQSDNQYKADYADFMKGIGWLPLGSLEAEKNKKAMEIISEKKYRQHPDTLKYSTLMDSMNMVLAQNNAKIMNEHLYKQAWEADKTKVHIMPDIPQIILAKANAINMSDKLYKLSLEESKKKGYDLRPDAIPIKAAKASRDIASDYKYKYNYEKGKGKMVGFRSLEDDPKLVHSMQVAKMQSDREYKKNYENTKTSYHTPADMLSVTAAKDAQANITNTNYKHLIHKYILLPDAMNIELTRNMNRIQSDNEYKQDYNEWYKGLGWSPAGSLEVEKAKKATEYASDQKYRQHPSNFQFKKLTDSMDMVLAKQNAHTMNKHLYTIDWNKDKTKIHVMPDTPDILQAKQNQTLYSQKLYKLGWEEALKKGYDLPVDAISVQLAKASRDIASDYKYKQGYRKQLGHHVGFRSLQDDPKLVLSMNVAKMQSEREYKKDFEKWKTKFSSPVDMLGVVLAKKCQELVSDVDYKNYLHQWTCLPDQNDVVQAKKVYELQSENLYKSDLEWLRGIGWSPLGSLEAEKNKRASEIISEKKYRQPPDRNKFTSIPDAMDIVLAKTNAKNRSDRLYREAWDKDKTQIHIMPDTPDIVLAKANLINTSDKLYRMGYEELKRKGYDLPVDAIPIKAAKASREIASEYKYKEGFRKQLGHHIGARNIEDDPKMMWSMHVAKIQSDREYKKDFEKWKTKFSSPVDMLGVVLAKKCQTLVSDVDYKNYLHQWTCLPDQSDVIHARQAYDLQSDNLYKSDLQWLKGIGWMTSGSLEDEKNKRATQILSDHVYRQHPDQFKFSSLMDSIPMVLAKNNAITMNHRLYTEAWDKDKTTVHIMPDTPEVLLAKQNKVNYSEKLYKLGLEEAKRKGYDMRVDAIPIKAAKASRDIASEFKYKEGYRKQLGHHIGARAIRDDPKMMWSMHVAKIQSDREYKKDFEKWKTKFSSPVDMLGVVLAKKCQTLVSDVDYKNYLHQWTCLPDQSDVIHARQAYDLQSDNMYKSDLQWMRGIGWVSIGSLDVEKCKRATEILSDKIYRQPPDRFKFTSVTDSLEQVLAKNNAITMNKRLYTEAWDKDKTQIHIMPDTPEIMLARMNKINYSESLYKLANEEAKKKGYDLRSDAIPIVAAKASRDIISDYKYKDGYCKQLGHHIGARNIEDDPKMMWSMHVAKIQSDREYKKDFEKWKTKFSSPVDMLGVVLAKKCQTLVSDVDYKNYLHEWTCLPDQSDVIHARQAYDLQSDNIYKSDLQWLRGIGWVPIGSMDVVKCKRATEILSDNIYRQPPDKLKFTSVTDSLEQVLAKNNALNMNKRLYTEAWDKDKTQIHIMPDTPEIMLARQNKINYSETLYKLANEEAKKKGYDLRSDAIPIVAAKASRDVISDYKYKDGYRKQLGHHIGARNIEDDPKMMWSMHVAKIQSDREYKKDFEKWKTKFSSPVDMLGVVLAKKCQTLVSDVDYKNYLHEWTCLPDQNDVIHARQAYDLQSDNIYKSDLQWLRGIGWVPIGSMDVVKCKRAAEILSDNIYRQPPDKLKFTSVTDSLEQVLAKNNALNMNKRLYTEAWDKDKTQVHIMPDTPEIMLARQNKINYSESLYRQAMEEAKKEGYDLRSDAIPIVAAKASRDIASDYKYKEAYRKQLGHHIGARAVHDDPKIMWSLHIAKVQSDREYKKDFEKYKTRYSSPVDMLGIVLAKKCQTLVSDVDYKHPLHEWICLPDQNDIIHARKAYDLQSDNLYKSDLEWMKGIGWVPIDSLEVVRAKRAGELLSDTIYRQRPETLKFTSITDTPEQVLAKNNALNMNKRLYTEAWDNDKKTIHVMPDTPEIMLAKLNRINYSDKLYKLALEESKKEGYDLRLDAIPIQAAKASRDIASDYKYKEGYRKQLGHHIGARNIKDDPKMMWSIHVAKIQSDREYKKEFEKWKTKFSSPVDMLGVVLAKKCQILVSDIDYKHPLHEWTCLPDQNDVIQARKAYDLQSDAIYKSDLEWLRGIGWVPIGSVEVEKVKRAGEILSDRKYRQPADQLKFTCITDTPEIVLAKNNALTMSKHLYTEAWDADKTSIHVMPDTPDILLAKSNSANISQKLYTKGWDESKMKDYDLRADAISIKSAKASRDIASDYKYKEAYEKQKGHHIGAQSIEDDPKIMCAIHAGKIQSEREYKKEFQKWKTKFSSPVDMLSILLAKKCQTLVTDIDYRNYLHEWTCMPDQNDIIQAKKAYDLQSDSVYKADLEWLRGIGWMPEGSVEMNRVKVAQDLVNERLYRTRPEALSFTSIVDTPEVVLAKANSLQISEKLYQEAWNKDKSNITIPSDTPEMLQAHINALQISNKLYQKDWNDAKQKGYDIRADAIEIKHAKASREIASEYKYKEGYRKQLGHHMGFRTLQDDPKSVWAIHAAKIQSDREYKKAYEKSKGIHNTPLDMMSIVQAKKCQVLVSDIDYRNYLHQWTCLPDQNDVIQAKKAYDLQSDNLYKSDLEWLKGIGWLPEGSVEVMRVKNAQNLLNERLYRIKPEALKFTSIVDTPEVIQAKINAVQISEPLYRDAWEKEKANVNVPADTPLMLQSKINALQISNKRYQQAWEDVKMTGYDLRADAIGIQHAKASRDIASDYLYKTAYEKQKGHYIGCRSAKEDPKLVWAANVLKMQNDRLYKKAYNDHKAKISIPVDMVSISAAKEGQALASDVDYRHYLHHWSCFPDQNDVIQARKAYDLQSDSVYKADLEWLRGIGWMPEGSVEMNRVKVAQDLVNERLYRTRPEALSFTSIVDTPEVVLAKANSLQISEKLYQEAWNKDKSNITIPSDTPEMLQAHINALQISNKLYQKDWNDTKQKGYDIRADAIEIKHAKASREIASEYKYKEGYRKQLGHHMGFRTLQDDPKSVWAIHAAKIQSDREYKKAYEKSKGIHNTPLDMMSIVQAKKCQVLVSDIDYRNYLHQWTCLPDQNDVIQAKKAYDLQSDNLYKSDLEWLKGIGWLPEGSVEVMRVKNAQNLLNERLYRIKPEALKFTSIVDTPEVIQAKINAVQISEPLYRNAWEKEKANVNVPADTPLMLQSKINALQISNKRYQQAWEDVKMTGYDLRADAIGIQHAKASRDIASDYLYKTAYEKQKGHYIGCRSAKEDPKLVWAANVLKMQNDRLYKKAYNDHKAKISIPVDMVSISAAKEGQALASDVDYRHYLHHWSCFPDQNDVIQARKAYDLQSDSVYKADLEWLRGIGWMPEGSVEMNRVKVAQDLVNERLYRTRPEALSFTSIVDTPEVVLAKANSLQISEKLYQEAWNKDKSNITIPSDTPEMLQAHINALQISNKLYQKDWNDTKQKGYDIRADAIEIKHAKASREIASEYKYKEGYRKQLGHHMGFRTLQDDPKSVWAIHAAKIQSDREYKKAYEKSKGIHNTPLDMMSIVQAKKCQVLVSDIDYRNYLHQWTCLPDQNDVIQAKKAYDLQSDNLYKSDLEWLKGIGWLPEGSVEVMRVKNAQNLLNERLYRIKPEALKFTSIVDTPEVIQAKINAVQISEPLYRDAWEKEKANVNVPADTPLMLQSKINALQISNKRYQQAWEDVKMTGYDLRADAIGIQHAKASRDIASDYLYKTAYEKQKGHYIGCRSAKEDPKLVWAANVLKMQNDRLYKKAYNDHKAKISIPVDMVSISAAKEGQALASDVDYRHYLHRWSCFPDQNDVIQARKAYDLQSDALYKADLEWLRGIGWMPQGSPEVLRVKNAQNIFCDSVYRTPVVNLKYTSIVDTPEVVLAKSNAENISIPKYREVWDKDKTSIHIMPDTPEINLARANALNVSNKLYREGWDEMKAGCDVRLDAIPIQAAKASREIASDYKYKLDHEKQKGHYVGTLTARDDNKIRWALIADKLQNEREYRLDWAKWKAKIQSPVDMLSILHSKNSQALVSDMDYRNYLHQWTCMPDQNDVIQAKKAYELQSDNVYKADLEWLRGIGWMPNDSVSVNHAKHAADIFSEKKYRTKIETLNFTPVDDRVDYVTAKQSGEILDDIKYRKDWNATKSKYTLTETPLLHTAQEAARILDQYLYKEGWERQKATGYILPPDAVPFVHAHHCNDVQSELKYKAEHVKQKGHYVGVPTMRDDPKLVWFEHAGQIQNERLYKEDYHKTKAKINIPADMVSVLAAKQGQTLVSDIDYRNYLHQWMCHPDQNDVIQARKAYDLQSDNVYRADLEWLRGIGWIPLDSVDHVRVTKNQEMMSQIKYKKNALENYPNFRSVVDPPEIVLAKINSVNQSDVKYKETFNKAKGKYTFSPDTPHISHSKDMGKLYSTILYKGAWEGTKAYGYTLDERYIPIVGAKHADLVNSELKYKETYEKQKGHYLAGKVIGEFPGVVHCLDFQKMRSALNYRKHYEDTKANVHIPNDMMNHVLAKRCQYILSDLEYRHYFHQWTSLLEEPNVIRVRNAQEILSDNVYKDDLNWLKGIGCYVWDTPQILHAKKSYDLQSQLQYTAAGKENLQNYNLVTDTPLYVTAVQSGINASEVKYKENYHQIKDKYTTVLETVDYDRTRNLKNLYSSNLYKEAWDRVKATSYILPSSTLSLTHAKNQKHLASHIKYREEYEKFKALYTLPRSVDDDPNTARCLRVGKLNIDRLYRSVYEKNKMKIHIVPDMVEMVTAKDSQKKVSEIDYRLRLHEWICHPDLQVNDHVRKVTDQISDIVYKDDLNWLKGIGCYVWDTPEILHAKHAYDLRDDIKYKAHMLKTRNDYKLVTDTPVYVQAVKSGKQLSDAVYHYDYVHSVRGKVAPTTKTVDLDRALHAYKLQSSNLYKTSLRTLPTGYRLPGDTPHFKHIKDTRYMSSYFKYKEAYEHTKAYGYTLGPKDVPFVHVRRVNNVTSERLYRELYHKLKDKIHTTPDTPEIRQVKKTQEAVSELIYKSDFFKMQGHMISLPYTPQVIHCRYVGDITSDIKYKEDLQVLKGFGCFLYDTPDMVRSRHLRKLWSNYLYTDKARKMRDKYKVVLDTPEYRKVQELKTHLSELVYRAAGKKQKSIFTSVPDTPDLLRAKRGQKLQSQYLYVELATKERPHHHAGNQTTALKHAKDVKDMVSEKKYKIQYEKMKDKYTPVPDTPILIRAKRAYWNASDLRYKETFQKTKGKYHTVKDALDIVYHRKVTDDISKIKYKENYMSQLGIWRSIPDRPEHFHHRAVTDTVSDVKYKEDLTWLKGIGCYAYDTPDFTLAEKNKTLYSKYKYKEVFERTKSDFKYVADSPINRHFKYATQLMNERKYKSSAKMFLQHGCNEILRPDMLTALYNSHMWSQIKYRKNYEKSKDKFTSIVDTPEHLRTTKVNKQISDILYKLEYNKAKPRGYTTIHDTPMLLHVRKVKDEVSDLKYKEVYQRNKSNCTIEPDAVHIKAAKDAYKVNTNLDYKKQYEANKAHWKWTPDRPDFLQAAKSSLQQSDFEYKLDREFLKGCKLSVTDDKNTVLALRNTLIESDLKYKEKHVKERGTCHAVPDTPQILLAKTVSNLVSENKYKDHVKKHLAQGSYTTLPETRDTVHVKEVTKHVSDTNYKKKFVKEKGKSNYSIMLEPPEVKHAMEVAKKQSDVAYRKDAKENLHYTTVADRPDIKKATQAAKQASEVEYRAKHRKEGSHGLSMLGRPDIEMAKKAAKLSSQVKYRENFDKEKGKTPKYNPKDSQLYKVMKDANNLASEVKYKADLKKLHKPVTDMKESLIMNHVLNTSQLASSYQYKKKYEKSKGHYHTIPDNLEQLHLKEATELQSIVKYKEKYEKERGKPMLDFETPTYITAKESQQMQSGKEYRKDYEESIKGRNLTGLEVTPALLHVKYATKIASEKEYRKDLEESIRGKGLTEMEDTPDMLRAKNATQILNEKEYKRDLELEVKGRGLNAMANETPDFMRARNATDIASQIKYKQSAEMEKANFTSVVDTPEIIHAQQVKNLSSQKKYKEDAEKSMSYYETVLDTPEIQRVRENQKNFSLLQYQCDLKNSKGKITVVQDTPEILRVKENQKNFSSVLYKEDVSPGTAIGKTPEMMRVKQTQDHISSVKYKEAIGQGTPIPDLPEVKRVKETQKHISSVMYKENLGTGIPTTVTPEIERVKRNQENFSSVLYKENLGKGIPTPITPEMERVKRNQENFSSILYKENLSKGTPLPVTPEMERVKLNQENFSSVLYKENVGKGIPIPITPEMERVKHNQENFSSVLYKENLGTGIPIPITPEMQRVKHNQENLSSVLYKENMGKGTPLPVTPEMERVKHNQENISSVLYKENMGKGTPLPVTPEMERVKHNQENISSVLYKENMGKGTPLAVTPEMERVKHNQENISSVLYKENVGKATATPVTPEMQRVKRNQENISSVLYKENLGKATPTPFTPEMERVKRNQENFSSVLYKENMRKATPTPVTPEMERAKRNQENISSVLYSDSFRKQIQGKAAYVLDTPEMRRVRETQRHISTVKYHEDFEKHKGCFTPVVTDPITERVKKNMQDFSDINYRGIQRKVVEMEQKRNDQDQETITGLRVWRTNPGSVFDYDPAEDNIQSRSLHMINVQAQRRSREQSRSASALSISGGEEKSEHSEAPDHHLSTYSDGGVFAVSTAYKHAKTTELPQQRSSSVATQQTTVSSIPSHPSTAGKIFRAMYDYMAADADEVSFKDGDAIINVQAIDEGWMYGTVQRTGRTGMLPANYVEAI

SEQ ID NO: 55681 - protein, 6669 aa, Homo sapiens
  Payload ID: 10961
  Gene Symbol: NEB
  Gene Name: nebulin
  Uniprot ID: P20929
  ENSP ID: ENSP00000386259
MADDEDYEEVVEYYTEEVVYEEVPGETITKIYETTTTRTSDYEQSETSKPALAQPALAQPASAKPVERRKVIRKKVDPSKFMTPYIAHSQKMQDLFSPNKYKEKFEKTKGQPYASTTDTPELRRIKKVQDQLSEVKYRMDGDVAKTICHVDEKAKDIEHAKKVSQQVSKVLYKQNWEDTKDKYLLPPDAPELVQAVKNTAMFSKKLYTEDWEADKSLFYPYNDSPELRRVAQAQKALSDVAYKKGLAEQQAQFTPLADPPDIEFAKKVTNQVSKQKYKEDYENKIKGKWSETPCFEVANARMNADNISTRKYQEDFENMKDQIYFMQTETPEYKMNKKAGVAASKVKYKEDYEKNKGKADYNVLPASENPQLRQLKAAGDALSDKLYKENYEKTKAKSINYCETPKFKLDTVLQNFSSDKKYKDSYLKDILGHYVGSFEDPYHSHCMKVTAQNSDKNYKAEYEEDRGKGFFPQTITQEYEAIKKLDQCKDHTYKVHPDKTKFTQVTDSPVLLQAQVNSKQLSDLNYKAKHESEKFKCHIPPDTPAFIQHKVNAYNLSDNLYKQDWEKSKAKKFDIKVDAIPLLAAKANTKNTSDVMYKKDYEKNKGKMIGVLSINDDPKMLHSLKVAKNQSDRLYKENYEKTKAKSMNYCETPKYQLDTQLKNFSEARYKDLYVKDVLGHYVGSMEDPYHTHCMKVAAQNSDKSYKAEYEEDKGKCYFPQTITQEYEAIKKLDQCKDHTYKVHPDKTKFTAVTDSPVLLQAQLNTKQLSDLNYKAKHEGEKFKCHIPADAPQFIQHRVNAYNLSDNVYKQDWEKSKAKKFDIKVDAIPLLAAKANTKNTSDVMYKKDYEKSKGKMIGALSINDDPKMLHSLKTAKNQSDREYRKDYEKSKTIYTAPLDMLQVTQAKKSQAIASDVDYKHILHSYSYPPDSINVDLAKKAYALQSDVEYKADYNSWMKGCGWVPFGSLEMEKAKRASDILNEKKYRQHPDTLKFTSIEDAPITVQSKINQAQRSDIAYKAKGEEIIHKYNLPPDLPQFIQAKVNAYNISENMYKADLKDLSKKGYDLRTDAIPIRAAKAARQAASDVQYKKDYEKAKGKMVGFQSLQDDPKLVHYMNVAKIQSDREYKKDYEKTKSKYNTPHDMFNVVAAKKAQDVVSNVNYKHSLHHYTYLPDAMDLELSKNMMQIQSDNVYKEDYNNWMKGIGWIPIGSLDVEKVKKAGDALNEKKYRQHPDTLKFTSIVDSPVMVQAKQNTKQVSDILYKAKGEDVKHKYTMSPDLPQFLQAKCNAYNISDVCYKRDWYDLIAKGNNVLGDAIPITAAKASRNIASDYKYKEAYEKSKGKHVGFRSLQDDPKLVHYMNVAKLQSDREYKKNYENTKTSYHTPGDMVSITAAKMAQDVATNVNYKQPLHHYTYLPDAMSLEHTRNVNQIQSDNVYKDEYNSFLKGIGWIPIGSLEVEKVKKAGDALNERKYRQHPDTVKFTSVPDSMGMVLAQHNTKQLSDLNYKVEGEKLKHKYTIDPELPQFIQAKVNALNMSDAHYKADWKKTIAKGYDLRPDAIPIVAAKSSRNIASDCKYKEAYEKAKGKQVGFLSLQDDPKLVHYMNVAKIQSDREYKKGYEASKTKYHTPLDMVSVTAAKKSQEVATNANYRQSYHHYTLLPDALNVEHSRNAMQIQSDNLYKSDFTNWMKGIGWVPIESLEVEKAKKAGEILSEKKYRQHPEKLKFTYAMDTMEQALNKSNKLNMDKRLYTEKWNKDKTTIHVMPDTPDILLSRVNQITMSDKLYKAGWEEEKKKGYDLRPDAIAIKAARASRDIASDYKYKKAYEQAKGKHIGFRSLEDDPKLVHFMQVAKMQSDREYKKGYEKSKTSFHTPVDMLSVVAAKKSQEVATNANYRNVIHTYNMLPDAMSFELAKNMMQIQSDNQYKADYADFMKGIGWLPLGSLEAEKNKKAMEIISEKKYRQHPDTLKYSTLMDSMNMVLAQNNAKIMNEHLYKQAWEADKTKVHIMPDIPQIILAKANAINMSDKLYKLSLEESKKKGYDLRPDAIPIKAAKASRDIASDYKYKYNYEKGKGKMVGFRSLEDDPKLVHSMQVAKMQSDREYKKNYENTKTSYHTPADMLSVTAAKDAQANITNTNYKHLIHKYILLPDAMNIELTRNMNRIQSDNEYKQDYNEWYKGLGWSPAGSLEVEKAKKATEYASDQKYRQHPSNFQFKKLTDSMDMVLAKQNAHTMNKHLYTIDWNKDKTKIHVMPDTPDILQAKQNQTLYSQKLYKLGWEEALKKGYDLPVDAISVQLAKASRDIASDYKYKQGYRKQLGHHVGFRSLQDDPKLVLSMNVAKMQSEREYKKDFEKWKTKFSSPVDMLGVVLAKKCQELVSDVDYKNYLHQWTCLPDQNDVVQAKKVYELQSENLYKSDLEWLRGIGWSPLGSLEAEKNKRASEIISEKKYRQPPDRNKFTSIPDAMDIVLAKTNAKNRSDRLYREAWDKDKTQIHIMPDTPDIVLAKANLINTSDKLYRMGYEELKRKGYDLPVDAIPIKAAKASREIASEYKYKEGFRKQLGHHIGARNIEDDPKMMWSMHVAKIQSDREYKKDFEKWKTKFSSPVDMLGVVLAKKCQTLVSDVDYKNYLHQWTCLPDQSDVIHARQAYDLQSDNLYKSDLQWLKGIGWMTSGSLEDEKNKRATQILSDHVYRQHPDQFKFSSLMDSIPMVLAKNNAITMNHRLYTEAWDKDKTTVHIMPDTPEVLLAKQNKVNYSEKLYKLGLEEAKRKGYDMRVDAIPIKAAKASRDIASEFKYKEGYRKQLGHHIGARAIRDDPKMMWSMHVAKIQSDREYKKDFEKWKTKFSSPVDMLGVVLAKKCQTLVSDVDYKNYLHQWTCLPDQSDVIHARQAYDLQSDNMYKSDLQWMRGIGWVSIGSLDVEKCKRATEILSDKIYRQPPDRFKFTSVTDSLEQVLAKNNALNMNKRLYTEAWDKDKTQIHIMPDTPEIMLARQNKINYSETLYKLANEEAKKKGYDLRSDAIPIVAAKASRDVISDYKYKDGYRKQLGHHIGARNIEDDPKMMWSMHVAKIQSDREYKKDFEKWKTKFSSPVDMLGVVLAKKCQTLVSDVDYKNYLHEWTCLPDQNDVIHARQAYDLQSDNIYKSDLQWLRGIGWVPIGSMDVVKCKRAAEILSDNIYRQPPDKLKFTSVTDSLEQVLAKNNALNMNKRLYTEAWDKDKTQVHIMPDTPEIMLARQNKINYSESLYRQAMEEAKKEGYDLRSDAIPIVAAKASRDIASDYKYKEAYRKQLGHHIGARAVHDDPKIMWSLHIAKVQSDREYKKDFEKYKTRYSSPVDMLGIVLAKKCQTLVSDVDYKHPLHEWICLPDQNDIIHARKAYDLQSDNLYKSDLEWMKGIGWVPIDSLEVVRAKRAGELLSDTIYRQRPETLKFTSITDTPEQVLAKNNALNMNKRLYTEAWDNDKKTIHVMPDTPEIMLAKLNRINYSDKLYKLALEESKKEGYDLRLDAIPIQAAKASRDIASDYKYKEGYRKQLGHHIGARNIKDDPKMMWSIHVAKIQSDREYKKEFEKWKTKFSSPVDMLGVVLAKKCQILVSDIDYKHPLHEWTCLPDQNDVIQARKAYDLQSDAIYKSDLEWLRGIGWVPIGSVEVEKVKRAGEILSDRKYRQPADQLKFTCITDTPEIVLAKNNALTMSKHLYTEAWDADKTSIHVMPDTPDILLAKSNSANISQKLYTKGWDESKMKDYDLRADAISIKSAKASRDIASDYKYKEAYEKQKGHHIGAQSIEDDPKIMCAIHAGKIQSEREYKKEFQKWKTKFSSPVDMLSILLAKKCQTLVTDIDYRNYLHEWTCMPDQNDIIQAKKAYDLQSDALYKADLEWLRGIGWMPQGSPEVLRVKNAQNIFCDSVYRTPVVNLKYTSIVDTPEVVLAKSNAENISIPKYREVWDKDKTSIHIMPDTPEINLARANALNVSNKLYREGWDEMKAGCDVRLDAIPIQAAKASREIASDYKYKLDHEKQKGHYVGTLTARDDNKIRWALIADKLQNEREYRLDWAKWKAKIQSPVDMLSILHSKNSQALVSDMDYRNYLHQWTCMPDQNDVIQAKKAYELQSDNVYKADLEWLRGIGWMPNDSVSVNHAKHAADIFSEKKYRTKIETLNFTPVDDRVDYVTAKQSGEILDDIKYRKDWNATKSKYTLTETPLLHTAQEAARILDQYLYKEGWERQKATGYILPPDAVPFVHAHHCNDVQSELKYKAEHVKQKGHYVGVPTMRDDPKLVWFEHAGQIQNERLYKEDYHKTKAKINIPADMVSVLAAKQGQTLVSDIDYRNYLHQWMCHPDQNDVIQARKAYDLQSDNVYRADLEWLRGIGWIPLDSVDHVRVTKNQEMMSQIKYKKNALENYPNFRSVVDPPEIVLAKINSVNQSDVKYKETFNKAKGKYTFSPDTPHISHSKDMGKLYSTILYKGAWEGTKAYGYTLDERYIPIVGAKHADLVNSELKYKETYEKQKGHYLAGKVIGEFPGVVHCLDFQKMRSALNYRKHYEDTKANVHIPNDMMNHVLAKRCQYILSDLEYRHYFHQWTSLLEEPNVIRVRNAQEILSDNVYKDDLNWLKGIGCYVWDTPQILHAKKSYDLQSQLQYTAAGKENLQNYNLVTDTPLYVTAVQSGINASEVKYKENYHQIKDKYTTVLETVDYDRTRNLKNLYSSNLYKEAWDRVKATSYILPSSTLSLTHAKNQKHLASHIKYREEYEKFKALYTLPRSVDDDPNTARCLRVGKLNIDRLYRSVYEKNKMKIHIVPDMVEMVTAKDSQKKVSEIDYRLRLHEWICHPDLQVNDHVRKVTDQISDIVYKDDLNWLKGIGCYVWDTPEILHAKHAYDLRDDIKYKAHMLKTRNDYKLVTDTPVYVQAVKSGKQLSDAVYHYDYVHSVRGKVAPTTKTVDLDRALHAYKLQSSNLYKTSLRTLPTGYRLPGDTPHFKHIKDTRYMSSYFKYKEAYEHTKAYGYTLGPKDVPFVHVRRVNNVTSERLYRELYHKLKDKIHTTPDTPEIRQVKKTQEAVSELIYKSDFFKMQGHMISLPYTPQVIHCRYVGDITSDIKYKEDLQVLKGFGCFLYDTPDMVRSRHLRKLWSNYLYTDKARKMRDKYKVVLDTPEYRKVQELKTHLSELVYRAAGKKQKSIFTSVPDTPDLLRAKRGQKLQSQYLYVELATKERPHHHAGNQTTALKHAKDVKDMVSEKKYKIQYEKMKDKYTPVPDTPILIRAKRAYWNASDLRYKETFQKTKGKYHTVKDALDIVYHRKVTDDISKIKYKENYMSQLGIWRSIPDRPEHFHHRAVTDTVSDVKYKEDLTWLKGIGCYAYDTPDFTLAEKNKTLYSKYKYKEVFERTKSDFKYVADSPINRHFKYATQLMNEKKYRADYEQRKDKYHLVVDEPRHLLAKTAGDQISQIKYRKNYEKSKDKFTSIVDTPEHLRTTKVNKQISDILYKLEYNKAKPRGYTTIHDTPMLLHVRKVKDEVSDLKYKEVYQRNKSNCTIEPDAVHIKAAKDAYKVNTNLDYKKQYEANKAHWKWTPDRPDFLQAAKSSLQQSDFEYKLDREFLKGCKLSVTDDKNTVLALRNTLIESDLKYKEKHVKERGTCHAVPDTPQILLAKTVSNLVSENKYKDHVKKHLAQGSYTTLPETRDTVHVKEVTKHVSDTNYKKKFVKEKGKSNYSIMLEPPEVKHAMEVAKKQSDVAYRKDAKENLHYTTVADRPDIKKATQAAKQASEVEYRAKHRKEGSHGLSMLGRPDIEMAKKAAKLSSQVKYRENFDKEKGKTPKYNPKDSQLYKVMKDANNLASEVKYKADLKKLHKPVTDMKESLIMNHVLNTSQLASSYQYKKKYEKSKGHYHTIPDNLEQLHLKEATELQSIVKYKEKYEKERGKPMLDFETPTYITAKESQQMQSGKEYRKDYEESIKGRNLTGLEVTPALLHVKYATKIASEKEYRKDLEESIRGKGLTEMEDTPDMLRAKNATQILNEKEYKRDLELEVKGRGLNAMANETPDFMRARNATDIASQIKYKQSAEMEKANFTSVVDTPEIIHAQQVKNLSSQKKYKEDAEKSMSYYETVLDTPEIQRVRENQKNFSLLQYQCDLKNSKGKITVVQDTPEILRVKENQKNFSSVLYKEDVSPGTAIGKTPEMMRVKQTQDHISSVKYKEAIGQGTPIPDLPEVKRVKETQKHISSVMYKENLGTGIPTTVTPEIERVKRNQENFSSVLYKENLGKGIPTPITPEMERVKRNQENFSSVLYKENMGKGTPLAVTPEMERVKHNQENISSVLYKENVGKATATPVTPEMQRVKRNQENISSVLYKENLGKATPTPFTPEMERVKRNQENFSSVLYKENMRKATPTPVTPEMERAKRNQENISSVLYSDSFRKQIQGKAAYVLDTPEMRRVRETQRHISTVKYHEDFEKHKGCFTPVVTDPITERVKKNMQDFSDINYRGIQRKVVEMEQKRNDQDQETITGLRVWRTNPGSVFDYDPAEDNIQSRSLHMINVQAQRRSREQSRSASALSISGGEEKSEHSEAPDHHLSTYSDGGVFAVSTAYKHAKTTELPQQRSSSVATQQTTVSSIPSHPSTAGKIFRAMYDYMAADADEVSFKDGDAIINVQAIDEGWMYGTVQRTGRTGMLPANYVEAI

SEQ ID NO: 55682 - protein, 766 aa, Homo sapiens
  Payload ID: 10961
  Gene Symbol: NEB
  Gene Name: nebulin
  ENSP ID: ENSP00000389074
  MOD_RES (1)..(1): Any amino acid
XKEVTKHVSDTNYKKKFVKEKGKSNYSIMLEPPEVKHAMEVAKKQSDVAYRKDAKENLHYTTVADRPDIKKATQAAKQASEVEYRAKHRKEGSHGLSMLGRPDIEMAKKAAKLSSQVKYRENFDKEKGKTPKYNPKDSQLYKVMKDANNLASEVKYKADLKKLHKPVTDMKESLIMNHVLNTSQLASSYQYKKKYEKSKGHYHTIPDNLEQLHLKEATELQSIVKYKEKYEKERGKPMLDFETPTYITAKESQQMQSGKEYRKDLEESIRGKGLTEMEDTPDMLRAKNATQILNEKEYKRDLELEVKGRGLNAMANETPDFMRARNATDIASQIKYKQSAEMEKANFTSVVDTPEIIHAQQVKNLSSQKKYKEDAEKSMSYYETVLDTPEIQRVRENQKNFSLVLYKEDVSPGTAIGKTPEMMRVKQTQDHISSVKYKEAIGQGTPIPDLPEVKRVKETQKHISSVLYKENVGKATATPVTPEMQRVKRNQENISSVLYSDSFRKQIQGKAAYVLDTPEMRRVRETQRHISTVKYHEDFEKHKGCFTPVVTDPITERVKKNMQDFSDINYRGIQRKVVEMEQKRNDQDQETITGLRVWRTNPGSVFDYDPAEDNIQSRSLHMINVQAQRRSREQSRSASALSISGGEEKSEHSEAPDHHLSTYSDGGVFAVSTAYKHAKTTELPQQRSSSVATQQTTVSSIPSHPSTAGKIFRAMYDYMAADADEVSFKDGDAIINVQAIDEGWMYGTVQRTGRTGMLPANYVEAI

SEQ ID NO: 55683 - protein, 255 aa, Homo sapiens
  Payload ID: 10961
  Gene Symbol: NEB
  Gene Name: nebulin
  ENSP ID: ENSP00000404876
RNATDIASQIKYKQSAEMEKANFTSVVDTPEIIHAQQVKNLSSQLQYQCDLKNSKGKITVVQDTPEILRVKENQKNFSSVLYKEDVSPGTAIGKTPEMMRVKQTQDHISSVKYKEAIGQGTPIPDLPEVKRVKETQKHISSVMYKENLGTGIPTTVTPEIERVKRNQENFSSVLYKENLGKGIPTPITPEMERVKRNQENFSSVLYKENMGKGTPLPVTPEMERVKHNQENISSVLYKENMGKGTPLAVTPEMER

SEQ ID NO: 55684 - protein, 250 aa, Homo sapiens [sequence omitted]

SEQ ID NO: 55685 - protein, 401 aa, Homo sapiens
  Payload ID: 10961
  Gene Symbol: NEB
  Gene Name: nebulin
  ENSP ID: ENSP00000408570
  MOD_RES (1)..(1): Any amino acid
XKNSKGKITVVQDTPEILRVKENQKNFSSVLYKEDVSPGTAIGKTPEMMRVKQTQDHISSVKYKEAIGQGTPIPDLPEVKRVKETQKHISSVMYKENLGTGIPTTVTPEIERVKRNQENFSSVLYKENLGKGIPTPITPEMERVKRNQENFSSILYKENLSKGTPLPVTPEMERVKLNQENFSSVLYKENLGTGIPIPITPEMQRVKHNQENLSSVLYKENMGKGTPLPVTPEMERVKHNQENISSVLYKENMGKGTPLPVTPEMERVKHNQENISSVLYKENMGKGTPLAVTPEMERVKHNQENISSVLYKENVGKATATPVTPEMQRVKRNQENISSVLYKENLGKATPTPFTPEMERVKRNQENFSSVLYKENMRKATPTPVTPEMERAKRNQENISS

SEQ ID NO: 55686 - protein, 3007 aa, Homo sapiens
  Payload ID: 10961
  Gene Symbol: NEB
  Gene Name: nebulin
  ENSP ID: ENSP00000410961
GIHNTPLDMMSIVQAKKCQVLVSDIDYRNYLHQWTCLPDQNDVIQAKKAYDLQSDNLYKSDLEWLKGIGWLPEGSVEVMRVKNAQNLLNERLYRIKPEALKFTSIVDTPEVIQAKINAVQISEPLYRDAWEKEKANVNVPADTPLMLQSKINALQISNKRYQQAWEDVKMTGYDLRADAIGIQHAKASRDIASDYLYKTAYEKQKGHYIGCRSAKEDPKLVWAANVLKMQNDRLYKKAYNDHKAKISIPVDMVSISAAKEGQALASDVDYRHYLHRWSCFPDQNDVIQARKAYDLQSDALYKADLEWLRGIGWMPQGSPEVLRVKNAQNIFCDSVYRTPVVNLKYTSIVDTPEVVLAKSNAENISIPKYREVWDKDKTSIHIMPDTPEINLARANALNVSNKLYREGWDEMKAGCDVRLDAIPIQAAKASREIASDYKYKLDHEKQKGHYVGTLTARDDNKIRWALIADKLQNEREYRLDWAKWKAKIQSPVDMLSILHSKNSQALVSDMDYRNYLHQWTCMPDQNDVIQAKKAYELQSDNVYKADLEWLRGIGWMPNDSVSVNHAKHAADIFSEKKYRTKIETLNFTPVDDRVDYVTAKQSGEILDDIKYRKDWNATKSKYTLTETPLLHTAQEAARILDQYLYKEGWERQKATGYILPPDAVPFVHAHHCNDVQSELKYKAEHVKQKGHYVGVPTMRDDPKLVWFEHAGQIQNERLYKEDYHKTKAKINIPADMVSVLAAKQGQTLVSDIDYRNYLHQWMCHPDQNDVIQARKAYDLQSDNVYRADLEWLRGIGWIPLDSVDHVRVTKNQEMMSQIKYKKNALENYPNFRSVVDPPEIVLAKINSVNQSDVKYKETFNKAKGKYTFSPDTPHISHSKDMGKLYSTILYKGAWEGTKAYGYTLDERYIPIVGAKHADLVNSELKYKETYEKQKGHYLAGKVIGEFPGVVHCLDFQKMRSALNYRKHYEDTKANVHIPNDMMNHVLAKRCQYILSDLEYRHYFHQWTSLLEEPNVIRVRNAQEILSDNVYKDDLNWLKGIGCYVWDTPQILHAKKSYDLQSQLQYTAAGKENLQNYNLVTDTPLYVTAVQSGINASEVKYKENYHQIKDKYTTVLETVDYDRTRNLKNLYSSNLYKEAWDRVKATSYILPSSTLSLTHAKNQKHLASHIKYREEYEKFKALYTLPRSVDDDPNTARCLRVGKLNIDRLYRSVYEKNKMKIHIVPDMVEMVTAKDSQKKVSEIDYRLRLHEWICHPDLQVNDHVRKVTDQISDIVYKDDLNWLKGIGCYVWDTPEILHAKHAYDLRDDIKYKAHMLKTRNDYKLVTDTPVYVQAVKSGKQLSDAVYHYDYVHSVRGKVAPTTKTVDLDRALHAYKLQSSNLYKTSLRTLPTGYRLPGDTPHFKHIKDTRYMSSYFKYKEAYEHTKAYGYTLGPKDVPFVHVRRVNNVTSERLYRELYHKLKDKIHTTPDTPEIRQVKKTQEAVSELIYKSDFFKMQGHMISLPYTPQVIHCRYVGDITSDIKYKEDLQVLKGFGCFLYDTPDMVRSRHLRKLWSNYLYTDKARKMRDKYKVVLDTPEYRKVQELKTHLSELVYRAAGKKQKSIFTSVPDTPDLLRAKRGQKLQSQYLYVELATKERPHHHAGNQTTALKHAKDVKDMVSEKKYKIQYEKMKDKYTPVPDTPILIRAKRAYWNASDLRYKETFQKTKGKYHTVKDALDIVYHRKVTDDISKIKYKENYMSQLGIWRSIPDRPEHFHHRAVTDTVSDVKYKEDLTWLKGIGCYAYDTPDFTLAEKNKTLYSKYKYKEVFERTKSDFKYVADSPINRHFKYATQLMNEKKYRADYEQRKDKYHLVVDEPRHLLAKTAGDQISQIKYRKNYEKSKDKFTSIVDTPEHLRTTKVNKQISDILYKLEYNKAKPRGYTTIHDTPMLLHVRKVKDEVSDLKYKEVYQRNKSNCTIEPDAVHIKAAKDAYKVNTNLDYKKQYEANKAHWKWTPDRPDFLQAAKSSLQQSDFEYKLDREFLKGCKLSVTDDKNTVLALRNTLIESDLKYKEKHVKERGTCHAVPDTPQILLAKTVSNLVSENKYKDHVKKHLAQGSYTTLPETRDTVHVKEVTKHVSDTNYKKKFVKEKGKSNYSIMLEPPEVKHAMEVAKKQSDVAYRKDAKENLHYTTVADRPDIKKATQAAKQASEVEYRAKHRKEGSHGLSMLGRPDIEMAKKAAKLSSQVKYRENFDKEKGKTPKYNPKDSQLYKVMKDANNLASEVKYKADLKKLHKPVTDMKESLIMNHVLNTSQLASSYQYKKKYEKSKGHYHTIPDNLEQLHLKEATELQSIVKYKEKYEKERGKPMLDFETPTYITAKESQQMQSGKEYRKDYEESIKGRNLTGLEVTPALLHVKYATKIASEKEYRKDLEESIRGKGLTEMEDTPDMLRAKNATQILNEKEYKRDLELEVKGRGLNAMANETPDFMRARNATDIASQIKYKQSAEMEKANFTSVVDTPEIIHAQQVKNLSSQKKYKEDAEKSMSYYETVLDTPEIQRVRENQKNFSLLQYQCDLKNSKGKITVVQDTPEILRVKENQKNFSSVLYKEDVSPGTAIGKTPEMMRVKQTQDHISSVKYKEAIGQGTPIPDLPEVKRVKETQKHISSVMYKENLGTGIPTTVTPEIERVKRNQENFSSVLYKENMGKGTPLAVTPEMERVKHNQENISSVLYKENVGKATATPVTPEMQRVKRNQENISSVLYSDSFRKQIQGKAAYVLDTPEMRRVRETQRHISTVKYHEDFEKHKGCFTPVVTDPITERVKKNMQDFSDINYRGIQRKVVEMEQKRNDQDQETITGLRVWRTNPGSVFDYDPAEDNIQSRSLHMINVQAQRRSREQSRSASALSISGGEEKSEHSEAPDHHLSTYSDGGVFAVSTAYKHAKTTELPQQRSSSVATQQTTVSSIPSHPSTAGKIFRAMYDYMAADADEVSFKDGDAIINVQAIDEGWMYGTVQRTGRTGMLPANYVEAI

SEQ ID NO: 55687 - protein, 8525 aa, Homo sapiens
  Payload ID: 10961
  Gene Symbol: NEB
  Gene Name: nebulin
  Uniprot ID: P20929
  ENSP ID: ENSP00000416578
MADDEDYEEVVEYYTEEVVYEEVPGETITKIYETTTTRTSDYEQSETSKPALAQPALAQPASAKPVERRKVIRKKVDPSKFMTPYIAHSQKMQDLFSPNKYKEKFEKTKGQPYASTTDTPELRRIKKVQDQLSEVKYRMDGDVAKTICHVDEKAKDIEHAKKVSQQVSKVLYKQNWEDTKDKYLLPPDAPELVQAVKNTAMFSKKLYTEDWEADKSLFYPYNDSPELRRVAQAQKALSDVAYKKGLAEQQAQFTPLADPPDIEFAKKVTNQVSKQKYKEDYENKIKGKWSETPCFEVANARMNADNISTRKYQEDFENMKDQIYFMQTETPEYKMNKKAGVAASKVKYKEDYEKNKGKADYNVLPASENPQLRQLKAAGDALSDKLYKENYEKTKAKSINYCETPKFKLDTVLQNFSSDKKYKDSYLKDILGHYVGSFEDPYHSHCMKVTAQNSDKNYKAEYEEDRGKGFFPQTITQEYEAIKKLDQCKDHTYKVHPDKTKFTQVTDSPVLLQAQVNSKQLSDLNYKAKHESEKFKCHIPPDTPAFIQHKVNAYNLSDNLYKQDWEKSKAKKFDIKVDAIPLLAAKANTKNTSDVMYKKDYEKNKGKMIGVLSINDDPKMLHSLKVAKNQSDRLYKENYEKTKAKSMNYCETPKYQLDTQLKNFSEARYKDLYVKDVLGHYVGSMEDPYHTHCMKVAAQNSDKSYKAEYEEDKGKCYFPQTITQEYEAIKKLDQCKDHTYKVHPDKTKFTAVTDSPVLLQAQLNTKQLSDLNYKAKHEGEKFKCHIPADAPQFIQHRVNAYNLSDNVYKQDWEKSKAKKFDIKVDAIPLLAAKANTKNTSDVMYKKDYEKSKGKMIGALSINDDPKMLHSLKTAKNQSDREYRKDYEKSKTIYTAPLDMLQVTQAKKSQAIASDVDYKHILHSYSYPPDSINVDLAKKAYALQSDVEYKADYNSWMKGCGWVPFGSLEMEKAKRASDILNEKKYRQHPDTLKFTSIEDAPITVQSKINQAQRSDIAYKAKGEEIIHKYNLPPDLPQFIQAKVNAYNISENMYKADLKDLSKKGYDLRTDAIPIRAAKAARQAASDVQYKKDYEKAKGKMVGFQSLQDDPKLVHYMNVAKIQSDREYKKDYEKTKSKYNTPHDMFNVVAAKKAQDVVSNVNYKHSLHHYTYLPDAMDLELSKNMMQIQSDNVYKEDYNNWMKGIGWIPIGSLDVEKVKKAGDALNEKKYRQHPDTLKFTSIVDSPVMVQAKQNTKQVSDILYKAKGEDVKHKYTMSPDLPQFLQAKCNAYNISDVCYKRDWYDLIAKGNNVLGDAIPITAAKASRNIASDYKYKEAYEKSKGKHVGFRSLQDDPKLVHYMNVAKLQSDREYKKNYENTKTSYHTPGDMVSITAAKMAQDVATNVNYKQPLHHYTYLPDAMSLEHTRNVNQIQSDNVYKDEYNSFLKGIGWIPIGSLEVEKVKKAGDALNERKYRQHPDTVKFTSVPDSMGMVLAQHNTKQLSDLNYKVEGEKLKHKYTIDPELPQFIQAKVNALNMSDAHYKADWKKTIAKGYDLRPDAIPIVAAKSSRNIASDCKYKEAYEKAKGKQVGFLSLQDDPKLVHYMNVAKIQSDREYKKGYEASKTKYHTPLDMVSVTAAKKSQEVATNANYRQSYHHYTLLPDALNVEHSRNAMQIQSDNLYKSDFTNWMKGIGWVPIESLEVEKAKKAGEILSEKKYRQHPEKLKFTYAMDTMEQALNKSNKLNMDKRLYTEKWNKDKTTIHVMPDTPDILLSRVNQITMSDKLYKAGWEEEKKKGYDLRPDAIAIKAARASRDIASDYKYKKAYEQAKGKHIGFRSLEDDPKLVHFMQVAKMQSDREYKKGYEKSKTSFHTPVDMLSVVAAKKSQEVATNANYRNVIHTYNMLPDAMSFELAKNMMQIQSDNQYKADYADFMKGIGWLPLGSLEAEKNKKAMEIISEKKYRQHPDTLKYSTLMDSMNMVLAQNNAKIMNEHLYKQAWEADKTKVHIMPDIPQIILAKANAINMSDKLYKLSLEESKKKGYDLRPDAIPIKAAKASRDIASDYKYKYNYEKGKGKMVGFRSLEDDPKLVHSMQVAKMQSDREYKKNYENTKTSYHTPADMLSVTAAKDAQANITNTNYKHLIHKYILLPDAMNIELTRNMNRIQSDNEYKQDYNEWYKGLGWSPAGSLEVEKAKKATEYASDQKYRQHPSNFQFKKLTDSMDMVLAKQNAHTMNKHLYTIDWNKDKTKIHVMPDTPDILQAKQNQTLYSQKLYKLGWEEALKKGYDLPVDAISVQLAKASRDIASDYKYKQGYRKQLGHHVGFRSLQDDPKLVLSMNVAKMQSEREYKKDFEKWKTKFSSPVDMLGVVLAKKCQELVSDVDYKNYLHQWTCLPDQNDVVQAKKVYELQSENLYKSDLEWLRGIGWSPLGSLEAEKNKRASEIISEKKYRQPPDRNKFTSIPDAMDIVLAKTNAKNRSDRLYREAWDKDKTQIHIMPDTPDIVLAKANLINTSDKLYRMGYEELKRKGYDLPVDAIPIKAAKASREIASEYKYKEGFRKQLGHHIGARNIEDDPKMMWSMHVAKIQSDREYKKDFEKWKTKFSSPVDMLGVVLAKKCQTLVSDVDYKNYLHQWTCLPDQSDVIHARQAYDLQSDNLYKSDLQWLKGIGWMTSGSLEDEKNKRATQILSDHVYRQHPDQFKFSSLMDSIPMVLAKNNAITMNHRLYTEAWDKDKTTVHIMPDTPEVLLAKQNKVNYSEKLYKLGLEEAKRKGYDMRVDAIPIKAAKASRDIASEFKYKEGYRKQLGHHIGARAIRDDPKMMWSMHVAKIQSDREYKKDFEKWKTKFSSPVDMLGVVLAKKCQTLVSDVDYKNYLHQWTCLPDQSDVIHARQAYDLQSDNMYKSDLQWMRGIGWVSIGSLDVEKCKRATEILSDKIYRQPPDRFKFTSVTDSLEQVLAKNNAITMNKRLYTEAWDKDKTQIHIMPDTPEIMLARMNKINYSESLYKLANEEAKKKGYDLRSDAIPIVAAKASRDIISDYKYKDGYCKQLGHHIGARNIEDDPKMMWSMHVAKIQSDREYKKDFEKWKTKFSSPVDMLGVVLAKKCQTLVSDVDYKNYLHEWTCLPDQSDVIHARQAYDLQSDNIYKSDLQWLRGIGWVPIGSMDVVKCKRATEILSDNIYRQPPDKLKFTSVTDSLEQVLAKNNALNMNKRLYTEAWDKDKTQIHIMPDTPEIMLARQNKINYSETLYKLANEEAKKKGYDLRSDAIPIVAAKASRDVISDYKYKDGYRKQLGHHIGARNIEDDPKMMWSMHVAKIQSDREYKKDFEKWKTKFSSPVDMLGVVLAKKCQTLVSDVDYKNYLHEWTCLPDQNDVIHARQAYDLQSDNIYKSDLQWLRGIGWVPIGSMDVVKCKRAAEILSDNIYRQPPDKLKFTSVTDSLEQVLAKNNALNMNKRLYTEAWDKDKTQVHIMPDTPEIMLARQNKINYSESLYRQAMEEAKKEGYDLRSDAIPIVAAKASRDIASDYKYKEAYRKQLGHHIGARAVHDDPKIMWSLHIAKVQSDREYKKDFEKYKTRYSSPVDMLGIVLAKKCQTLVSDVDYKHPLHEWICLPDQNDIIHARKAYDLQSDNLYKSDLEWMKGIGWVPIDSLEVVRAKRAGELLSDTIYRQRPETLKFTSITDTPEQVLAKNNALNMNKRLYTEAWDNDKKTIHVMPDTPEIMLAKLNRINYSDKLYKLALEESKKEGYDLRLDAIPIQAAKASRDIASDYKYKEGYRKQLGHHIGARNIKDDPKMMWSIHVAKIQSDREYKKEFEKWKTKFSSPVDMLGVVLAKKCQILVSDIDYKHPLHEWTCLPDQNDVIQARKAYDLQSDAIYKSDLEWLRGIGWVPIGSVEVEKVKRAGEILSDRKYRQPADQLKFTCITDTPEIVLAKNNALTMSKHLYTEAWDADKTSIHVMPDTPDILLAKSNSANISQKLYTKGWDESKMKDYDLRADAISIKSAKASRDIASDYKYKEAYEKQKGHHIGAQSIEDDPKIMCAIHAGKIQSEREYKKEFQKWKTKFSSPVDMLSILLAKKCQTLVTDIDYRNYLHEWTCMPDQNDIIQAKKAYDLQSDSVYKADLEWLRGIGWMPEGSVEMNRVKVAQDLVNERLYRTRPEALSFTSIVDTPEVVLAKANSLQISEKLYQEAWNKDKSNITIPSDTPEMLQAHINALQISNKLYQKDWNDAKQKGYDIRADAIEIKHAKASREIASEYKYKEGYRKQLGHHMGFRTLQDDPKSVWAIHAAKIQSDREYKKAYEKSKGIHNTPLDMMSIVQAKKCQVLVSDIDYRNYLHQWTCLPDQNDVIQAKKAYDLQSDNLYKSDLEWLKGIGWLPEGSVEVMRVKNAQNLLNERLYRIKPEALKFTSIVDTPEVIQAKINAVQISEPLYRDAWEKEKANVNVPADTPLMLQSKINALQISNKRYQQAWEDVKMTGYDLRADAIGIQHAKASRDIASDYLYKTAYEKQKGHYIGCRSAKEDPKLVWAANVLKMQNDRLYKKAYNDHKAKISIPVDMVSISAAKEGQALASDVDYRHYLHHWSCFPDQNDVIQARKAYDLQSDSVYKADLEWLRGIGWMPEGSVEMNRVKVAQDLVNERLYRTRPEALSFTSIVDTPEVVLAKANSLQISEKLYQEAWNKDKSNITIPSDTPEMLQAHINALQISNKLYQKDWNDTKQKGYDIRADAIEIKHAKASREIASEYKYKEGYRKQLGHHMGFRTLQDDPKSVWAIHAAKIQSDREYKKAYEKSKGIHNTPLDMMSIVQAKKCQVLVSDIDYRNYLHQWTCLPDQNDVIQAKKAYDLQSDNLYKSDLEWLKGIGWLPEGSVEVMRVKNAQNLLNERLYRIKPEALKFTSIVDTPEVIQAKINAVQISEPLYRNAWEKEKANVNVPADTPLMLQSKINALQISNKRYQQAWEDVKMTGYDLRADAIGIQHAKASRDIASDYLYKTAYEKQKGHYIGCRSAKEDPKLVWAANVLKMQNDRLYKKAYNDHKAKISIPVDMVSISAAKEGQALASDVDYRHYLHHWSCFPDQNDVIQARKAYDLQSDSVYKADLEWLRGIGWMPEGSVEMNRVKVAQDLVNERLYRTRPEALSFTSIVDTPEVVLAKANSLQISEKLYQEAWNKDKSNITIPSDTPEMLQAHINALQISNKLYQKDWNDTKQKGYDIRADAIEIKHAKASREIASEYKYKEGYRKQLGHHMGFRTLQDDPKSVWAIHAAKIQSDREYKKAYEKSKGIHNTPLDMMSIVQAKKCQVLVSDIDYRNYLHQWTCLPDQNDVIQAKKAYDLQSDNLYKSDLEWLKGIGWLPEGSVEVMRVKNAQNLLNERLYRIKPEALKFTSIVDTPEVIQAKINAVQISEPLYRDAWEKEKANVNVPADTPLMLQSKINALQISNKRYQQAWEDVKMTGYDLRADAIGIQHAKASRDIASDYLYKTAYEKQKGHYIGCRSAKEDPKLVWAANVLKMQNDRLYKKAYNDHKAKISIPVDMVSISAAKEGQALASDVDYRHYLHRWSCFPDQNDVIQARKAYDLQSDALYKADLEWLRGIGWMPQGSPEVLRVKNAQNIFCDSVYRTPVVNLKYTSIVDTPEVVLAKSNAENISIPKYREVWDKDKTSIHIMPDTPEINLARANALNVSNKLYREGWDEMKAGCDVRLDAIPIQAAKASREIASDYKYKLDHEKQKGHYVGTLTARDDNKIRWALIADKLQNEREYRLDWAKWKAKIQSPVDMLSILHSKNSQALVSDMDYRNYLHQWTCMPDQNDVIQAKKAYELQSDNVYKADLEWLRGIGWMPNDSVSVNHAKHAADIFSEKKYRTKIETLNFTPVDDRVDYVTAKQSGEILDDIKYRKDWNATKSKYTLTETPLLHTAQEAARILDQYLYKEGWERQKATGYILPPDAVPFVHAHHCNDVQSELKYKAEHVKQKGHYVGVPTMRDDPKLVWFEHAGQIQNERLYKEDYHKTKAKINIPADMVSVLAAKQGQTLVSDIDYRNYLHQWMCHPDQNDVIQARKAYDLQSDNVYRADLEWLRGIGWIPLDSVDHVRVTKNQEMMSQIKYKKNALENYPNFRSVVDPPEIVLAKINSVNQSDVKYKETFNKAKGKYTFSPDTPHISHSKDMGKLYSTILYKGAWEGTKAYGYTLDERYIPIVGAKHADLVNSELKYKETYEKQKGHYLAGKVIGEFPGVVHCLDFQKMRSALNYRKHYEDTKANVHIPNDMMNHVLAKRCQYILSDLEYRHYFHQWTSLLEEPNVIRVRNAQEILSDNVYKDDLNWLKGIGCYVWDTPQILHAKKSYDLQSQLQYTAAGKENLQNYNLVTDTPLYVTAVQSGINASEVKYKENYHQIKDKYTTVLETVDYDRTRNLKNLYSSNLYKEAWDRVKATSYILPSSTLSLTHAKNQKHLASHIKYREEYEKFKALYTLPRSVDDDPNTARCLRVGKLNIDRLYRSVYEKNKMKIHIVPDMVEMVTAKDSQKKVSEIDYRLRLHEWICHPDLQVNDHVRKVTDQISDIVYKDDLNWLKGIGCYVWDTPEILHAKHAYDLRDDIKYKAHMLKTRNDYKLVTDTPVYVQAVKSGKQLSDAVYHYDYVHSVRGKVAPTTKTVDLDRALHAYKLQSSNLYKTSLRTLPTGYRLPGDTPHFKHIKDTRYMSSYFKYKEAYEHTKAYGYTLGPKDVPFVHVRRVNNVTSERLYRELYHKLKDKIHTTPDTPEIRQVKKTQEAVSELIYKSDFFKMQGHMISLPYTPQVIHCRYVGDITSDIKYKEDLQVLKGFGCFLYDTPDMVRSRHLRKLWSNYLYTDKARKMRDKYKVVLDTPEYRKVQELKTHLSELVYRAAGKKQKSIFTSVPDTPDLLRAKRGQKLQSQYLYVELATKERPHHHAGNQTTALKHAKDVKDMVSEKKYKIQYEKMKDKYTPVPDTPILIRAKRAYWNASDLRYKETFQKTKGKYHTVKDALDIVYHRKVTDDISKIKYKENYMSQLGIWRSIPDRPEHFHHRAVTDTVSDVKYKEDLTWLKGIGCYAYDTPDFTLAEKNKTLYSKYKYKEVFERTKSDFKYVADSPINRHFKYATQLMNEKKYRADYEQRKDKYHLVVDEPRHLLAKTAGDQISQIKYRKNYEKSKDKFTSIVDTPEHLRTTKVNKQISDILYKLEYNKAKPRGYTTIHDTPMLLHVRKVKDEVSDLKYKEVYQRNKSNCTIEPDAVHIKAAKDAYKVNTNLDYKKQYEANKAHWKWTPDRPDFLQAAKSSLQQSDFEYKLDREFLKGCKLSVTDDKNTVLALRNTLIESDLKYKEKHVKERGTCHAVPDTPQILLAKTVSNLVSENKYKDHVKKHLAQGSYTTLPETRDTVHVKEVTKHVSDTNYKKKFVKEKGKSNYSIMLEPPEVKHAMEVAKKQSDVAYRKDAKENLHYTTVADRPDIKKATQAAKQASEVEYRAKHRKEGSHGLSMLGRPDIEMAKKAAKLSSQVKYRENFDKEKGKTPKYNPKDSQLYKVMKDANNLASEVKYKADLKKLHKPVTDMKESLIMNHVLNTSQLASSYQYKKKYEKSKGHYHTIPDNLEQLHLKEATELQSIVKYKEKYEKERGKPMLDFETPTYITAKESQQMQSGKEYRKDYEESIKGRNLTGLEVTPALLHVKYATKIASEKEYRKDLEESIRGKGLTEMEDTPDMLRAKNATQILNEKEYKRDLELEVKGRGLNAMANETPDFMRARNATDIASQIKYKQSAEMEKANFTSVVDTPEIIHAQQVKNLSSQKKYKEDAEKSMSYYETVLDTPEIQRVRENQKNFSLLQYQCDLKNSKGKITVVQDTPEILRVKENQKNFSSVLYKEDVSPGTAIGKTPEMMRVKQTQDHISSVKYKEAIGQGTPIPDLPEVKRVKETQKHISSVMYKENLGTGIPTTVTPEIERVKRNQENFSSVLYKENLGKGIPTPITPEMERVKRNQENFSSILYKENLSKGTPLPVTPEMERVKLNQENFSSVLYKENVGKGIPIPITPEMERVKHNQENFSSVLYKENLGTGIPIPITPEMQRVKHNQENLSSVLYKENMGKGTPLPVTPEMERVKHNQENISSVLYKENMGKGTPLPVTPEMERVKHNQENISSVLYKENMGKGTPLAVTPEMERVKHNQENISSVLYKENVGKATATPVTPEMQRVKRNQENISSVLYKENLGKATPTPFTPEMERVKRNQENFSSVLYKENMRKATPTPVTPEMERAKRNQENISSVLYSDSFRKQIQGKAAYVLDTPEMRRVRETQRHISTVKYHEDFEKHKGCFTPVVTDPITERVKKNMQDFSDINYRGIQRKVVEMEQKRNDQDQETITGLRVWRTNPGSVFDYDPAEDNIQSRSLHMINVQAQRRSREQSRSASALSISGGEEKSEHSEAPDHHLSTYSDGGVFAVSTAYKHAKTTELPQQRSSSVATQQTTVSSIPSHPSTAGKIFRAMYDYMAADADEVSFKDGDAIINVQAIDEGWMYGTVQRTGRTGMLPANYVEAI

SEQ ID NO: 55688 - protein, 8525 aa, Homo sapiens; identical to SEQ ID NO: 55680
  Payload ID: 10961
  Gene Symbol: NEB
  Gene Name: nebulin
  Uniprot ID: P20929
  ENSP ID: ENSP00000473894

SEQ ID NO: 55689 - protein, 8525 aa, Homo sapiens; identical to SEQ ID NO: 55687
  Payload ID: 10961
  Gene Symbol: NEB
  Gene Name: nebulin
  Uniprot ID: P20929
  ENSP ID: ENSP00000474498

SEQ ID NO: 55690 - protein, 8560 aa, Homo sapiens
  Payload ID: 10961
  Gene Symbol: NEB
  Gene Name: nebulin
  ENSP ID: ENSP00000484342
MADDEDYEEVVEYYTEEVVYEEVPGETITKIYETTTTRTSDYEQSETSKPALAQPALAQPASAKPVERRKVIRKKVDPSKFMTPYIAHSQKMQDLFSPNKYKEKFEKTKGQPYASTTDTPELRRIKKVQDQLSEVKYRMDGDVAKTICHVDEKAKDIEHAKKVSQQVSKVLYKQNWEDTKDKYLLPPDAPELVQAVKNTAMFSKKLYTEDWEADKSLFYPYNDSPELRRVAQAQKALSDVAYKKGLAEQQAQFTPLADPPDIEFAKKVTNQVSKQKYKEDYENKIKGKWSETPCFEVANARMNADNISTRKYQEDFENMKDQIYFMQTETPEYKMNKKAGVAASKVKYKEDYEKNKGKADYNVLPASENPQLRQLKAAGDALSDKLYKENYEKTKAKSINYCETPKFKLDTVLQNFSSDKKYKDSYLKDILGHYVGSFEDPYHSHCMKVTAQNSDKNYKAEYEEDRGKGFFPQTITQEYEAIKKLDQCKDHTYKVHPDKTKFTQVTDSPVLLQAQVNSKQLSDLNYKAKHESEKFKCHIPPDTPAFIQHKVNAYNLSDNLYKQDWEKSKAKKFDIKVDAIPLLAAKANTKNTSDVMYKKDYEKNKGKMIGVLSINDDPKMLHSLKVAKNQSDRLYKENYEKTKAKSMNYCETPKYQLDTQLKNFSEARYKDLYVKDVLGHYVGSMEDPYHTHCMKVAAQNSDKSYKAEYEEDKGKCYFPQTITQEYEAIKKLDQCKDHTYKVHPDKTKFTAVTDSPVLLQAQLNTKQLSDLNYKAKHEGEKFKCHIPADAPQFIQHRVNAYNLSDNVYKQDWEKSKAKKFDIKVDAIPLLAAKANTKNTSDVMYKKDYEKSKGKMIGALSINDDPKMLHSLKTAKNQSDREYRKDYEKSKTIYTAPLDMLQVTQAKKSQAIASDVDYKHILHSYSYPPDSINVDLAKKAYALQSDVEYKADYNSWMKGCGWVPFGSLEMEKAKRASDILNEKKYRQHPDTLKFTSIEDAPITVQSKINQAQRSDIAYKAKGEEIIHKYNLPPDLPQFIQAKVNAYNISENMYKADLKDLSKKGYDLRTDAIPIRAAKAARQAASDVQYKKDYEKAKGKMVGFQSLQDDPKLVHYMNVAKIQSDREYKKDYEKTKSKYNTPHDMFNVVAAKKAQDVVSNVNYKHSLHHYTYLPDAMDLELSKNMMQIQSDNVYKEDYNNWMKGIGWIPIGSLDVEKVKKAGDALNEKKYRQHPDTLKFTSIVDSPVMVQAKQNTKQVSDILYKAKGEDVKHKYTMSPDLPQFLQAKCNAYNISDVCYKRDWYDLIAKGNNVLGDAIPITAAKASRNIASDYKYKEAYEKSKGKHVGFRSLQDDPKLVHYMNVAKLQSDREYKKNYENTKTSYHTPGDMVSITAAKMAQDVATNVNYKQPLHHYTYLPDAMSLEHTRNVNQIQSDNVYKDEYNSFLKGIGWIPIGSLEVEKVKKAGDALNERKYRQHPDTVKFTSVPDSMGMVLAQHNTKQLSDLNYKVEGEKLKHKYTIDPELPQFIQAKVNALNMSDAHYKADWKKTIAKGYDLRPDAIPIVAAKSSRNIASDCKYKEAYEKAKGKQVGFLSLQDDPKLVHYMNVAKIQSDREYKKGYEASKTKYHTPLDMVSVTAAKKSQEVATNANYRQSYHHYTLLPDALNVEHSRNAMQIQSDNLYKSDFTNWMKGIGWVPIESLEVEKAKKAGEILSEKKYRQHPEKLKFTYAMDTMEQALNKSNKLNMDKRLYTEKWNKDKTTIHVMPDTPDILLSRVNQITMSDKLYKAGWEEEKKKGYDLRPDAIAIKAARASRDIASDYKYKKAYEQAKGKHIGFRSLEDDPKLVHFMQVAKMQSDREYKKGYEKSKTSFHTPVDMLSVVAAKKSQEVATNANYRNVIHTYNMLPDAMSFELAKNMMQIQSDNQYKADYADFMKGIGWLPLGSLEAEKNKKAMEIISEKKYRQHPDTLKYSTLMDSMNMVLAQNNAKIMNEHLYKQAWEADKTKVHIMPDIPQIILAKANAINMSDKLYKLSLEESKKKGYDLRPDAIPIKAAKASRDIASDYKYKYNYEKGKGKMVGFRSLEDDPKLVHSMQVAKMQSDREYKKNYENTKTSYHTPADMLSVTAAKDAQANITNTNYKHLIHKYILLPDAMNIELTRNMNRIQSDNEYKQDYNEWYKGLGWSPAGSLEVEKAKKATEYASDQKYRQHPSNFQFKKLTDSMDMVLAKQNAHTMNKHLYTIDWNKDKTKIHVMPDTPDILQAKQNQTLYSQKLYKLGWEEALKKGYDLPVDAISVQLAKASRDIASDYKYKQGYRKQLGHHVGFRSLQDDPKLVLSMNVAKMQSEREYKKDFEKWKTKFSSPVDMLGVVLAKKCQELVSDVDYKNYLHQWTCLPDQNDVVQAKKVYELQSENLYKSDLEWLRGIGWSPLGSLEAEKNKRASEIISEKKYRQPPDRNKFTSIPDAMDIVLAKTNAKNRSDRLYREAWDKDKTQIHIMPDTPDIVLAKANLINTSDKLYRMGYEELKRKGYDLPVDAIPIKAAKASREIASEYKYKEGFRKQLGHHIGARNIEDDPKMMWSMHVAKIQSDREYKKDFEKWKTKFSSPVDMLGVVLAKKCQTLVSDVDYKNYLHQWTCLPDQSDVIHARQAYDLQSDNLYKSDLQWLKGIGWMTSGSLEDEKNKRATQILSDHVYRQHPDQFKFSSLMDSIPMVLAKNNAITMNHRLYTEAWDKDKTTVHIMPDTPEVLLAKQNKVNYSEKLYKLGLEEAKRKGYDMRVDAIPIKAAKASRDIASEFKYKEGYRKQLGHHIGARAIRDDPKMMWSMHVAKIQSDREYKKDFEKWKTKFSSPVDMLGVVLAKKCQTLVSDVDYKNYLHQWTCLPDQSDVIHARQAYDLQSDNMYKSDLQWMRGIGWVSIGSLDVEKCKRATEILSDKIYRQPPDRFKFTSVTDSLEQVLAKNNAITMNKRLYTEAWDKDKTQIHIMPDTPEIMLARMNKINYSESLYKLANEEAKKKGYDLRSDAIPIVAAKASRDIISDYKYKDGYCKQLGHHIGARNIEDDPKMMWSMHVAKIQSDREYKKDFEKWKTKFSSPVDMLGVVLAKKCQTLVSDVDYKNYLHEWTCLPDQSDVIHARQAYDLQSDNIYKSDLQWLRGIGWVPIGSMDVVKCKRATEILSDNIYRQPPDKLKFTSVTDSLEQVLAKNNALNMNKRLYTEAWDKDKTQIHIMPDTPEIMLARQNKINYSETLYKLANEEAKKKGYDLRSDAIPIVAAKASRDVISDYKYKDGYRKQLGHHIGARNIEDDPKMMWSMHVAKIQSDREYKKDFEKWKTKFSSPVDMLGVVLAKKCQTLVSDVDYKNYLHEWTCLPDQNDVIHARQAYDLQSDNIYKSDLQWLRGIGWVPIGSMDVVKCKRAAEILSDNIYRQPPDKLKFTSVTDSLEQVLAKNNALNMNKRLYTEAWDKDKTQVHIMPDTPEIMLARQNKINYSESLYRQAMEEAKKEGYDLRSDAIPIVAAKASRDIASDYKYKEAYRKQLGHHIGARAVHDDPKIMWSLHIAKVQSDREYKKDFEKYKTRYSSPVDMLGIVLAKKCQTLVSDVDYKHPLHEWICLPDQNDIIHARKAYDLQSDNLYKSDLEWMKGIGWVPIDSLEVVRAKRAGELLSDTIYRQRPETLKFTSITDTPEQVLAKNNALNMNKRLYTEAWDNDKKTIHVMPDTPEIMLAKLNRINYSDKLYKLALEESKKEGYDLRLDAIPIQAAKASRDIASDYKYKEGYRKQLGHHIGARNIKDDPKMMWSIHVAKIQSDREYKKEFEKWKTKFSSPVDMLGVVLAKKCQILVSDIDYKHPLHEWTCLPDQNDVIQARKAYDLQSDAIYKSDLEWLRGIGWVPIGSVEVEKVKRAGEILSDRKYRQPADQLKFTCITDTPEIVLAKNNALTMSKHLYTEAWDADKTSIHVMPDTPDILLAKSNSANISQKLYTKGWDESKMKDYDLRADAISIKSAKASRDIASDYKYKEAYEKQKGHHIGAQSIEDDPKIMCAIHAGKIQSEREYKKEFQKWKTKFSSPVDMLSILLAKKCQTLVTDIDYRNYLHEWTCMPDQNDIIQAKKAYDLQSDSVYKADLEWLRGIGWMPEGSVEMNRVKVAQDLVNERLYRTRPEALSFTSIVDTPEVVLAKANSLQISEKLYQEAWNKDKSNITIPSDTPEMLQAHINALQISNKLYQKDWNDAKQKGYDIRADAIEIKHAKASREIASEYKYKEGYRKQLGHHMGFRTLQDDPKSVWAIHAAKIQSDREYKKAYEKSKGIHNTPLDMMSIVQAKKCQVLVSDIDYRNYLHQWTCLPDQNDVIQAKKAYDLQSDNLYKSDLEWLKGIGWLPEGSVEVMRVKNAQNLLNERLYRIKPEALKFTSIVDTPEVIQAKINAVQISEPLYRDAWEKEKANVNVPADTPLMLQSKINALQISNKRYQQAWEDVKMTGYDLRADAIGIQHAKASRDIASDYLYKTAYEKQKGHYIGCRSAKEDPKLVWAANVLKMQNDRLYKKAYNDHKAKISIPVDMVSISAAKEGQALASDVDYRHYLHHWSCFPDQNDVIQARKAYDLQSDSVYKADLEWLRGIGWMPEGSVEMNRVKVAQDLVNERLYRTRPEALSFTSIVDTPEVVLAKANSLQISEKLYQEAWNKDKSNITIPSDTPEMLQAHINALQISNKLYQKDWNDTKQKGYDIRADAIEIKHAKASREIASEYKYKEGYRKQLGHHMGFRTLQDDPKSVWAIHAAKIQSDREYKKAYEKSKGIHNTPLDMMSIVQAKKCQVLVSDIDYRNYLHQWTCLPDQNDVIQAKKAYDLQSDNLYKSDLEWLKGIGWLPEGSVEVMRVKNAQNLLNERLYRIKPEALKFTSIVDTPEVIQAKINAVQISEPLYRNAWEKEKANVNVPADTPLMLQSKINALQISNKRYQQAWEDVKMTGYDLRADAIGIQHAKASRDIASDYLYKTAYEKQKGHYIGCRSAKEDPKLVWAANVLKMQNDRLYKKAYNDHKAKISIPVDMVSISAAKEGQALASDVDYRHYLHHWSCFPDQNDVIQARKAYDLQSDSVYKADLEWLRGIGWMPEGSVEMNRVKVAQDLVNERLYRTRPEALSFTSIVDTPEVVLAKANSLQISEKLYQEAWNKDKSNITIPSDTPEMLQAHINALQISNKLYQKDWNDTKQKGYDIRADAIEIKHAKASREIASEYKYKEGYRKQLGHHMGFRTLQDDPKSVWAIHAAKIQSDREYKKAYEKSKGIHNTPLDMMSIVQAKKCQVLVSDIDYRNYLHQWTCLPDQNDVIQAKKAYDLQSDNLYKSDLEWLKGIGWLPEGSVEVMRVKNAQNLLNERLYRIKPEALKFTSIVDTPEVIQAKINAVQISEPLYRDAWEKEKANVNVPADTPLMLQSKINALQISNKRYQQAWEDVKMTGYDLRADAIGIQHAKASRDIASDYLYKTAYEKQKGHYIGCRSAKEDPKLVWAANVLKMQNDRLYKKAYNDHKAKISIPVDMVSISAAKEGQALASDVDYRHYLHRWSCFPDQNDVIQARKAYDLQSDALYKADLEWLRGIGWMPQGSPEVLRVKNAQNIFCDSVYRTPVVNLKYTSIVDTPEVVLAKSNAENISIPKYREVWDKDKTSIHIMPDTPEINLARANALNVSNKLYREGWDEMKAGCDVRLDAIPIQAAKASREIASDYKYKLDHEKQKGHYVGTLTARDDNKIRWALIADKLQNEREYRLDWAKWKAKIQSPVDMLSILHSKNSQALVSDMDYRNYLHQWTCMPDQNDVIQAKKAYELQSDNVYKADLEWLRGIGWMPNDSVSVNHAKHAADIFSEKKYRTKIETLNFTPVDDRVDYVTAKQSGEILDDIKYRKDWNATKSKYTLTETPLLHTAQEAARILDQYLYKEGWERQKATGYILPPDAVPFVHAHHCNDVQSELKYKAEHVKQKGHYVGVPTMRDDPKLVWFEHAGQIQNERLYKEDYHKTKAKINIPADMVSVLAAKQGQTLVSDIDYRNYLHQWMCHPDQNDVIQARKAYDLQSDNVYRADLEWLRGIGWIPLDSVDHVRVTKNQEMMSQIKYKKNALENYPNFRSVVDPPEIVLAKINSVNQSDVKYKETFNKAKGKYTFSPDTPHISHSKDMGKLYSTILYKGAWEGTKAYGYTLDERYIPIVGAKHADLVNSELKYKETYEKQKGHYLAGKVIGEFPGVVHCLDFQKMRSALNYRKHYEDTKANVHIPNDMMNHVLAKRCQYILSDLEYRHYFHQWTSLLEEPNVIRVRNAQEILSDNVYKDDLNWLKGIGCYVWDTPQILHAKKSYDLQSQLQYTAAGKENLQNYNLVTDTPLYVTAVQSGINASEVKYKENYHQIKDKYTTVLETVDYDRTRNLKNLYSSNLYKEAWDRVKATSYILPSSTLSLTHAKNQKHLASHIKYREEYEKFKALYTLPRSVDDDPNTARCLRVGKLNIDRLYRSVYEKNKMKIHIVPDMVEMVTAKDSQKKVSEIDYRLRLHEWICHPDLQVNDHVRKVTDQISDIVYKDDLNWLKGIGCYVWDTPEILHAKHAYDLRDDIKYKAHMLKTRNDYKLVTDTPVYVQAVKSGKQLSDAVYHYDYVHSVRGKVAPTTKTVDLDRALHAYKLQSSNLYKTSLRTLPTGYRLPGDTPHFKHIKDTRYMSSYFKYKEAYEHTKAYGYTLGPKDVPFVHVRRVNNVTSERLYRELYHKLKDKIHTTPDTPEIRQVKKTQEAVSELIYKSDFFKMQGHMISLPYTPQVIHCRYVGDITSDIKYKEDLQVLKGFGCFLYDTPDMVRSRHLRKLWSNYLYTDKARKMRDKYKVVLDTPEYRKVQELKTHLSELVYRAAGKKQKSIFTSVPDTPDLLRAKRGQKLQSQYLYVELATKERPHHHAGNQTTALKHAKDVKDMVSEKKYKIQYEKMKDKYTPVPDTPILIRAKRAYWNASDLRYKETFQKTKGKYHTVKDALDIVYHRKVTDDISKIKYKENYMSQLGIWRSIPDRPEHFHHRAVTDTVSDVKYKEDLTWLKGIGCYAYDTPDFTLAEKNKTLYSKYKYKEVFERTKSDFKYVADSPINRHFKYATQLMNEKKYRADYEQRKDKYHLVVDEPRHLLAKTAGDQISQRKYKSSAKMFLQHGCNEILRPDMLTALYNSHMWSQIKYRKNYEKSKDKFTSIVDTPEHLRTTKVNKQISDILYKLEYNKAKPRGYTTIHDTPMLLHVRKVKDEVSDLKYKEVYQRNKSNCTIEPDAVHIKAAKDAYKVNTNLDYKKQYEANKAHWKWTPDRPDFLQAAKSSLQQSDFEYKLDREFLKGCKLSVTDDKNTVLALRNTLIESDLKYKEKHVKERGTCHAVPDTPQILLAKTVSNLVSENKYKDHVKKHLAQGSYTTLPETRDTVHVKEVTKHVSDTNYKKKFVKEKGKSNYSIMLEPPEVKHAMEVAKKQSDVAYRKDAKENLHYTTVADRPDIKKATQAAKQASEVEYRAKHRKEGSHGLSMLGRPDIEMAKKAAKLSSQVKYRENFDKEKGKTPKYNPKDSQLYKVMKDANNLASEVKYKADLKKLHKPVTDMKESLIMNHVLNTSQLASSYQYKKKYEKSKGHYHTIPDNLEQLHLKEATELQSIVKYKEKYEKERGKPMLDFETPTYITAKESQQMQSGKEYRKDYEESIKGRNLTGLEVTPALLHVKYATKIASEKEYRKDLEESIRGKGLTEMEDTPDMLRAKNATQILNEKEYKRDLELEVKGRGLNAMANETPDFMRARNATDIASQIKYKQSAEMEKANFTSVVDTPEIIHAQQVKNLSSQKKYKEDAEKSMSYYETVLDTPEIQRVRENQKNFSLLQYQCDLKNSKGKITVVQDTPEILRVKENQKNFSSVLYKEDVSPGTAIGKTPEMMRVKQTQDHISSVKYKEAIGQGTPIPDLPEVKRVKETQKHISSVMYKENLGTGIPTTVTPEIERVKRNQENFSSVLYKENLGKGIPTPITPEMERVKRNQENFSSILYKENLSKGTPLPVTPEMERVKLNQENFSSVLYKENVGKGIPIPITPEMERVKHNQENFSSVLYKENLGTGIPIPITPEMQRVKHNQENLSSVLYKENMGKGTPLPVTPEMERVKHNQENISSVLYKENMGKGTPLPVTPEMERVKHNQENISSVLYKENMGKGTPLAVTPEMERVKHNQENISSVLYKENVGKATATPVTPEMQRVKRNQENISSVLYKENLGKATPTPFTPEMERVKRNQENFSSVLYKENMRKATPTPVTPEMERAKRNQENISSVLYSDSFRKQIQGKAAYVLDTPEMRRVRETQRHISTVKYHEDFEKHKGCFTPVVTDPITERVKKNMQDFSDINYRGIQRKVVEMEQKRNDQDQETITGLRVWRTNPGSVFDYDPAEDNIQSRSLHMINVQAQRRSREQSRSASALSISGGEEKSEHSEAPDHHLSTYSDGGVFAVSTAYKHAKTTELPQQRSSSVATQQTTVSSIPSHPSTAGKIFRAMYDYMAADADEVSFKDGDAIINVQAIDEGWMYGTVQRTGRTGMLPANYVEAI

SEQ ID NO: 55691 - protein, 1730 aa, Homo sapiens
  Payload ID: 10962
  Gene Symbol: NRAP
  Gene Name: nebulin-related anchoring protein
  Uniprot ID: Q86VF7
  ENSP ID: ENSP00000353078
MNVQPCSRCGYGVYPAEKISCIDQIWHKACFHCEVCKMMLSVNNFVSHQKKPYCHAHNPKNNTFTSVYHTPLNLNVRTFPEAISGIHDQEDGEQCKSVFHWDMKSKDKEGAPNRQPLANERAYWTGYGEGNAWCPGALPDPEIVRMVEARKSLGEEYTEDYEQPRGKGSFPAMITPAYQRAKKANQLASQVEYKRGHDERISRFSTVVDTPELLRSKAGAQLQSDVRYTEDYEQQRGKGSFPAMITPAYQIAKRANELASDVRYHQQYQKEMRGMAGPAIGAEGILTRECADQYGQGYPEEYEEHRGKGSFPAMITPAYQNAKKAHELASDIKYRQDFNKMKGAAHYHSLPAQDNLVLKQAQSVNKLVSEVEYKKDLESSRGHSINYCETPQFRNVSKISKFTSDNKYKENYQNHMRGRYEGVGMDRRTLHAMKVGSLASNVAYKADYKHDIVDYNYPATLTPSYQTAMKLVPLKDANYRQSIDKLKYSSVTDTPQIVQAKINAQQLSHVNYRADYEKNKLNYTLPQDVPQLVKAKTNAKLFSEVKYKEGWEKTKGKGFEMKLDAMSLLAAKASGELASNIKYKEEYEKTKGKAMGTADSRLLHSLQIAKMSSEVEYKKGFEESKTRFHLPMDMVNIRHAKKAQTLASDLDYRKKLHEYTVLPEDMKTQWAKKAYGLQSELQYKADLAWMKGVGWLTEGSLNLEQAKKAGQLVSEKNYRQRVDELKFTSVTDSSQMEHAKKSQELQSGVAYKAGNEQSVHQYTISKDEPLFLQARANAANLSEKLYKSSWENQKAKGFELRLDSLTFLAAKAKRDLASEVKYKEDYERSRGKLIGAKDVQGDSQMSHSLQMSKLQSELEYKKGFEDTKSQCHVSLDMVHLVHARKAQHLATDVGYKTAEHHFTALPTDMKVEWAKKAYGLQSDNQYRADVKWMKGMGWVATGSLNVEQAKKAGELISEKKYRQHPDALKFTSIKDTPEMVQARISYTQAVDRLYREQGENIKHHYTPTADLPEVLLAKLNAMNISETRYKESWSKLRDGGYKLRLDALPFQAAKASGEIISDYKYKEAFEKMKGQMLGSRSLEDDISLAHSVYATSLQSDVNYKKGFEHSKAQFHLPLDMAALVHAKKAQTLASNQDYKHPLPQYTSLAEDLRLSCAKKAHKLQSENLYRSDLNFMRGVACVIPGTLEIEGRKKASELISESKYRQHPHSFKYTAVTDTPNLLHAKFSNQITNERLYKAAGEDARHEYTMTLGLPEFIRAKTNAANLSDARYKESWRNLRAQGYKLTIEALPFQAARASGDIASDFLYRHDFVKERGKLIGPQSVRDDPRIQHCRRMGQLQSELQYRRGATSSQAQFHLPMDMVHLVHAKNAQALASDHDYRTQYHKFTALPEDLKMAWAKKAHALQSELRYKSDLIGMKGIGWLALRSPQMESAKKAGELISETKYRKKPDSIKFTTVVDSPDLVHAKNSYMHCNERMYRSGDAESLHRYTLIPDHPDFTRARLNALHLSDKVYRNSWEQTRAGSYDFRLDAIPFQTARASREIASDFRYKEAFLRDRGLQIGYRSVDDDPRMKHFLNVGRLQSDNEYKKDFAKSRSQFHSSTDQPGLLQAKRSQQLASDVHYRQPLPQPTCDPEQLGLRHAQKAHQLQSDVKYKSDLNLTRGVGWTPPGSYKVEMARRAAELANARGLGLQGAYRGAEAVEAGDHQSGEVNPDATEILHVKKKKALLL

SEQ ID NO: 55692 - protein, 1695 aa, Homo sapiens
  Payload ID: 10962
  Gene Symbol: NRAP
  Gene Name: nebulin-related anchoring protein
  Uniprot ID: Q86VF7
  ENSP ID: ENSP00000353666
MNVQPCSRCGYGVYPAEKISCIDQIWHKACFHCEVCKMMLSVNNFVSHQKKPYCHAHNPKNNTFTSVYHTPLNLNVRTFPEAISGIHDQEDGEQCKSVFHWDMKSKDKEGAPNRQPLANERAYWTGYGEGNAWCPGALPDPEIVRMVEARKSLGEEYTEDYEQPRGKGSFPAMITPAYQRAKKANQLASQVEYKRGHDERISRFSTVVDTPELLRSKAGAQLQSDVRYTEDYEQQRGKGSFPAMITPAYQIAKRANELASDVRYHQQYQKEMRGMAGPAIGAEGILTRECADQYGQGYPEEYEEHRGKGSFPAMITPAYQNAKKAHELASDIKYRQDFNKMKGAAHYHSLPAQDNLVLKQAQSVNKLVSENKYKENYQNHMRGRYEGVGMDRRTLHAMKVGSLASNVAYKADYKHDIVDYNYPATLTPSYQTAMKLVPLKDANYRQSIDKLKYSSVTDTPQIVQAKINAQQLSHVNYRADYEKNKLNYTLPQDVPQLVKAKTNAKLFSEVKYKEGWEKTKGKGFEMKLDAMSLLAAKASGELASNIKYKEEYEKTKGKAMGTADSRLLHSLQIAKMSSEVEYKKGFEESKTRFHLPMDMVNIRHAKKAQTLASDLDYRKKLHEYTVLPEDMKTQWAKKAYGLQSELQYKADLAWMKGVGWLTEGSLNLEQAKKAGQLVSEKNYRQRVDELKFTSVTDSSQMEHAKKSQELQSGVAYKAGNEQSVHQYTISKDEPLFLQARANAANLSEKLYKSSWENQKAKGFELRLDSLTFLAAKAKRDLASEVKYKEDYERSRGKLIGAKDVQGDSQMSHSLQMSKLQSELEYKKGFEDTKSQCHVSLDMVHLVHARKAQHLATDVGYKTAEHHFTALPTDMKVEWAKKAYGLQSDNQYRADVKWMKGMGWVATGSLNVEQAKKAGELISEKKYRQHPDALKFTSIKDTPEMVQARISYTQAVDRLYREQGENIKHHYTPTADLPEVLLAKLNAMNISETRYKESWSKLRDGGYKLRLDALPFQAAKASGEIISDYKYKEAFEKMKGQMLGSRSLEDDISLAHSVYATSLQSDVNYKKGFEHSKAQFHLPLDMAALVHAKKAQTLASNQDYKHPLPQYTSLAEDLRLSCAKKAHKLQSENLYRSDLNFMRGVACVIPGTLEIEGRKKASELISESKYRQHPHSFKYTAVTDTPNLLHAKFSNQITNERLYKAAGEDARHEYTMTLGLPEFIRAKTNAANLSDARYKESWRNLRAQGYKLTIEALPFQAARASGDIASDFLYRHDFVKERGKLIGPQSVRDDPRIQHCRRMGQLQSELQYRRGATSSQAQFHLPMDMVHLVHAKNAQALASDHDYRTQYHKFTALPEDLKMAWAKKAHALQSELRYKSDLIGMKGIGWLALRSPQMESAKKAGELISETKYRKKPDSIKFTTVVDSPDLVHAKNSYMHCNERMYRSGDAESLHRYTLIPDHPDFTRARLNALHLSDKVYRNSWEQTRAGSYDFRLDAIPFQTARASREIASDFRYKEAFLRDRGLQIGYRSVDDDPRMKHFLNVGRLQSDNEYKKDFAKSRSQFHSSTDQPGLLQAKRSQQLASDVHYRQPLPQPTCDPEQLGLRHAQKAHQLQSDVKYKSDLNLTRGVGWTPPGSYKVEMARRAAELANARGLGLQGAYRGAEAVEAGDHQSGEVNPDATEILHVKKKKALLL

SEQ ID NO: 55693 - protein, 1731 aa, Homo sapiens
  Payload ID: 10962
  Gene Symbol: NRAP
  Gene Name: nebulin-related anchoring protein
  ENSP ID: ENSP00000358365
MNVQPCSRCGYGVYPAEKISCIDQIWHKACFHCEVCKMMLSVNNFVSHQKKPYCHAHNPKNNTFTSVYHTPLNLNVRTFPEAISGIHDQEDGEQCKSVFHWDMKSKDKEGAPNRQPLANERAYWTGYGEGNAWCPGALPDPEIVRMVEARKSLGEEYTEDYEQPRGKGSFPAMITPAYQRAKKANQLASQVEYKRGHDERISRFSTVVDTPELLRSKAGAQLQSDVRYTEDYEQQRGKGSFPAMITPAYQIAKRANELASDVRYHQQYQKEMRGMAGPAIGAEGILTRECADQYGQGYPEEYEEHRGKGSFPAMITPAYQNAKKAHELASDIKYRQDFNKMKGAAHYHSLPAQDNLVLKQAQSVNKLVSEVEYKKDLESSRGHSINYCETPQFRNVSKISKFTSDNKYKENYQNHMRGRYEGVGMDRRTLHAMKVGSLASNVAYKADYKHDIVDYNYPATLTPSYQTAMKLVPLKDANYRQSIDKLKYSSVTDTPQIVQAKINAQQLSHVNYRADYEKNKLNYTLPQDVPQLVKAKTNAKLFSEVKYKEGWEKTKGKGFEMKLDAMSLLAAKASGELASNIKYKEEYEKTKGKAMGTADSRLLHSLQIAKMSSEVEYKKGFEESKTRFHLPMDMVNIRHAKKAQTLASDLDYRKKLHEYTVLPEDMKTQWAKKAYGLQSELQYKADLAWMKGVGWLTEGSLNLEQAKKAGQLVSEKNYRQRVDELKFTSVTDSSQMEHAKKSQELQSGVAYKAGNEQSVHQYTISKDEPLFLQARANAANLSEKLYKSSWENQKAKGFELRLDSLTFLAAKAKRDLASEVKYKEDYERSRGKLIGAKDVQGDSQMSHSLQMSKLQSELEYKKGFEDTKSQCHVSLDMVHLVHARKAQHLATDVGYKTAEHHFTALPTDMKVEWAKKAYGLQSDNQYRADVKWMKGMGWVATGSLNVEQAKKAGELISEKKYRQHPDALKFTSIKDTPEMVQARISYTQAVDRLYREQGENIKHHYTPTADLPEVLLAKLNAMNISETRYKESWSKLRDGGYKLRLDALPFQAAKASGEIISDYKYKEAFEKMKGQMLGSRSLEDDISLAHSVYATSLQSDVNYKKGFEHSKAQFHLPLDMAALVHAKKAQTLASNQDYKHPLPQYTSLAEDLRLSCAKKAHKLQSENLYRSDLNFMRGVACVIPGTLEIEGRKKASELISESKYRQHPHSFKYTAVTDTPNLLHAKFSNQITNERLYKAAGEDARHEYTMTLGLPEFIRAKTNAANLSDARYKESWRNLRAQGYKLTIEALPFQAARASGDIASDFLYRHDFVKERGKLIGPQSVRDDPRIQHCRRMGQLQSELQYRRGATSSQAQFHLPMDMVHLVHAKNAQALASDHDYRTQYHKFTALPEDLKMAWAKKAHALQSELRYKSDLIGMKGIGWLALRSPQMESAKKAGELISETKYRKKPDSIKFTTVVDSPDLVHAKNSYMHCNERMYRSGDAESLHRYTLIPDHPDFTRARLNALHLSDKVYRNSWEQTRAGSYDFRLDAIPFQTARASREIASDFRYKEAFLRDRGLQIGYRSVDDDPRMKHFLNVGRLQSDNEYKKDFAKSRSQFHSSTDQPGLLQAKRSQQLASDVHYRQPLPQPTCDPEQLGLRHAQKAHQLQSDVKYKSDLNLTRGVGWTPPGSYKVEMARRAAELANARGLGLQGAYQRGAEAVEAGDHQSGEVNPDATEILHVKKKKALLL

SEQ ID NO: 55694 - protein, 1703 aa, Homo sapiens
  Payload ID: 10962
  Gene Symbol: NRAP
  Gene Name: nebulin-related anchoring protein
  Uniprot ID: Q86VF7
  ENSP ID: ENSP00000358367
MNVQPCSRCGYGVYPAEKISCIDQIWHKACFHCEVCKMMLSVNNFVSHQKKPYCHAHNPKNNTFTSVYHTPLNLNVRTFPEAISGIHDQEDGEQCKSVFHWDMKSKDKEGAPNRQPLANERAYWTGYGEGNAWCPGALPDPEIVRMVEARKSLGEEYTEDYEQPRGKGSFPAMITPAYQRAKKANQLASQVEYKRGHDERISRFSTVVDTPELLRSKAGAQLQSDVRYTEDYEQQRGKGSFPAMITPAYQIAKRANELASDVRYHQQYQKEMRGMAGPAIGAEGILTRECADQYGQGYPEEYEEHRGKGSFPAMITPAYQNAKKAHELASDIKYRQDFNKMKGAAHYHSLPAQDNLVLKQAQSVNKLVSENKYKENYQNHMRGRYEGVGMDRRTLHAMKVGSLASNVAYKADYKHDIVDYNYPATLTPSYQTAMKLVPLKDANYRQSIDKLKYSSVTDTPQIVQAKINAQQLSHVNYRADYEKNKLNYTLPQDVPQLVKAKTNAKLFSEVKYKEGWEKTKGKGFEMKLDAMSLLAAKASGELASNVHLLLSLKIKYKEEYEKTKGKAMGTADSRLLHSLQIAKMSSEVEYKKGFEESKTRFHLPMDMVNIRHAKKAQTLASDLDYRKKLHEYTVLPEDMKTQWAKKAYGLQSELQYKADLAWMKGVGWLTEGSLNLEQAKKAGQLVSEKNYRQRVDELKFTSVTDSSQMEHAKKSQELQSGVAYKAGNEQSVHQYTISKDEPLFLQARANAANLSEKLYKSSWENQKAKGFELRLDSLTFLAAKAKRDLASEVKYKEDYERSRGKLIGAKDVQGDSQMSHSLQMSKLQSELEYKKGFEDTKSQCHVSLDMVHLVHARKAQHLATDVGYKTAEHHFTALPTDMKVEWAKKAYGLQSDNQYRADVKWMKGMGWVATGSLNVEQAKKAGELISEKKYRQHPDALKFTSIKDTPEMVQARISYTQAVDRLYREQGENIKHHYTPTADLPEVLLAKLNAMNISETRYKESWSKLRDGGYKLRLDALPFQAAKASGEIISDYKYKEAFEKMKGQMLGSRSLEDDISLAHSVYATSLQSDVNYKKGFEHSKAQFHLPLDMAALVHAKKAQTLASNQDYKHPLPQYTSLAEDLRLSCAKKAHKLQSENLYRSDLNFMRGVACVIPGTLEIEGRKKASELISESKYRQHPHSFKYTAVTDTPNLLHAKFSNQITNERLYKAAGEDARHEYTMTLGLPEFIRAKTNAANLSDARYKESWRNLRAQGYKLTIEALPFQAARASGDIASDFLYRHDFVKERGKLIGPQSVRDDPRIQHCRRMGQLQSELQYRRGATSSQAQFHLPMDMVHLVHAKNAQALASDHDYRTQYHKFTALPEDLKMAWAKKAHALQSELRYKSDLIGMKGIGWLALRSPQMESAKKAGELISETKYRKKPDSIKFTTVVDSPDLVHAKNSYMHCNERMYRSGDAESLHRYTLIPDHPDFTRARLNALHLSDKVYRNSWEQTRAGSYDFRLDAIPFQTARASREIASDFRYKEAFLRDRGLQIGYRSVDDDPRMKHFLNVGRLQSDNEYKKDFAKSRSQFHSSTDQPGLLQAKRSQQLASDVHYRQPLPQPTCDPEQLGLRHAQKAHQLQSDVKYKSDLNLTRGVGWTPPGSYKVEMARRAAELANARGLGLQGAYRGAEAVEAGDHQSGEVNPDATEILHVKKKKALLL

SEQ ID NO: 55695 - protein, 275 aa, Homo sapiens
  Payload ID: 10963
  Gene Symbol: NECAP1
  Gene Name: NECAP endocytosis associated 1
  Uniprot ID: Q8NC96
  ENSP ID: ENSP00000341737
MATELEYESVLCVKPDVSVYRIPPRASNRGYRASDWKLDQPDWTGRLRITSKGKTAYIKLEDKVSGELFAQAPVEQYPGIAVETVTDSSRYFVIRIQDGTGRSAFIGIGFTDRGDAFDFNVSLQDHFKWVKQESEISKESQEMDARPKLDLGFKEGQTIKLCIGNITNKKGGASKPRTARGGGLSLLPPPPGGKVTIPPPSSSVAISNHVTPPPIPKSNHGGSDADILLDLDSPAPVTTPAPTPVSVSNDLWGDFSTASSSVPNQAPQPSNWVQF

SEQ ID NO: 55696 - protein, 102 aa, Homo sapiens
  Payload ID: 10963
  Gene Symbol: NECAP1
  Gene Name: NECAP endocytosis associated 1
  Uniprot ID: Q8NC96
  ENSP ID: ENSP00000401963
MATELEYESVLCVKPDVSVYRIPPRASNRGYRASDWKLDQPDWTGRLRITSKGKTAYIKLEDKVSGELFAQAPVEQYPGIAVETVTDSSRYFVIRIQDGTGG

SEQ ID NO: 55697 - protein, 116 aa, Homo sapiens
  Payload ID: 10963
  Gene Symbol: NECAP1
  Gene Name: NECAP endocytosis associated 1
  ENSP ID: ENSP00000439319
MDARPKLDLGFKEGQTIKLCIGNITNKKGGASKPRTARGGGLSLLPPPPGGKVTIPPPSSSVAISNHVTPPPIPKSNHGGSDADILLDLDSPAPVTTPAPTPVSVSNDLWGDFSTA

SEQ ID NO: 55698 - protein, 110 aa, Homo sapiens
  Payload ID: 10963
  Gene Symbol: NECAP1
  Gene Name: NECAP endocytosis associated 1
  ENSP ID: ENSP00000440658
MATELEYESVLCVKPDVSVYRIPPRASNRGYRASDWKLDQPDWTGRLRITSKGKTAYIKLEDKVSGELFAQAPVEQYPGIAVETVTDSSRYFVIRIQDGTEHYKQERRCF

SEQ ID NO: 55699 - protein, 263 aa, Homo sapiens
  Payload ID: 10964
  Gene Symbol: NECAP2
  Gene Name: NECAP endocytosis associated 2
  Uniprot ID: Q9NVZ3
  ENSP ID: ENSP00000338746
MEESGYESVLCVKPDVHVYRIPPRATNRGYRAAEWQLDQPSWSGRLRITAKGQMAYIKLEDRTSGELFAQAPVDQFPGTAVESVTDSSRYFVIRIEDGNGRRAFIGIGFGDRGDAFDFNVALQDHFKWVKQQCEFAKQAQNPDQGPKLDLGFKEGQTIKLNIANMKKKEGAAGNPRVRPASTGGLSLLPPPPGGKTSTLIPPPGEQLAVGGSLVQPAVAPSSGGAPVPWPQPNPATADIWGDFTKSTGSTSSQTQPGTGWVQF

SEQ ID NO: 55700 - protein, 273 aa, Homo sapiens
  Payload ID: 10964
  Gene Symbol: NECAP2
  Gene Name: NECAP endocytosis associated 2
  Uniprot ID: Q9NVZ3
  ENSP ID: ENSP00000391942
MEESGYESVLCVKPDVHVYRIPPRATNRGYRAAEWQLDQPSWSGRLRITAKGQMAYIKLEDRTSGELFAQAPVDQFPGTAVESVTDSSRYFVIRIEDGNGRRAFIGIGFGDRGDAFDFNVALQDHFKWVKQQCEFAKQAQNPDQGPKLDLGFKEGQTIKLNIANMKKKEGAAGNPRVRPASTGGLSLLPPPPGGKTSTLIPPPGEQLAVGGSLVQPAVAPSSDQLPARPSQAQAGSSSDLSTVFPHVTSGKALPHLGQRKEDEALLSWPVFGA

SEQ ID NO: 55701 - protein, 237 aa, Homo sapiens
  Payload ID: 10964
  Gene Symbol: NECAP2
  Gene Name: NECAP endocytosis associated 2
  Uniprot ID: Q9NVZ3
  ENSP ID: ENSP00000407091
MEESGAAEWQLDQPSWSGRLRITAKGQMAYIKLEDRTSGELFAQAPVDQFPGTAVESVTDSSRYFVIRIEDGNGRRAFIGIGFGDRGDAFDFNVALQDHFKWVKQQCEFAKQAQNPDQGPKLDLGFKEGQTIKLNIANMKKKEGAAGNPRVRPASTGGLSLLPPPPGGKTSTLIPPPGEQLAVGGSLVQPAVAPSSGGAPVPWPQPNPATADIWGDFTKSTGSTSSQTQPGTGWVQF

SEQ ID NO: 55702 - protein, 194 aa, Homo sapiens
  Payload ID: 10964
  Gene Symbol: NECAP2
  Gene Name: NECAP endocytosis associated 2
  ENSP ID: ENSP00000421335
MEESGYESVLCVKPDVHVYRIPPRATNRGYRAAEWQLDQPSWSGRLRITAKGQMAYIKLEDRTSGELFAQAPVDQFPGTAVESVTDSSRYFVIRIEDGNGRRAFIGIGFGDRGDAFDFNVALQDHFKWVKQQCEFAKQAQNPDQGPKLDLGFKEGQTIKLNIALASWPLREKCKSNPVDWLGCDSFSRLEETNI

SEQ ID NO: 55703 - protein, 101 aa, Homo sapiens
  Payload ID: 10964
  Gene Symbol: NECAP2
  Gene Name: NECAP endocytosis associated 2
  ENSP ID: ENSP00000421867
MEESGYESVLCVKPDVHVYRIPPRATNRGYRAAEWQLDQPSWSGRLRITAKGQMAYIKLEDRTSGELFAQAPVDQFPGTAVESVTDSSRYFVIRIEDGNGG

SEQ ID NO: 55704 - protein, 63 aa, Homo sapiens
  Payload ID: 10964
  Gene Symbol: NECAP2
  Gene Name: NECAP endocytosis associated 2
  ENSP ID: ENSP00000423213
  MOD_RES (1)..(1): Any amino acid
XGYESVLCVKPDVHVYRIPPRATNRGYRAAEWQLDQPSWSGRLRITAKGQMAYIKLEDRTSGG

SEQ ID NO: 55705 - protein, 202 aa, Homo sapiens
  Payload ID: 10964
  Gene Symbol: NECAP2
  Gene Name: NECAP endocytosis associated 2
  ENSP ID: ENSP00000424509
MEESGYESVLCVKPDVHVYRIPPRATNRGYRGALCSGPGGSVSWHSCGECDGFQQVLRDPHRRWKWWVKQQCEFAKQAQNPDQGPKLDLGFKEGQTIKLNIANMKKKEGAAGNPRVRPASTGGLSLLPPPPGGKTSTLIPPPGEQLAVGGSLVQPAVAPSSGGAPVPWPQPNPATADIWGDFTKSTGSTSSQTQPGTGWVQF

SEQ ID NO: 55706 - protein, 263 aa, Homo sapiens; identical to SEQ ID NO: 55699
  Payload ID: 10964
  Gene Symbol: NECAP2
  Gene Name: NECAP endocytosis associated 2
  Uniprot ID: Q9NVZ3
  ENSP ID: ENSP00000427620

SEQ ID NO: 55707 - protein, 321 aa, Homo sapiens
  Payload ID: 10965
  Gene Symbol: NDN
  Gene Name: necdin, melanoma antigen (MAGE) family member
  Uniprot ID: Q99608
  ENSP ID: ENSP00000332643
MSEQSKDLSDPNFAAEAPNSEVHSSPGVSEGVPPSATLAEPQSPPLGPTAAPQAAPPPQAPNDEGDPKALQQAAEEGRAHQAPSAAQPGPAPPAPAQLVQKAHELMWYVLVKDQKKMIIWFPDMVKDVIGSYKKWCRSILRRTSLILARVFGLHLRLTSLHTMEFALVKALEPEELDRVALSNRMPMTGLLLMILSLIYVKGRGARESAVWNVLRILGLRPWKKHSTFGDVRKLITEEFVQMNYLKYQRVPYVEPPEYEFFWGSRASREITKMQIMEFLARVFKKDPQAWPSRYREALEEARALREANPTAHYPRSSVSED

SEQ ID NO: 55708 - protein, 304 aa, Homo sapiens
  Payload ID: 10966
  Gene Symbol: NDNL2
  Gene Name: necdin-like 2, SMC5-SMC6 complex component
  Uniprot ID: Q96MG7
  ENSP ID: ENSP00000330694
MLQKPRNRGRSGGQAERDRDWSHSGNPGASRAGEDARVLRDGFAEEAPSTSRGPGGSQGSQGPSPQGARRAQAAPAVGPRSQKQLELKVSELVQFLLIKDQKKIPIKRADILKHVIGDYKDIFPDLFKRAAERLQYVFGYKLVELEPKSNTYILINTLEPVEEDAEMRGDQGTPTTGLLMIVLGLIFMKGNTIKETEAWDFLRRLGVYPTKKHLIFGDPKKLITEDFVRQRYLEYRRIPHTDPVDYEFQWGPRTNLETSKMKVLKFVAKVHNQDPKDWPAQYCEALADEENRARPQPSGPAPSS

SEQ ID NO: 55709 - protein, 304 aa, Homo sapiens; identical to SEQ ID NO: 55708
  Payload ID: 10966
  Gene Symbol: NDNL2
  Gene Name: necdin-like 2, SMC5-SMC6 complex component
  Uniprot ID: Q96MG7
  ENSP ID: ENSP00000487893

SEQ ID NO: 55710 - protein, 896 aa, Homo sapiens
  Payload ID: 10967
  Gene Symbol: N4BP1
  Gene Name: NEDD4 binding protein 1
  Uniprot ID: O75113
  ENSP ID: ENSP00000262384
MAARAVLDEFTAPAEKAELLEQSRGRIEGLFGVSLAVLGALGAEEPLPARIWLQLCGAQEAVHSAKEYIKGICEPELEERECYPKDMHCIFVGAESLFLKSLIQDTCADLCILDIGLLGIRGSAEAVVMARSHIQQFVKLFENKENLPSSQKESEVKREFKQFVEAHADNYTMDLLILPTSLKKELLTLTQGEENLFETGDDEVIEMRDSQQTEFTQNAATGLNISRDETVLQEEARNKAGTPVSELTKQMDTVLSSSPDVLFDPINGLTPDEEALSNERICQKRRFSDSEERHTKKQFSLENVQEGEILHDAKTLAGNVIADLSDSSADSENLSPDIKETTEEMEYNILVNFFKTMGYSQEIVEKVIKVYGPSTEPLLLLEEIEKENKRFQEDREFSAGTVYPETNKTKNKGVYSSTNELTTDSTPKKTQAHTQQNMVEKFSQLPFKVEAKPCTSNCRINTFRTVPIEQKHEVWGSNQNYICNTDPETDGLSPSVASPSPKEVNFVSRGASSHQPRVPLFPENGLHQQPEPLLPNNMKSACEKRLGCCSSPHSKPNCSTLSPPMPLPQLLPSVTDARSAGPSDHIDSSVTGVQRFRDTLKIPYKLELKNEPGRTDLKHIVIDGSNVAITHGLKKFFSCRGIAIAVEYFWKLGNRNITVFVPQWRTRRDPNVTEQHFLTQLQELGILSLTPARMVFGERIASHDDRFLLHLADKTGGIIVTNDNFREFVNESVSWREIITKRLLQYTFVGDIFMVPDDPLGRSGPRLEEFLQKEVCLRDMQPLLSALPNVGMFDPSFRVPGTQAASTSHQPPTRIQGAPSSHWLPQQPHFPLLPALPSLQQNLPMPAQRSSAETNELREALLKIFPDSEQRLKIDQILVAHPYMKDLNALSAMVLD

SEQ ID NO: 55711 - protein, 142 aa, Homo sapiens
  Payload ID: 10967
  Gene Symbol: N4BP1
  Gene Name: NEDD4 binding protein 1
  ENSP ID: ENSP00000460667
MHCIFVGAESLFLKSLIQDTCADLCILDIGLLGIRGSAEAVVMARSHIQQFVKLFENKENLPSSQKESEVKREFKQFVEAHADNYTMDLLILPTSLKKELLTLTQGEENLFETGDDEVIEMRDSQQTEFTQNAATGLNISRD

SEQ ID NO: 55712 - protein, 1770 aa, Homo sapiens
  Payload ID: 10968
  Gene Symbol: N4BP2
  Gene Name: NEDD4 binding protein 2
  Uniprot ID: Q86UW6
  ENSP ID: ENSP00000261435
MPRRRKNLGGNPFRKTANPKEVVVSSVASREEPTTTLPSMGETKVDQEELFTSISEIFSDLDPDVVYLMLSECDFKVENAMDCLLELSATDTKIEESSSQSFVASENQVGAAESKIMEKRPEEESEDSKMDSFLDMQLTEDLDSLIQNAFEKLNSSPDDQVYSFLPSQDVNSFNDSSEFINPDSSNMTPIFSTQNMNLNGENLENSGSTLSLNPLPSHSVLNESKCFIKDNTLALESNYPEDSLLSSSLNVASDSIAGCSSLNQKQKELLESECVEAQFSEAPVDLDASEPQACLNLPGLDLPGTGGDQKSTRVSDVFLPSEGFNFKPHKHPELPTKGKDVSYCPVLAPLPLLLPPPPPPPMWNPMIPAFDLFQGNHGFVAPVVTTAAHWRSVNYTFPPSVISHTSPTKVWRNKDGTSAYQVQETPVSQVVRKKTSYVGLVLVLLRGLPGSGKSFLARTLQEDNPSGVILSTDDYFYINGQYQFDVKYLGEAHEWNQNRAKEAFEKKISPIIIDNTNLQAWEMKPYVALSQKHKYKVLFREPDTWWKFKPKELARRNIHGVSKEKITRMLEHYQRFVSVPIIMSSSVPEKIERIELCAYSCEDRSTSPRDDEDIISEKEENILSLSLKHLEFTEEKNLDVTKETMLPENVAYLSNADLNKRRKEISDMNPSIQSALILETPHMYFSDSESKLQATDKSENEQIEMVAVKGYSKTDTDSSMERVSPSTCCSENNQEDCDLANSGPLQNEKSSPGEIVEERATVTKKAFGKQKSKSTLEKFPRHELSNFVGDWPVDKTIGQRTKRNRKTEKTSSVQSDKKYNYPQSHKLVNSVSVNTDCVQQRGSPHESVEDGRKSQCDDASEPLNSYKYDAYKNIDKNSFNIMGDWPSSDSLAQREHRSRMPKTGLSEPNLEIGTNDKMNEISLSTAHEACWGTSSQKLKTLGSSNLGSSEMLLSEMTCESQTCLSKKSHGQHTSLPLTFTNSAPTVSGVVEPQTLAECQEQMPKRDPGKEVGMCTQTEPQDFALLWKIEKNKISISDSIKVLTGRLDGFKPKVFNINTKSDVQEAIPYRVMYDKSTFVEESELTSADESENLNILCKLFGSFSLEALKDLYERCNKDIIWATSLLLDSETKLCEDTEFENFQKSCDGSQIGPFSLGLNLKEIISQRGTLENSNSPVPEFSHGIGISNADSQSTCDAERGNSEQAEMRAVTPENHESMTSIFPSAAVGLKNNNDILPNSQEELLYSSKQSFPGILKATTPKDMSETEKNLVVTETGDNIHSPSHFSDIFNFVSSTSNLELNEEIYFTDSLEIKRNENFPKDYVKFSDEEEFMNEDEKEMKEILMAGSSLSAGVSGEDKTEILNPTPAMAKSLTIDCLELALPPELAFQLNELFGPVGIDSGSLTVEDCVVHIDLNLAKVIHEKWKESVMERQRQEEVSCGKFMQDPSLVGHTGLDNPEQKSSQRTGKKLLKTLTASEMLPLLDHWNTQTKKVSLREIMSEEIALQEKHNLKRETLMFEKDCATKLKEKQLFKIFPAINQNFLVDIFKDHNYSLEHTVQFLNCVLEGDPVKTVVAQEFVHQNENVTSHTGQKSKEKKPKKLKETEETPSELSFQDFEYPDYDDYRAEAFLHQQKRMECYSKAKEAYRIGKKNVATFYAQQGTLHEQKMKEANHLAAIEIFEKVNASLLPQNVLDLHGLHVDEALEHLMRVLEKKTEEFKQNGGKPYLSVITGRGNHSQGGVARIKPAVIKYLISHSFRFSEIKPGCLKVMLK

SEQ ID NO: 55713 - protein, 173 aa, Homo sapiens
  Payload ID: 10968
  Gene Symbol: N4BP2
  Gene Name: NEDD4 binding protein 2
  ENSP ID: ENSP00000422057
MDCLLELSATDTKIEESSSQSFVASENQVGAAESKIMEKRPEEESEDSKMDSFLDMQLTEDLDSLIQNAFEKLNSSPDDQVYSFLPSQDVNSFNDSSEFINPDSSNMTPIFSTQNMNLNGENLENSGSTLSLNPLPSHSVLNESKCFIKDNTLALESNYPEDSLLSSSLNVAS

SEQ ID NO: 55714 - protein, 99 aa, Homo sapiens
  Payload ID: 10968
  Gene Symbol: N4BP2
  Gene Name: NEDD4 binding protein 2
  ENSP ID: ENSP00000422436
MPRRRKNLGGNPFRKTANPKEVVVSSVASREEPTTTLPSMGETKVDQEELFTSISEIFSDLDPDVVYLMLSECDFKGNLIGCLLGASSCAQHFFMDYLI

SEQ ID NO: 55715 - protein, 1400 aa, Homo sapiens
  Payload ID: 10968
  Gene Symbol: N4BP2
  Gene Name: NEDD4 binding protein 2
  ENSP ID: ENSP00000426430
  MOD_RES (1)..(1): Any amino acid
XPPPPPPPMWNPMIPAFDLFQGNHGFVAPVVTTAAHWRSVNYTFPPSVISHTSPTKVWRNKDGTSAYQVQETPVSQVVRKKTSYVGLVLVLLRGLPGSGKSFLARTLQEDNPSGVILSTDDYFYINGQYQFDVKYLGEAHEWNQNRAKEAFEKKISPIIIDNTNLQAWEMKPYVALSQKHKYKVLFREPDTWWKFKPKELARRNIHGVSKEKITRMLEHYQRFVSVPIIMSSSVPEKIERIELCAYSCEDRSTSPRDDEDIISEKEENILSLSLKHLEFTEEKNLDVTKETMLPENVAYLSNADLNKRRKEISDMNPSIQSALILETPHMYFSDSESKLQATDKSENEQIEMVAVKGYSKTDTDSSMERVSPSTCCSENNQEDCDLANSGPLQNEKSSPGEIVEERATVTKKAFGKQKSKSTLEKFPRHELSNFVGDWPVDKTIGQRTKRNRKTEKTSSVQSDKKYNYPQSHKLVNSVSVNTDCVQQRGSPHESVEDGRKSQCDDASEPLNSYKYDAYKNIDKNSFNIMGDWPSSDSLAQREHRSRMPKTGLSEPNLEIGTNDKMNEISLSTAHEACWGTSSQKLKTLGSSNLGSSEMLLSEMTCESQTCLSKKSHGQHTSLPLTFTNSAPTVSGVVEPQTLAECQEQMPKRDPGKEVGMCTQTEPQDFALLWKIEKNKISISDSIKVLTGRLDGFKPKVFNINTKSDVQEAIPYRVMYDKSTFVEESELTSADESENLNILCKLFGSFSLEALKDLYERCNKDIIWATSLLLDSETKLCEDTEFENFQKSCDGSQIGPFSLGLNLKEIISQRGTLENSNSPVPEFSHGIGISNADSQSTCDAERGNSEQAEMRAVTPENHESMTSIFPSAAVGLKNNNDILPNSQEELLYSSKQSFPGILKATTPKDMSETEKNLVVTETGDNIHSPSHFSDIFNFVSSTSNLELNEEIYFTDSLEIKRNENFPKDYVKFSDEEEFMNEDEKEMKEILMAGSSLSAGVSGEDKTEILNPTPAMAKSLTIDCLELALPPELAFQLNELFGPVGIDSGSLTVEDCVVHIDLNLAKVIHEKWKESVMERQRQEEVSCGKFMQDPSLVGHTGLDNPEQKSSQRTGKKLLKTLTASEMLPLLDHWNTQTKKVSLREIMSEEIALQEKHNLKRETLMFEKDCATKLKEKQLFKIFPAINQNFLVDIFKDHNYSLEHTVQFLNCVLEGDPVKTVVAQEFVHQNENVTSHTGQKSKEKKDFEYPDYDDYRAEAFLHQQKRMECYSKAKEAYRIGKKNVATFYAQQGTLHEQKMKEANHLAAIEIFEKVNASLLPQNVLDLHGLHVDEALEHLMRVLEKKTEEFKQNGGKPYLSVITGRGNHSQGGVARIKPAVIKYLISHSFRFSEIKPGCLKVMLK

SEQ ID NO: 55716 - protein, 60 aa, Homo sapiens
  Payload ID: 10969
  Gene Symbol: N4BP2L1
  Gene Name: NEDD4 binding protein 2-like 1
  ENSP ID: ENSP00000345838
MEDSFLQSFGRLSLQPQQQQQRQRPPRPPPRGTPPRRHSFRKHLYLLRGLPGSGKTTLAR

SEQ ID NO: 55717 - protein, 243 aa, Homo sapiens
  Payload ID: 10969
  Gene Symbol: N4BP2L1
  Gene Name: NEDD4 binding protein 2-like 1
  Uniprot ID: Q5TBK1
  ENSP ID: ENSP00000369473
MEDSFLQSFGRLSLQPQQQQQRQRPPRPPPRGTPPRRHSFRKHLYLLRGLPGSGKTTLARQLQHDFPRALIFSTDDFFFREDGAYEFNPDFLEEAHEWNQKRARKAMRNGISPIIIDNTNLHAWEMKPYAVMALENNYEVIFREPDTRWKFNVQELARRNIHGVSREKIHRMKERYEHDVTFHSVLHAEKPSRMNRNQDRNNALPSNNARYWNSYTEFPNRRAHGGFTNESSYHRRGGCHHGY

SEQ ID NO: 55718 - protein, 243 aa, Homo sapiens; identical to SEQ ID NO: 55717
  Payload ID: 10969
  Gene Symbol: N4BP2L1
  Gene Name: NEDD4 binding protein 2-like 1
  Uniprot ID: Q5TBK1
  ENSP ID: ENSP00000369476

SEQ ID NO: 55719 - protein, 173 aa, Homo sapiens
  Payload ID: 10969
  Gene Symbol: N4BP2L1
  Gene Name: NEDD4 binding protein 2-like 1
  Uniprot ID: Q5TBK1
  ENSP ID: ENSP00000369484
MEDSFLQSFGRLSLQPQQQQQRQRPPRPPPRGTPPRRHSFRKHLYLLRGLPGSGKTTLARQLQHDFPRALIFSTDDFFFREDGAYEFNPDFLEEAHEWNQKRARKAMRNGISPIIIDNTNLHAWEMKPYAVMVFQTEQKNLFRLEMDMVVFRPEMKKHSWCLKRKNPPNERTV

SEQ ID NO: 55720 - protein, 137 aa, Homo sapiens
  Payload ID: 10969
  Gene Symbol: N4BP2L1
  Gene Name: NEDD4 binding protein 2-like 1
  ENSP ID: ENSP00000435515
MRNGISPIIIDNTNLHAWEMKPYAVMALENNYEVIFREPDTRWKFNVQELARRNIHGVSREKIHRMKERYEHDVTFHSVLHAEKPSRMNRNQDRNNALPSNNARYWNSYTEFPNRRAHGGFTNESSYHRRGGCHHGY

SEQ ID NO: 55721 - protein, 159 aa, Homo sapiens
  Payload ID: 10969
  Gene Symbol: N4BP2L1
  Gene Name: NEDD4 binding protein 2-like 1
  ENSP ID: ENSP00000475237
  MOD_RES (1)..(1): Any amino acid
XRPPRPPPRGTPPRRHSFRKHLYLLRGLPGSGKTTLARQLQHDFPRALIFSTDDFFFREDGAYEFNPDFLEEAHEWNQKRARKAMRNGISPIIIDNTNLHAWEMKPYAVMALENNYEVIFREPDTRWKFNVQELARRNIHGVSREKIHRMKERLESDLM

SEQ ID NO: 55722 - protein, 79 aa, Homo sapiens
  Payload ID: 10969
  Gene Symbol: N4BP2L1
  Gene Name: NEDD4 binding protein 2-like 1
  ENSP ID: ENSP00000475443
  MOD_RES (1)..(1): Any amino acid
XRPPRPPPRGTPPRRHSFRKHLYLLRGLPGSGKTTLARDDWSEHWPGSLKIVPSDLLRHLLAGDFGQSSSFSGPYVPYM

SEQ ID NO: 55723 - protein, 173 aa, Homo sapiens; identical to SEQ ID NO: 55719
  Payload ID: 10969
  Gene Symbol: N4BP2L1
  Gene Name: NEDD4 binding protein 2-like 1
  Uniprot ID: Q5TBK1
  ENSP ID: ENSP00000483310

SEQ ID NO: 55724 - protein, 136 aa, Homo sapiens
  Payload ID: 10969
  Gene Symbol: N4BP2L1
  Gene Name: NEDD4 binding protein 2-like 1
  ENSP ID: ENSP00000488989
MEDSFLQSFGRLSLQPQQQQQRQRPPRPPPRGTPPRRHSFRKHLYLLRGLPGSGKTTLARCSEWSSGQRRQKSLPSWNMYSIREKKFSRKKGNFSICSALFSQKISKGFHSVLGTWESSVNKTKILPLWTLCARGS

SEQ ID NO: 55725 - protein, 93 aa, Homo sapiens
  Payload ID: 10969
  Gene Symbol: N4BP2L1
  Gene Name: NEDD4 binding protein 2-like 1
  ENSP ID: ENSP00000489267
MEDSFLQSFGRLSLQPQQQQQRQRPPRPPPRGTPPRRHSFRKHLYLLRGLPGSGKTTLASVLGTWESSVNKTKILPLWTLCARDNCSMTFPGP

SEQ ID NO: 55726 - protein, 166 aa, Homo sapiens
  Payload ID: 10969
  Gene Symbol: N4BP2L1
  Gene Name: NEDD4 binding protein 2-like 1
  ENSP ID: ENSP00000489423
  MOD_RES (1)..(1): Any amino acid
XRPPRPPPRGTPPRRHSFRKHLYLLRGLPGSGKTTLARQLQHDFPRALIFSTDDFFFREDGAYEFNPDFLEEAHEWNQKRARKAMRNGISPIIIDNTNLHAWEMKPYAVMALENNYEVIFREPDTRWKFNVQELARQIVSSKWICGLLHQNCLRWLLKSEFMDPIQ

SEQ ID NO: 55727 - protein, 583 aa, Homo sapiens
  Payload ID: 10970
  Gene Symbol: N4BP2L2
  Gene Name: NEDD4 binding protein 2-like 2
  Uniprot ID: Q92802
  ENSP ID: ENSP00000267068
MSYGEIEGKFLGPREEVTSEPRCKKLKSTTESYVFHNHSNADFHRIQEKTGNDWVPVTIIDVRGHSYLQENKIKTTDLHRPLHDEMPGNRPDVIESIDSQVLQEARPPLVSADDEIYSTSKAFIGPIYKPPEKKKRNEGRNEAHVLNGINDRGGQKEKQKFNSEKSEIDNELFQFYKEIEELEKEKDGFENSCKESEPSQEQFVPFYEGHNNGLLKPDEEKKDLSNKAMPSHCDYQQNLGNEPDKYPCNGQVIPTFCDTSFTSFRPEWQSVYPFIVPYGPPLPSLNYHLNIQRFSGPPNPPSNIFQAQDDSQIQNGYYVNNCHVNWNCMTFDQNNEYTDCSENRSSVHPSGNGCSMQDRYVSNGFCEVRERCWKDHCMDKHNGTDRFVNQQFQEEKLNKLQKLLILLRGLPGSGKTTLSRILLGQNRDGIVFSTDDYFHHQDGYRYNVNQLGDAHDWNQNRAKQAIDQGRSPVIIDNTNIQAWEMKPYVEVAIGKGYRVEFHEPETWWKFDPEELEKRNKHGVSRKKIAQMLDRYEYQMSISIVMNSVEPSHKSTQRPPPPQGRQRWGGSLGSHNRVCVTNNH

SEQ ID NO: 55728 - protein, 737 aa, Homo sapiens
  Payload ID: 10970
  Gene Symbol: N4BP2L2
  Gene Name: NEDD4 binding protein 2-like 2
  ENSP ID: ENSP00000350104
MALCSALMTIFTIKMGTAKQAIDQGRSPVIIDNTNIQAWEMKPYVEVAIGKGYRVEFHEPETWWKFDPEELEKRNKHGVSRKKIAQMLDRYEYQMSISIVMNSVEPSHKSTQRPPPPQGRQRERVLKKTGHRLSKTKQKRNRKRNKKQNSQNRIMEENSLEFLSDLTPGDQDPSQSEEEDIEKTRRESEYPFIDGLQNEVGDFVTGYKEKRWKNKDPKDSFQNVMSIVELDNTPKNYLSKEGDNLFVSLLLRPNEISVTCPILTQNLSCVTTDDCSGMKVEKHIRNRHTIALDTQDLSAETSCLFMKKREIVDKNLSHEPILCHQHGIRMSDKVLREEQVYTTKINHWAFFTTNLSDEDLQLGSDRQPYFGSWPAGPHKFICEQRPKKDRACKLAGPDSRGQWIQMIFTSVAASEPGNNPEILTDKLLIGNEDFSPPPETMDSFIETNLFRSCLPQPDIPKNALESTKNKKRRKKRIFNLVPNFDLLGQSRIGVKEREKCDLLTKNHGLKITLGEEKDRISERNSEEENKQKLMTFDHHPLWFYLDIIKATPLNIDGQRYSHCLSFNRLRCSASLYKNYIPSFVLHNLSSIWKPSFTNKKLFLTFESQTRVGNKLNDAGFISPEILHSHPDTSCSLGVTSDFHFLNERFDRKLKRWEEPKELPAEDSQDLTSTDYRSLELPLSQGFAFQLVKLFGSPGVPMESLLPDDYVVPLDWKTLKMIYLQWKMSVEKRQKKIG

SEQ ID NO: 55729 - protein, 752 aa, Homo sapiens
  Payload ID: 10970
  Gene Symbol: N4BP2L2
  Gene Name: NEDD4 binding protein 2-like 2
  Uniprot ID: Q92802
  ENSP ID: ENSP00000382328
MSYGEIEEFCLVRIVMALCSALMTIFTIKMGTAKQAIDQGRSPVIIDNTNIQAWEMKPYVEVAIGKGYRVEFHEPETWWKFDPEELEKRNKHGVSRKKIAQMLDRYEYQMSISIVMNSVEPSHKSTQRPPPPQGRQRERVLKKTGHRLSKTKQKRNRKRNKKQNSQNRIMEENSLEFLSDLTPGDQDPSQSEEEDIEKTRRESEYPFIDGLQNEVGDFVTGYKEKRWKNKDPKDSFQNVMSIVELDNTPKNYLSKEGDNLFVSLLLRPNEISVTCPILTQNLSCVTTDDCSGMKVEKHIRNRHTIALDTQDLSAETSCLFMKKREIVDKNLSHEPILCHQHGIRMSDKVLREEQVYTTKINHWAFFTTNLSDEDLQLGSDRQPYFGSWPAGPHKFICEQRPKKDRACKLAGPDSRGQWIQMIFTSVAASEPGNNPEILTDKLLIGNEDFSPPPETMDSFIETNLFRSCLPQPDIPKNALESTKNKKRRKKRIFNLVPNFDLLGQSRIGVKEREKCDLLTKNHGLKITLGEEKDRISERNSEEENKQKLMTFDHHPLWFYLDIIKATPLNIDGQRYSHCLSFNRLRCSASLYKNYIPSFVLHNLSSIWKPSFTNKKLFLTFESQTRVGNKLNDAGFISPEILHSHPDTSCSLGVTSDFHFLNERFDRKLKRWEEPKELPAEDSQDLTSTDYRSLELPLSQGFAFQLVKLFGSPGVPMESLLPDDYVVPLDWKTLKMIYLQWKMSVEKRQKKIG

SEQ ID NO: 55730 - protein, 655 aa, Homo sapiens
  Payload ID: 10970
  Gene Symbol: N4BP2L2
  Gene Name: NEDD4 binding protein 2-like 2
  Uniprot ID: Q92802
  ENSP ID: ENSP00000394239
MSYGEIEGKFLGPREEVTSEPRCKKLKSTTESYVFHNHSNADFHRIQEKTGNDWVPVTIIDVRGHSYLQENKIKTTDLHRPLHDEMPGNRPDVIESIDSQVLQEARPPLVSADDEIYSTSKAFIGPIYKPPEKKKRNEGRNEAHVLNGINDRGGQKEKQKFNSEKSEIDNELFQFYKEIEELEKEKDGFENSCKESEPSQEQFVPFYEGHNNGLLKPDEEKKDLSNKAMPSHCDYQQNLGNEPDKYPCNGQVIPTFCDTSFTSFRPEWQSVYPFIVPYGPPLPSLNYHLNIQRFSGPPNPPSNIFQAQDDSQIQNGYYVNNCHVNWNCMTFDQNNEYTDCSENRSSVHPSGNGCSMQDRYVSNGFCEVRERCWKDHCMDKHNGTDRFVNQQFQEEKLNKLQKLLILLRGLPGSGKTTLSRILLGQNRDGIVFSTDDYFHHQDGYRYNVNQLGDAHDWNQNRAKQAIDQGRSPVIIDNTNIQAWEMKPYVEVAIGKGYRVEFHEPETWWKFDPEELEKRNKHGVSRKKIAQMLDRYEYQMSISIVMNSVEPSHKSTQRPPPPQGRQRFDRKLKRWEEPKELPAEDSQDLTSTDYRSLELPLSQGFAFQLVKLFGSPGVPMESLLPDDYVVPLDWKTLKMIYLQWKMSVEKRQKKIG

SEQ ID NO: 55731 - protein, 709 aa, Homo sapiens
  Payload ID: 10970
  Gene Symbol: N4BP2L2
  Gene Name: NEDD4 binding protein 2-like 2
  ENSP ID: ENSP00000423362
MSYGEIEGKFLGPREEVTSEPRCKKLKSTTESYVFHNHSNADFHRIQEKTGNDWVPVTIIDVRGHSYLQENKIKTTDLHRPLHDEMPGNRPDVIESIDSQVLQEARPPLVSADDEIYSTSKAFIGPIYKPPEKKKRNEGRNEAHVLNGINDRGGQKEKQKFNSEKSEIDNELFQFYKEIEELEKEKDGFENSCKESEPSQEQFVPFYEGHNNGLLKPDEEKKDLSNKAMPSHCDYQQNLGNEPDKYPCNGQVIPTFCDTSFTSFRPEWQSVYPFIVPYGPPLPSLNYHLNIQRFSGPPNPPSNIFQAQDDSQIQNGYYVNNCHVNWNCMTFDQNNEYTDCSENRSSVHPSGNGCSMQDRYVSNGFCEVRERCWKDHCMDKHNGTDRFVNQQFQEEKLNKLQKLLILLRGLPGSGKTTLSRILLGQNRDGIVFSTDDYFHHQDGYRYNVNQLGDAHDWNQNRAKQAIDQGRSPVIIDNTNIQAWEMKPYVEVAIGKGYRVEFHEPETWWKFDPEELEKRNKHGVSRKKIAQMLDRYEYQMSISIVMNSVEPSHKSTQRPPPPQGRQRERVLKKTGHRLSKTKQKRNRKRNKKQNSQNRIMEENSLEFLSDLTPGDQDPSQSEEEDIEKTRRESEYPFIDGLQNEVGDFVTGYKEKRWKNKDPKDSFQNVMSIVELDNTPKNYLSKEGDNLFVSLLLRPNEISVTCPILTQ

SEQ ID NO: 55732 - protein, 737 aa, Homo sapiens; identical to SEQ ID NO: 55728
  Payload ID: 10970
  Gene Symbol: N4BP2L2
  Gene Name: NEDD4 binding protein 2-like 2
  ENSP ID: ENSP00000427477

SEQ ID NO: 55733 - protein, 544 aa, Homo sapiens
  Payload ID: 10971
  Gene Symbol: N4BP3
  Gene Name: NEDD4 binding protein 3
  Uniprot ID: O15049
  ENSP ID: ENSP00000274605
MATAPGPAGIAMGSVGSLLERQDFSPEELRAALAGSRGSRQPDGLLRKGLGQREFLSYLHLPKKDSKSTKNTKRAPRNEPADYATLYYREHSRAGDFSKTSLPERGRFDKCRIRPSVFKPTAGNGKGFLSMQSLASHKGQKLWRSNGSLHTLACHPPLSPGPRASQARAQLLHALSLDEGGPEPEPSLSDSSSGGSFGRSPGTGPSPFSSSLGHLNHLGGSLDRASQGPKEAGPPAVLSCLPEPPPPYEFSCSSAEEMGAVLPETCEELKRGLGDEDGSNPFTQVLEERQRLWLAELKRLYVERLHEVTQKAERSERNLQLQLFMAQQEQRRLRKELRAQQGLAPEPRAPGTLPEADPSARPEEEARWEVCQKTAEISLLKQQLREAQAELAQKLAEIFSLKTQLRGSRAQAQAQDAELVRLREAVRSLQEQAPREEAPGSCETDDCKSRGLLGEAGGSEARDSAEQLRAELLQERLRGQEQALRFEQERRTWQEEKERVLRYQREIQGGYMDMYRRNQALEQELRALREPPTPWSPRLESSKI

SEQ ID NO: 55734 - protein, 221 aa, Homo sapiens
  Payload ID: 10972
  Gene Symbol: NDFIP1
  Gene Name: Nedd4 family interacting protein 1
  Uniprot ID: Q9BT67
  ENSP ID: ENSP00000253814
MALALAALAAVEPACGSRYQQLQNEEESGEPEQAAGDAPPPYSSISAESAAYFDYKDESGFPKPPSYNVATTLPSYDEAERTKAEATIPLVPGRDEDFVGRDDFDDADQLRIGNDGIFMLTFFMAFLFNWIGFFLSFCLTTSAAGRYGAISGFGLSLIKWILIVRFSTYFPGYFDGQYWLWWVFLVLGFLLFLRGFINYAKVRKMPETFSNLPRTRVLFIY

SEQ ID NO: 55735 - protein, 336 aa, Homo sapiens
  Payload ID: 10973
  Gene Symbol: NDFIP2
  Gene Name: Nedd4 family interacting protein 2
  Uniprot ID: Q9NV92
  ENSP ID: ENSP00000218652
MARRRSQRVCASGPSMLNSARGAPELLRGTATNAEVSAAAAGATGSEELPPGDRGCRNGGGRGPAATTSSTGVAVGAEHGEDSLSRKPDPEPGRMDHHQPGTGRYQVLLNEEDNSESSAIEQPPTSNPAPQIVQAASSAPALETDSSPPPYSSITVEVPTTSDTEVYGEFYPVPPPYSVATSLPTYDEAEKAKAAAMAAAAAETSQRIQEEECPPRDDFSDADQLRVGNDGIFMLAFFMAFIFNWLGFCLSFCITNTIAGRYGAICGFGLSLIKWILIVRFSDYFTGYFNGQYWLWWIFLVLGLLLFFRGFVNYLKVRNMSESMAAAHRTRYFFLL

SEQ ID NO: 55736 - protein, 222 aa, Homo sapiens
  Payload ID: 10973
  Gene Symbol: NDFIP2
  Gene Name: Nedd4 family interacting protein 2
  ENSP ID: ENSP00000419200
MDHHQPGTGRYQVLLNEEDNSESSAIEQPPTSNPAPQIVQAASSAPALETDSSPPPYSSITVEVPTTSDTEVYGEFYPVPPPYSVATSLPTYDEAEKAKAAAMAAAAAETSQRIQEEECPPRDDFSDADQLRVGNDGIFMLAFFTGRYGAICGFGLSLIKWILIVRFSDYFTGYFNGQYWLWWIFLVLGLLLFFRGFVNYLKVRNMSESMAAAHRTRYFFLL

SEQ ID NO: 55737 - protein, 146 aa, Homo sapiens
  Payload ID: 10973
  Gene Symbol: NDFIP2
  Gene Name: Nedd4 family interacting protein 2
  ENSP ID: ENSP00000419776
MDHHQPGTGRYQVLLNEEDNSESSAIEQPPTSNPAPQIVQAASSAPALETDSSPPPYSSITVEVPTTSDTEVYGEFYPVPPPYSVATSLPTYDEAEKAKAAAMAAAAAETSQRIQEEECPPRDDFSDADQLRVGNDGIFMLAFFIF

SEQ ID NO: 55738 - protein, 336 aa, Homo sapiens; identical to SEQ ID NO: 55735
  Payload ID: 10973
  Gene Symbol: NDFIP2
  Gene Name: Nedd4 family interacting protein 2
  Uniprot ID: Q9NV92
  ENSP ID: ENSP00000480798

SEQ ID NO: 55739 - protein, 242 aa, Homo sapiens
  Payload ID: 10973
  Gene Symbol: NDFIP2
  Gene Name: Nedd4 family interacting protein 2
  ENSP ID: ENSP00000480881
MDHHQPGTGRYQVLLNEEDNSESSAIEQPPTSNPAPQIVQAASSAPALETDSSPPPYSSITVEVPTTSDTEVYGEFYPVPPPYSVATSLPTYDEAEKAKAAAMAAAAAETSQRIQEEECPPRDDFSDADQLRVGNDGIFMLAFFMAFIFNWLGFCLSFCITNTIAGRYGAICGFGLSLIKWILIVRFSDYFTGYFNGQYWLWWIFLVLGLLLFFRGFVNYLKVRNMSESMAAAHRTRYFFLL

SEQ ID NO: 55740 - protein, 534 aa, Homo sapiens
  Payload ID: 10974
  Gene Symbol: NAE1
  Gene Name: NEDD8 activating enzyme E1 subunit 1
  Uniprot ID: Q13564
  ENSP ID: ENSP00000290810
MAQLGKLLKEQKYDRQLRLWGDHGQEALESAHVCLINATATGTEILKNLVLPGIGSFTIIDGNQVSGEDAGNNFFLQRSSIGKNRAEAAMEFLQELNSDVSGSFVEESPENLLDNDPSFFCRFTVVVATQLPESTSLRLADVLWNSQIPLLICRTYGLVGYMRIIIKEHPVIESHPDNALEDLRLDKPFPELREHFQSYDLDHMEKKDHSHTPWIVIIAKYLAQWYSETNGRIPKTYKEKEDFRDLIRQGILKNENGAPEDEENFEEAIKNVNTALNTTQIPSSIEDIFNDDRCINITKQTPSFWILARALKEFVAKEGQGNLPVRGTIPDMIADSGKYIKLQNVYREKAKKDAAAVGNHVAKLLQSIGQAPESISEKELKLLCSNSAFLRVVRCRSLAEEYGLDTINKDEIISSMDNPDNEIVLYLMLRAVDRFHKQQGRYPGVSNYQVEEDIGKLKSCLTGFLQEYGLSVMVKDDYVHEFCRYGAAEPHTIAAFLGGAAAQEVIKIITKQFVIFNNTYIYSGMSQTSATFQL

SEQ ID NO: 55741 - protein, 537 aa, Homo sapiens
  Payload ID: 10974
  Gene Symbol: NAE1
  Gene Name: NEDD8 activating enzyme E1 subunit 1
  Uniprot ID: Q13564
  ENSP ID: ENSP00000351990
MAQLGKLLKEQKYDRQLRLWGDHGQEALESAHVCLINATATGTEILKNLVLPGNVGIGSFTIIDGNQVSGEDAGNNFFLQRSSIGKNRAEAAMEFLQELNSDVSGSFVEESPENLLDNDPSFFCRFTVVVATQLPESTSLRLADVLWNSQIPLLICRTYGLVGYMRIIIKEHPVIESHPDNALEDLRLDKPFPELREHFQSYDLDHMEKKDHSHTPWIVIIAKYLAQWYSETNGRIPKTYKEKEDFRDLIRQGILKNENGAPEDEENFEEAIKNVNTALNTTQIPSSIEDIFNDDRCINITKQTPSFWILARALKEFVAKEGQGNLPVRGTIPDMIADSGKYIKLQNVYREKAKKDAAAVGNHVAKLLQSIGQAPESISEKELKLLCSNSAFLRVVRCRSLAEEYGLDTINKDEIISSMDNPDNEIVLYLMLRAVDRFHKQQGRYPGVSNYQVEEDIGKLKSCLTGFLQEYGLSVMVKDDYVHEFCRYGAAEPHTIAAFLGGAAAQEVIKIITKQFVIFNNTYIYSGMSQTSATFQL

SEQ ID NO: 55742 - protein, 528 aa, Homo sapiens
  Payload ID: 10974
  Gene Symbol: NAE1
  Gene Name: NEDD8 activating enzyme E1 subunit 1
  Uniprot ID: Q13564
  ENSP ID: ENSP00000368776
MDAQQTKTNEARLWGDHGQEALESAHVCLINATATGTEILKNLVLPGIGSFTIIDGNQVSGEDAGNNFFLQRSSIGKNRAEAAMEFLQELNSDVSGSFVEESPENLLDNDPSFFCRFTVVVATQLPESTSLRLADVLWNSQIPLLICRTYGLVGYMRIIIKEHPVIESHPDNALEDLRLDKPFPELREHFQSYDLDHMEKKDHSHTPWIVIIAKYLAQWYSETNGRIPKTYKEKEDFRDLIRQGILKNENGAPEDEENFEEAIKNVNTALNTTQIPSSIEDIFNDDRCINITKQTPSFWILARALKEFVAKEGQGNLPVRGTIPDMIADSGKYIKLQNVYREKAKKDAAAVGNHVAKLLQSIGQAPESISEKELKLLCSNSAFLRVVRCRSLAEEYGLDTINKDEIISSMDNPDNEIVLYLMLRAVDRFHKQQGRYPGVSNYQVEEDIGKLKSCLTGFLQEYGLSVMVKDDYVHEFCRYGAAEPHTIAAFLGGAAAQEVIKIITKQFVIFNNTYIYSGMSQTSATFQL

SEQ ID NO: 55743 - protein, 445 aa, Homo sapiens
  Payload ID: 10974
  Gene Symbol: NAE1
  Gene Name: NEDD8 activating enzyme E1 subunit 1
  Uniprot ID: Q13564
  ENSP ID: ENSP00000377637
MEFLQELNSDVSGSFVEESPENLLDNDPSFFCRFTVVVATQLPESTSLRLADVLWNSQIPLLICRTYGLVGYMRIIIKEHPVIESHPDNALEDLRLDKPFPELREHFQSYDLDHMEKKDHSHTPWIVIIAKYLAQWYSETNGRIPKTYKEKEDFRDLIRQGILKNENGAPEDEENFEEAIKNVNTALNTTQIPSSIEDIFNDDRCINITKQTPSFWILARALKEFVAKEGQGNLPVRGTIPDMIADSGKYIKLQNVYREKAKKDAAAVGNHVAKLLQSIGQAPESISEKELKLLCSNSAFLRVVRCRSLAEEYGLDTINKDEIISSMDNPDNEIVLYLMLRAVDRFHKQQGRYPGVSNYQVEEDIGKLKSCLTGFLQEYGLSVMVKDDYVHEFCRYGAAEPHTIAAFLGGAAAQEVIKIITKQFVIFNNTYIYSGMSQTSATFQL

SEQ ID NO: 55744 - protein, 23 aa, Homo sapiens
  Payload ID: 10974
  Gene Symbol: NAE1
  Gene Name: NEDD8 activating enzyme E1 subunit 1
  ENSP ID: ENSP00000454471
MAQLGKLLKEQKYDRQLRVQKTF

SEQ ID NO: 55745 - protein, 109 aa, Homo sapiens
  Payload ID: 10974
  Gene Symbol: NAE1
  Gene Name: NEDD8 activating enzyme E1 subunit 1
  ENSP ID: ENSP00000454506
MAQLGKLLKEQKYDRQLSTSLRLADVLWNSQIPLLICRTYGLVGYMRIIIKEHPVIESHPDNALEDLRLDKPFPELREHFQSYDLDHMEKKDHSHTPWIVIIAKYLAQW

SEQ ID NO: 55746 - protein, 25 aa, Homo sapiens
  Payload ID: 10974
  Gene Symbol: NAE1
  Gene Name: NEDD8 activating enzyme E1 subunit 1
  ENSP ID: ENSP00000455562
MAQLGKLLKEQKYDRQLRYWFVYNY

SEQ ID NO: 55747 - protein, 167 aa, Homo sapiens
  Payload ID: 10974
  Gene Symbol: NAE1
  Gene Name: NEDD8 activating enzyme E1 subunit 1
  ENSP ID: ENSP00000455967
MAQLGKLLKEQKYDRQLRRSLALSPRLECSGAISAHFKLRLLGSRHSSASASELWGDHGQEALESAHVCLINATATGTEILKNLVLPGIGSFTIIDGNQVSGEDAGNNFFLQRSSIGKNRAEAAMEFLQELNSDVSGSFVEESPENLLDNDPSFFCRFTVVVATQLP

SEQ ID NO: 55748 - protein, 64 aa, Homo sapiens
  Payload ID: 10974
  Gene Symbol: NAE1
  Gene Name: NEDD8 activating enzyme E1 subunit 1
  ENSP ID: ENSP00000456564
MAQLGKLLKEQKYDRQLRRFLHTFDSCLGPYGAYSGVERWMLSKQKQMKPGTVACACSPSNSRG

SEQ ID NO: 55749 - protein, 85 aa, Homo sapiens
  Payload ID: 10974
  Gene Symbol: NAE1
  Gene Name: NEDD8 activating enzyme E1 subunit 1
  ENSP ID: ENSP00000456847
MAQLGKLLKEQKYDRQLRLWGDHGQEALESAHVCLINATATGTEILKNLVLPGIGSFTIIDGNQVSGEDAGNKTELKLPWNSYKN

SEQ ID NO: 55750 - protein, 162 aa, Homo sapiens
  Payload ID: 10974
  Gene Symbol: NAE1
  Gene Name: NEDD8 activating enzyme E1 subunit 1
  ENSP ID: ENSP00000462040
MDAQQTKTNEARLWGDHGQEALESAHVCLINATATGTEILKNLVLPGIGSFTIIDGNQVSGEDAGNNFFLQRSSIGKNRAEAAMEFLQELNSDVSGSFVEESPENLLDNDPSFFCRFTVVVATQLPESTSLRLADVLWNSQIPLLICRTYGLVGYMRIIIKE

SEQ ID NO: 55751 - protein, 129 aa, Homo sapiens
  Payload ID: 10974
  Gene Symbol: NAE1
  Gene Name: NEDD8 activating enzyme E1 subunit 1
  ENSP ID: ENSP00000462937
APESISEKELKLLCSNSAFLRVVRCRSLAEEYGLDTINKDEIISSMDNPDNEIVLYLMLRAVDRFHKQQGRYPGVSNYQVEEDIGKLKSCLTGFLQEYGLSVMVKDDYVHELSCCSRGHQNNHQTICNF

SEQ ID NO: 55752 - protein, 112 aa, Homo sapiens
  Payload ID: 10974
  Gene Symbol: NAE1
  Gene Name: NEDD8 activating enzyme E1 subunit 1
  ENSP ID: ENSP00000463546
FHKQQGRYPGVSNYQVEEDIGKLKSCLTGFLQEYGLSVMVKDDYVHELLIKIHVSVVSFSCRYGAAEPHTIAAFLGGAAAQEVIKIITKQFVIFNNTYIYSGMSQTSATFQL

SEQ ID NO: 55753 - protein, 124 aa, Homo sapiens
  Payload ID: 10974
  Gene Symbol: NAE1
  Gene Name: NEDD8 activating enzyme E1 subunit 1
  ENSP ID: ENSP00000464119
MEFLQELNSDVSGSFVEESPENLLDNDPSFFCRFTVVVATQLPESTSLRLADVLWNSQIPLLICRTYGLVGYMRIIIKEHPVIESHPDNALEDLRLDKPFPELREHFQSYDLDHMEKKDHSHTP

SEQ ID NO: 55754 - protein, 170 aa, Homo sapiens
  Payload ID: 10975
  Gene Symbol: NEDD8-MDP1
  Gene Name: NEDD8-MDP1 readthrough
  ENSP ID: ENSP00000431482
MLIKVKTLTGKEIEIDIEPTDKVERIKERVEEKEGIPPQQQRLIYSGKQIDGTVRDRRGQDVRLYPEVPEVLKRLQSLGVPGAAASRTSEIEGANQLLELFDLFRYFVHREIYPGSKITHFERLQQKTGIPFSQMIFFDDERRNIVDVSKLGVTCIHIQNGMNLQTLSQG

SEQ ID NO: 55755 - protein, 67 aa, Homo sapiens
  Payload ID: 10975
  Gene Symbol: NEDD8-MDP1
  Gene Name: NEDD8-MDP1 readthrough
  ENSP ID: ENSP00000432117
MLIKVKTLTGKEIEIDIEPTDKVERIKERVEEKEGIPPQQQRLIYSGKQILHSLAFLGRHARRPSVP

SEQ ID NO: 55756 - protein, 84 aa, Homo sapiens
  Payload ID: 10975
  Gene Symbol: NEDD8-MDP1
  Gene Name: NEDD8-MDP1 readthrough
  ENSP ID: ENSP00000474249
MLIKVKTLTGKEIEIDIEPTDKVERIKERVEEKEGIPPQQQRLIYSGKQMNDEKTAADYKILVMELYEIGGAKTSDCTQRCLRS

SEQ ID NO: 55757 - protein, 86 aa, Homo sapiens
  Payload ID: 10976
  Gene Symbol: NELFA
  Gene Name: negative elongation factor complex member A
  ENSP ID: ENSP00000330311
MASMRESDTGLWLHNKLGATDELWAPPSIASLLTAAVIDNIRLCFHGLSSAVKLKLLLGTLHLPRRTVDEWVSVKRLPCCHWSAST

SEQ ID NO: 55758 - protein, 539 aa, Homo sapiens
  Payload ID: 10976
  Gene Symbol: NELFA
  Gene Name: negative elongation factor complex member A
  ENSP ID: ENSP00000372335
MPGQRRALSPKMASMRESDTGLWLHNKLGATDELWAPPSIASLLTAAVIDNIRLCFHGLSSAVKLKLLLGTLHLPRRTVDEMKGALMEIIQLASLDSDPWVLMVADILKSFPDTGSLNLELEEQNPNVQDILGELREKVGECEASAMLPLECQYLNKNALTTLAGPLTPPVKHFQLKRKPKSATLRAELLQKSTETAQQLKRSAGVPFHAKGRGLLRKMDTTTPLKGIPKQAPFRSPTAPSVFSPTGNRTPIPPSRTLLRKERGVKLLDISELDMVGAGREAKRRRKTLDAEVVEKPAKEETVVENATPDYAAGLVSTQKLGSLNNEPALPSTSYLPSTPSVVPASSYIPSSETPPAPSSREASRPPEEPSAPSPTLPAQFKQRAPMYNSGLSPATPTPAAPTSPLTPTTPPAVAPTTQTPPVAMVAPQTQAPAQQQPKKNLSLTREQMFAAQEMFKTANKVTRPEKALILGFMAGSRENPCQEQGDVIQIKLSEHTEDLPKADGQGSTTMLVDTVFEMNYATGQWTRFKKYKPMTNVS

SEQ ID NO: 55759 - protein, 532 aa, Homo sapiens
  Payload ID: 10976
  Gene Symbol: NELFA
  Gene Name: negative elongation factor complex member A
  ENSP ID: ENSP00000387647
RKAWGWGFSPGVWTGQGAVVHPQRQPAQLSHTVSSPVGAWQRHRHAMAWLSAFPRGRGFMWPKQALVWMDLASQMKGALMEIIQLASLDSDPWVLMVADILKSFPDTGSLNLELEEQNPNVQDILGELREKVGECEASAMLPLECQYLNKNALTTLAGPLTPPVKHFQLKRKPKSATLRAELLQKSTETAQQLKRSAGVPFHAKGRGLLRKMDTTTPLKGIPKQAPFRSPTAPSVFSPTGNRTPIPPSRTLLRKERGVKLLDISELDMVGAGREAKRRRKTLDAEVVEKPAKEETVVENATPDYAAGLVSTQKLGSLNNEPALPSTSYLPSTPSVVPASSYIPSSETPPAPSSREASRPPEEPSAPSPTLPAQFKQRAPMYNSGLSPATPTPAAPTSPLTPTTPPAVAPTTQTPPVAMVAPQTQAPAQQQPKKNLSLTREQMFAAQEMFKTANKVTRPEKALILGFMAGSRENPCQEQGDVIQIKLSEHTEDLPKADGQGSTTMLVDTVFEMNYATGQWTRFKKYKPMTNVS

SEQ ID NO: 55760 - protein, 102 aa, Homo sapiens
  Payload ID: 10976
  Gene Symbol: NELFA
  Gene Name: negative elongation factor complex member A
  ENSP ID: ENSP00000387776
MASMRESDTGLWLHNKLGATDELWAPPSIASLLTAAVIDNIRLCFHGLSSAVKLKLLLGTLHLPRRTVDEGLALSTRLECSGTIVTHCSLDLLTSDLPISAS

SEQ ID NO: 55761 - protein, 294 aa, Homo sapiens
  Payload ID: 10976
  Gene Symbol: NELFA
  Gene Name: negative elongation factor complex member A
  ENSP ID: ENSP00000395761
MPGQRRALSPKMASMRESDTGLWLHNKLGATDELWAPPSIASLLTAAVIDNIRLCFHGLSSAVKLKLLLGTLHLPRRTVDEHPILQMKGALMEIIQLASLDSDPWVLMVADILKSFPDTGSLNLELEEQNPNVQDILGELREKVGECEASAMLPLECQYLNKNALTTLAGPLTPPVKHFQLKRKPKSATLRAELLQKSTETAQQLKRSAGVPFHAKGRGLLRKMDTTTPLKGIPKQAPFRSPTAPSVFSPTGNRTPIPPSRTLLRKERGVKLLDISELDMVGAGREAKRRRKTL

SEQ ID NO: 55762 - protein, 187 aa, Homo sapiens
  Payload ID: 10976
  Gene Symbol: NELFA
  Gene Name: negative elongation factor complex member A
  ENSP ID: ENSP00000396996
  MOD_RES (1)..(1): Any amino acid
XLCFHGLSSAVKLKLLLGTLHLPRRTVDETPAVRSALCPFYSFLHAVLRHSNKWMKGALMEIIQLASLDSDPWVLMVADILKSFPDTGSLNLELEEQNPNVQDILGELREKVGECEASAMLPLECQYLNKNALTTLAGPLTPPVKHFQLKRKPKSATLRAELLQKSTETAQQLKRSAGVPFHAKGRG

SEQ ID NO: 55763 - protein, 528 aa, Homo sapiens
  Payload ID: 10976
  Gene Symbol: NELFA
  Gene Name: negative elongation factor complex member A
  Uniprot ID: Q9H3P2
  ENSP ID: ENSP00000399165
MASMRESDTGLWLHNKLGATDELWAPPSIASLLTAAVIDNIRLCFHGLSSAVKLKLLLGTLHLPRRTVDEMKGALMEIIQLASLDSDPWVLMVADILKSFPDTGSLNLELEEQNPNVQDILGELREKVGECEASAMLPLECQYLNKNALTTLAGPLTPPVKHFQLKRKPKSATLRAELLQKSTETAQQLKRSAGVPFHAKGRGLLRKMDTTTPLKGIPKQAPFRSPTAPSVFSPTGNRTPIPPSRTLLRKERGVKLLDISELDMVGAGREAKRRRKTLDAEVVEKPAKEETVVENATPDYAAGLVSTQKLGSLNNEPALPSTSYLPSTPSVVPASSYIPSSETPPAPSSREASRPPEEPSAPSPTLPAQFKQRAPMYNSGLSPATPTPAAPTSPLTPTTPPAVAPTTQTPPVAMVAPQTQAPAQQQPKKNLSLTREQMFAAQEMFKTANKVTRPEKALILGFMAGSRENPCQEQGDVIQIKLSEHTEDLPKADGQGSTTMLVDTVFEMNYATGQWTRFKKYKPMTNVS

SEQ ID NO: 55764 - protein, 246 aa, Homo sapiens
  Payload ID: 10976
  Gene Symbol: NELFA
  Gene Name: negative elongation factor complex member A
  ENSP ID: ENSP00000405119
  MOD_RES (1)..(1): Any amino acid
XRSCLRSVPRAGRLRPVNSHVPACAFSPVGECEASAMLPLECQYLNKNALTTLAGPLTPPVKHFQLKRKPKSATLRAELLQKSTETAQQLKRSAGVPFHAKGRGLLRKMDTTTPLKGIPKQAPFRSPTAPSVFSPTGNRTPIPPSRTLLRKERGVKLLDISELDMVGAGREAKRRRKTLDAEVVEKPAKEETVVENATPDYAAGLVSTQKLGSLNNEPALPSTSYLPSTPSVVPASSYIPSSETPP

SEQ ID NO: 55765 - protein, 125 aa, Homo sapiens
  Payload ID: 10976
  Gene Symbol: NELFA
  Gene Name: negative elongation factor complex member A
  ENSP ID: ENSP00000406844
  MOD_RES (1)..(1): Any amino acid
XSDTGLWLHNKLGATDELWAPPSIASLLTAAVIDNIRLCFHGLSSAVKLKLLLGTLHLPRRTVDETPAVRSALCPFYSFLHAVLRHSNKWVCEGLALSTRLECSGTIVTHCSLDLLTSDLPISAS

SEQ ID NO: 55766 - protein, 208 aa, Homo sapiens
  Payload ID: 10976
  Gene Symbol: NELFA
  Gene Name: negative elongation factor complex member A
  ENSP ID: ENSP00000410154
MKGALMEIIQLASLDSDPWVLMVADILKSFPDTGSLNLELEEQNPNVQDILGELREKVGECEASAMLPLECQYLNKNALTTLAGPLTPPVKHFQLKRKPKSATLRAELLQKSTETAQQLKRSAGVPFHAKGRGLLRKMDTTTPLKGIPKQAPFRSPTAPSVFSPTGNRTPIPPSRTLLRKERGVKLLDISELDMVGAGREAKRRRKTL

SEQ ID NO: 55767 - protein, 65 aa, Homo sapiens
  Payload ID: 10976
  Gene Symbol: NELFA
  Gene Name: negative elongation factor complex member A
  ENSP ID: ENSP00000410963
IDNIRLCFHGLSSAVKLKLLLGTLHLPRRTVDEGLALSTRLECSGTIVTHCSLDLLTSDLPISAS

SEQ ID NO: 55768 - protein, 539 aa, Homo sapiens; identical to SEQ ID NO: 55758
  Payload ID: 10976
  Gene Symbol: NELFA
  Gene Name: negative elongation factor complex member A
  ENSP ID: ENSP00000445757

SEQ ID NO: 55769 - protein, 628 aa, Homo sapiens
  Payload ID: 10977
  Gene Symbol: NELFB
  Gene Name: negative elongation factor complex member B
  Uniprot ID: Q8WX92
  ENSP ID: ENSP00000339495
LAELEGAGERGSGGPRGPAERASGVSAAAPGERAGDGAPSRAVAGASAMFAGLQDLGVANGEDLKETLTNCTEPLKAIEQFQTENGVLLPSLQSALPFLDLHGTPRLEFHQSVFDELRDKLLERVSAIASEGKAEERYKKLEDLLEKSFSLVKMPSLQPVVMCVMKHLPKVPEKKLKLVMADKELYRACAVEVKRQIWQDNQALFGDEVSPLLKQYILEKESALFSTELSVLHNFFSPSPKTRRQGEVVQRLTRMVGKNVKLYDMVLQFLRTLFLRTRNVHYCTLRAELLMSLHDLDVGEICTVDPCHKFTWCLDACIRERFVDSKRARELQGFLDGVKKGQEQVLGDLSMILCDPFAINTLALSTVRHLQELVGQETLPRDSPDLLLLLRLLALGQGAWDMIDSQVFKEPKMEVELITRFLPMLMSFLVDDYTFNVDQKLPAEEKAPVSYPNTLPESFTKFLQEQRMACEVGLYYVLHITKQRNKNALLRLLPGLVETFGDLAFGDIFLHLLTGNLALLADEFALEDFCSSLFDGFFLTASPRKENVHRHALRLLIHLHPRVAPSKLEALQKALEPTGQSGEAVKELYSQLGEKLEQLDHRKPSPAQAAETPALELPLPSVPAPAPL

SEQ ID NO: 55770 - protein, 580 aa, Homo sapiens
  Payload ID: 10977
  Gene Symbol: NELFB
  Gene Name: negative elongation factor complex member B
  ENSP ID: ENSP00000489248
MFAGLQDLGVANGEDLKETLTNCTEPLKAIEQFQTENGVLLPSLQSALPFLDLHGTPRLEFHQSVFDELRDKLLERVSAIASEGKAEERYKKLEDLLEKSFSLVKMPSLQPVVMCVMKHLPKVPEKKLKLVMADKELYRACAVEVKRQIWQDNQALFGDEVSPLLKQYILEKESALFSTELSVLHNFFSPSPKTRRQGEVVQRLTRMVGKNVKLYDMVLQFLRTLFLRTRNVHYCTLRAELLMSLHDLDVGEICTVDPCHKFTWCLDACIRERFVDSKRARELQGFLDGVKKGQEQVLGDLSMILCDPFAINTLALSTVRHLQELVGQETLPRDSPDLLLLLRLLALGQGAWDMIDSQVFKEPKMEVELITRFLPMLMSFLVDDYTFNVDQKLPAEEKAPVSYPNTLPESFTKFLQEQRMACEVGLYYVLHITKQRNKNALLRLLPGLVETFGDLAFGDIFLHLLTGNLALLADEFALEDFCSSLFDGFFLTASPRKENVHRHALRLLIHLHPRVAPSKLEALQKALEPTGQSGEAVKELYSQLGEKLEQLDHRKPSPAQAAETPALELPLPSVPAPAPL

SEQ ID NO: 55771 - protein, 473 aa, Homo sapiens
  Payload ID: 10978
  Gene Symbol: NELFCD
  Gene Name: negative elongation factor complex member C/D
  Uniprot ID: Q8IXH7
  ENSP ID: ENSP00000342300
MAGAVPGAIMDEDYYGSAAEWGDEADGGQQEDDSGEGEDDAEVQQECLHKFSTRDYIMEPSIFNTLKRYFQAGGSPENVIQLLSENYTAVAQTVNLLAEWLIQTGVEPVQVQETVENHLKSLLIKHFDPRKADSIFTEEGETPAWLEQMIAHTTWRDLFYKLAEAHPDCLMLNFTVKLISDAGYQGEITSVSTACQQLEVFSRVLRTSLATILDGGEENLEKNLPEFAKMVCHGEHTYLFAQAMMSVLAQEEQGGSAVRRIAQEVQRFAQEKGHDASQITLALGTAASYPRACQALGAMLSKGALNPADITVLFKMFTSMDPPPVELIRVPAFLDLFMQSLFKPGARINQDHKHKYIHILAYAASVVETWKKNKRVSINKDELKSTSKAVETVHNLCCNENKGASELVAELSTLYQCIRFPVVAMGVLKWVDWTVSEPRYFQLQTDHTPVHLALLDEISTCTSSAPPGPAAAC

SEQ ID NO: 55772 - protein, 593 aa, Homo sapiens
  Payload ID: 10978
  Gene Symbol: NELFCD
  Gene Name: negative elongation factor complex member C/D
  ENSP ID: ENSP00000436783
  MOD_RES (1)..(1): Any amino acid
XEGMAGAVPGAIMDEDYYGSAAEWGDEADGGQQEDDSGEGEDDAEVQQECLHKFSTRDYIMEPSIFNTLKRYFQAGGSPENVIQLLSENYTAVAQTVNLLAEWLIQTGVEPVQVQETVENHLKSLLIKHFDPRKADSIFTEEGETPAWLEQMIAHTTWRDLFYKLAEAHPDCLMLNFTVKLISDAGYQGEITSVSTACQQLEVFSRVLRTSLATILDGGEENLEKNLPEFAKMVCHGEHTYLFAQAMMSVLAQEEQGGSAVRRIAQEVQRFAQEKGHDASQITLALGTAASYPRACQALGAMLSKGALNPADITVLFKMFTSMDPPPVELIRVPAFLDLFMQSLFKPGARINQDHKHKYIHILAYAASVVETWKKNKRVSINKDELKSTSKAVETVHNLCCNENKGASELVAELSTLYQCIRFPVVAMGVLKWVDWTVSEPRYFQLQTDHTPVHLALLDEISTCHQLLHPQVLQLLVKLFETEHSQLDVMEQLELKKTLLDRMVHLLSRGYVLPVVSYIRKCLEKLDTDISLIRYFVTEVLDVIAPPYTSDFVQLFLPILENDSIAGTIKTEGEHDPVTEFIAHCKSNFIMVN

SEQ ID NO: 55773 - protein, 599 aa, Homo sapiens
  Payload ID: 10978
  Gene Symbol: NELFCD
  Gene Name: negative elongation factor complex member C/D
  ENSP ID: ENSP00000473290
MRRARSREGMAGAVPGAIMDEDYYGSAAEWGDEADGGQQEDDSGEGEDDAEVQQECLHKFSTRDYIMEPSIFNTLKRYFQAGGSPENVIQLLSENYTAVAQTVNLLAEWLIQTGVEPVQVQETVENHLKSLLIKHFDPRKADSIFTEEGETPAWLEQMIAHTTWRDLFYKLAEAHPDCLMLNFTVKLISDAGYQGEITSVSTACQQLEVFSRVLRTSLATILDGGEENLEKNLPEFAKMVCHGEHTYLFAQAMMSVLAQEEQGGSAVRRIAQEVQRFAQEKGHDASQITLALGTAASYPRACQALGAMLSKGALNPADITVLFKMFTSMDPPPVELIRVPAFLDLFMQSLFKPGARINQDHKHKYIHILAYAASVVETWKKNKRVSINKDELKSTSKAVETVHNLCCNENKGASELVAELSTLYQCIRFPVVAMGVLKWVDWTVSEPRYFQLQTDHTPVHLALLDEISTCHQLLHPQVLQLLVKLFETEHSQLDVMEQLELKKTLLDRMVHLLSRGYVLPVVSYIRKCLEKLDTDISLIRYFVTEVLDVIAPPYTSDFVQLFLPILENDSIAGTIKTEGEHDPVTEFIAHCKSNFIMVN

SEQ ID NO: 55774 - protein, 387 aa, Homo sapiens
  Payload ID: 10979
  Gene Symbol: NELFE
  Gene Name: negative elongation factor complex member E
  Uniprot ID: P18615
  ENSP ID: ENSP00000364574
MVPKGATMLVIPPGLSEEEEALQKKFNKLKKKKKALLALKKQSSSSTTSQGGVKRSLSEQPVMDTATATEQAKQLVKSGAISAIKAETKNSGFKRSRTLEGKLKDPEKGPVPTFQPFQRSISADDDLQESSRRPQRKSLYESFVSSSDRLRELGPDGEEAEGPGAGDGPPRSFDWGYEERSGAHSSASPPRSRSRDRSHERNRDRDRDRERDRDRDRDRDRERDRDRDRDRDRDRERDRDRERDRDRDREGPFRRSDSFPERRAPRKGNTLYVYGEDMTPTLLRGAFSPFGNIIDLSMDPPRNCAFVTYEKMESADQAVAELNGTQVESVQLKVNIARKQPMLDAATGKSVWGSLAVQNSPKGCHRDKRTQIVYSDDVYKENLVDGF

SEQ ID NO: 55775 - protein, 380 aa, Homo sapiens
  Payload ID: 10979
  Gene Symbol: NELFE
  Gene Name: negative elongation factor complex member E
  Uniprot ID: P18615
  ENSP ID: ENSP00000364578
MLVIPPGLSEEEEALQKKFNKLKKKKKALLALKKQSSSSTTSQGGVKRSLSEQPVMDTATATEQAKQLVKSGAISAIKAETKNSGFKRSRTLEGKLKDPEKGPVPTFQPFQRSISADDDLQESSRRPQRKSLYESFVSSSDRLRELGPDGEEAEGPGAGDGPPRSFDWGYEERSGAHSSASPPRSRSRDRSHERNRDRDRDRERDRDRDRDRDRERDRDRDRDRDRDRERDRDRERDRDRDREGPFRRSDSFPERRAPRKGNTLYVYGEDMTPTLLRGAFSPFGNIIDLSMDPPRNCAFVTYEKMESADQAVAELNGTQVESVQLKVNIARKQPMLDAATGKSVWGSLAVQNSPKGCHRDKRTQIVYSDDVYKENLVDGF

SEQ ID NO: 55776 - protein, 380 aa, Homo sapiens; identical to SEQ ID NO: 55775
  Payload ID: 10979
  Gene Symbol: NELFE
  Gene Name: negative elongation factor complex member E
  Uniprot ID: P18615
  ENSP ID: ENSP00000372660

SEQ ID NO: 55777 - protein, 380 aa, Homo sapiens; identical to SEQ ID NO: 55775
  Payload ID: 10979
  Gene Symbol: NELFE
  Gene Name: negative elongation factor complex member E
  Uniprot ID: P18615
  ENSP ID: ENSP00000372834

SEQ ID NO: 55778 - protein, 350 aa, Homo sapiens
  Payload ID: 10979
  Gene Symbol: NELFE
  Gene Name: negative elongation factor complex member E
  Uniprot ID: P18615
  ENSP ID: ENSP00000388400
MLVIPPGLSEEEEALQKKFNKLKKKKKALLALKKQSSSSTTSQGGVKRSLSEQPVMDTATATEQAKQLVKSGAISAIKAETKNSGFKRSRTLEGKLKDPEKGPVPTFQPFQRSISADDDLQESSRRPQRKSLYESFDWGYEERSGAHSSASPPRSRSRDRSHERNRDRDRDRERDRDRDRDRDRERDRDRDRDRDRDRERDRDRERDRDRDREGPFRRSDSFPERRAPRKGNTLYVYGEDMTPTLLRGAFSPFGNIIDLSMDPPRNCAFVTYEKMESADQAVAELNGTQVESVQLKVNIARKQPMLDAATGKSVWGSLAVQNSPKGCHRDKRTQIVYSDDVYKENLVDGF

SEQ ID NO: 55779 - protein, 159 aa, Homo sapiens
  Payload ID: 10979
  Gene Symbol: NELFE
  Gene Name: negative elongation factor complex member E
  ENSP ID: ENSP00000390689
MLVIPPGLSEEEEALQKKFNKLKKKKKALLALKKQSSSSTTSQGGVKRSLSEQPVMDTATATEQAKQLVKSGAISAIKAETKNSGFKRSRTLEGKLKDPEKGPVPTFQPFQRSISADDDLQESSRRPQRKSLYESFVSSSDRLRELGPDGEEAEGPGAG

SEQ ID NO: 55780 - protein, 380 aa, Homo sapiens; identical to SEQ ID NO: 55775
  Payload ID: 10979
  Gene Symbol: NELFE
  Gene Name: negative elongation factor complex member E
  Uniprot ID: P18615
  ENSP ID: ENSP00000393005

SEQ ID NO: 55781 - protein, 333 aa, Homo sapiens
  Payload ID: 10979
  Gene Symbol: NELFE
  Gene Name: negative elongation factor complex member E
  ENSP ID: ENSP00000393103
MLVIPPGLSEEEEALQKKFNKLKKKKKALLALKKQSSSSTTSQGGVKRSLSEQPVMDTATATEQAKQLVKSGAISAIKAETKNSGFKRSRTLEGKLKDPEKGPVPTFQPFQRSISADDDLQESSRRPQRKSLYESDRLRELGPDGEEAEGPGAGDGPPRSFDWGYEERSGAHSSASPPRSRSRDRSHERNRDRDRDRERDRDRDRDRDRERDRDRDRDRDRDRERDRDRERDRDRDREGPFRRSDSFPERRAPRKGNTLYVYGEDMTPTLLRGAFSPFGNIIDLSMDPPRNCAFVTYEKMESADQAVAELNGTQVESVQLKVNIARKQPMLDA

SEQ ID NO: 55782 - protein, 240 aa, Homo sapiens
  Payload ID: 10979
  Gene Symbol: NELFE
  Gene Name: negative elongation factor complex member E
  ENSP ID: ENSP00000393793
MLVIPPGLSEEEEALQKKFNKLKKKKKALLALKKQSSSSTTSQGGVKRSLSEQPVMDTATATEQAKQLVKSGAISAIKAETKNSGFKRSRTLEGKLKDPEKGPVPTFQPFQRSISADDDLQESSRRPQRKSLYESDRLRELGPDGEEAEGPGAGDGPPRSFDWGYEERSGAHSSASPPRSRSRDRSHERNRDRDRDRERDRDRDRDRDRERDRDRDRDRDRDRERDRDRERDRDRDREGP

SEQ ID NO: 55783 - protein, 293 aa, Homo sapiens
  Payload ID: 10979
  Gene Symbol: NELFE
  Gene Name: negative elongation factor complex member E
  ENSP ID: ENSP00000393794
MLVIPPGLSEEEEALQKKFNKLKKKKKALLALKKQSSSSTTSQGGVKRSLSEQPVMDTATATEQAKQLVKSGAISAIKAETKNSGFKRSRTLEGKLKDPEKGPVPTFQPFQRSISADDDLQESSRRPQRKSLYESFVSSSDRLRELGPDGEEAEGPGAGDGPPRSFDWGYEERSGAHSSASPPRSRSRDRSHERNRDRDRDRERDRDRDRDRDRERDRDRDRDRDRDRERDRDRERDRDRDREGPFRRSDSFPERRAPRKGNTLYVYGEDMTPTLLRGAFSPFGNIIDLSMDP

SEQ ID NO: 55784 - protein, 159 aa, Homo sapiens; identical to SEQ ID NO: 55779
  Payload ID: 10979
  Gene Symbol: NELFE
  Gene Name: negative elongation factor complex member E
  ENSP ID: ENSP00000394340

SEQ ID NO: 55785 - protein, 380 aa, Homo sapiens; identical to SEQ ID NO: 55775
  Payload ID: 10979
  Gene Symbol: NELFE
  Gene Name: negative elongation factor complex member E
  Uniprot ID: P18615
  ENSP ID: ENSP00000394879

SEQ ID NO: 55786 - protein, 240 aa, Homo sapiens; identical to SEQ ID NO: 55782
  Payload ID: 10979
  Gene Symbol: NELFE
  Gene Name: negative elongation factor complex member E
  ENSP ID: ENSP00000395175

SEQ ID NO: 55787 - protein, 240 aa, Homo sapiens; identical to SEQ ID NO: 55782
  Payload ID: 10979
  Gene Symbol: NELFE
  Gene Name: negative elongation factor complex member E
  ENSP ID: ENSP00000396604

SEQ ID NO: 55788 - protein, 240 aa, Homo sapiens; identical to SEQ ID NO: 55782
  Payload ID: 10979
  Gene Symbol: NELFE
  Gene Name: negative elongation factor complex member E
  ENSP ID: ENSP00000396971

SEQ ID NO: 55789 - protein, 293 aa, Homo sapiens; identical to SEQ ID NO: 55783
  Payload ID: 10979
  Gene Symbol: NELFE
  Gene Name: negative elongation factor complex member E
  ENSP ID: ENSP00000397565

SEQ ID NO: 55790 - protein, 333 aa, Homo sapiens; identical to SEQ ID NO: 55781
  Payload ID: 10979
  Gene Symbol: NELFE
  Gene Name: negative elongation factor complex member E
  ENSP ID: ENSP00000397914

SEQ ID NO: 55791 - protein, 159 aa, Homo sapiens; identical to SEQ ID NO: 55779
  Payload ID: 10979
  Gene Symbol: NELFE
  Gene Name: negative elongation factor complex member E
  ENSP ID: ENSP00000401342

SEQ ID NO: 55792 - protein, 333 aa, Homo sapiens; identical to SEQ ID NO: 55781
  Payload ID: 10979
  Gene Symbol: NELFE
  Gene Name: negative elongation factor complex member E
  ENSP ID: ENSP00000401745

SEQ ID NO: 55793 - protein, 380 aa, Homo sapiens; identical to SEQ ID NO: 55775
  Payload ID: 10979
  Gene Symbol: NELFE
  Gene Name: negative elongation factor complex member E
  Uniprot ID: P18615
  ENSP ID: ENSP00000403623

SEQ ID NO: 55794 - protein, 333 aa, Homo sapiens; identical to SEQ ID NO: 55781
  Payload ID: 10979
  Gene Symbol: NELFE
  Gene Name: negative elongation factor complex member E
  ENSP ID: ENSP00000403630

SEQ ID NO: 55795 - protein, 333 aa, Homo sapiens; identical to SEQ ID NO: 55781
  Payload ID: 10979
  Gene Symbol: NELFE
  Gene Name: negative elongation factor complex member E
  ENSP ID: ENSP00000407528

SEQ ID NO: 55796 - protein, 293 aa, Homo sapiens; identical to SEQ ID NO: 55783
  Payload ID: 10979
  Gene Symbol: NELFE
  Gene Name: negative elongation factor complex member E
  ENSP ID: ENSP00000407630

SEQ ID NO: 55797 - protein, 159 aa, Homo sapiens; identical to SEQ ID NO: 55779
  Payload ID: 10979
  Gene Symbol: NELFE
  Gene Name: negative elongation factor complex member E
  ENSP ID: ENSP00000409139

SEQ ID NO: 55798 - protein, 293 aa, Homo sapiens; identical to SEQ ID NO: 55783
  Payload ID: 10979
  Gene Symbol: NELFE
  Gene Name: negative elongation factor complex member E
  ENSP ID: ENSP00000409269

SEQ ID NO: 55799 - protein, 293 aa, Homo sapiens; identical to SEQ ID NO: 55783
  Payload ID: 10979
  Gene Symbol: NELFE
  Gene Name: negative elongation factor complex member E
  ENSP ID: ENSP00000409389

SEQ ID NO: 55800 - protein, 293 aa, Homo sapiens; identical to SEQ ID NO: 55783
  Payload ID: 10979
  Gene Symbol: NELFE
  Gene Name: negative elongation factor complex member E
  ENSP ID: ENSP00000410872

SEQ ID NO: 55801 - protein, 159 aa, Homo sapiens; identical to SEQ ID NO: 55779
  Payload ID: 10979
  Gene Symbol: NELFE
  Gene Name: negative elongation factor complex member E
  ENSP ID: ENSP00000411487

SEQ ID NO: 55802 - protein, 240 aa, Homo sapiens; identical to SEQ ID NO: 55782
  Payload ID: 10979
  Gene Symbol: NELFE
  Gene Name: negative elongation factor complex member E
  ENSP ID: ENSP00000411724

SEQ ID NO: 55803 - protein, 159 aa, Homo sapiens; identical to SEQ ID NO: 55779
  Payload ID: 10979
  Gene Symbol: NELFE
  Gene Name: negative elongation factor complex member E
  ENSP ID: ENSP00000414014

SEQ ID NO: 55804 - protein, 260 aa, Homo sapiens
  Payload ID: 10979
  Gene Symbol: NELFE
  Gene Name: negative elongation factor complex member E
  ENSP ID: ENSP00000414029
MLVIPPGLSEEEEALQKKFNKLKKKKKALLALKKQSSSSTTSQGGVKRSLSEQPVMDTATATEQAKQLVKSGAISAIKAETKNSGFKRSRTLEGKLKDPEKGPVPTFQPFQRSISADDDLQESSRRPQRKSLYESDRLRELGPDGEEAEGPGAGDGPPRSFDWGYEERSGAHSSASPPRSRSRDRSHERNRDRDRDRERDRDRDRDRDRERDRDRDRDRDRDRERDRDRERDRDRDREGPFRRSDSFPERRAPRKGNTLY

SEQ ID NO: 55805 - protein, 333 aa, Homo sapiens; identical to SEQ ID NO: 55781
  Payload ID: 10979
  Gene Symbol: NELFE
  Gene Name: negative elongation factor complex member E
  ENSP ID: ENSP00000415567

SEQ ID NO: 55806 - protein, 57 aa, Homo sapiens
  Payload ID: 10979
  Gene Symbol: NELFE
  Gene Name: negative elongation factor complex member E
  ENSP ID: ENSP00000419183
MLVIPPGLSEEEEALQKKFNKLKKKVRDCVWTWPNLSQTLHSEKIWEKGIAGSEEAK

SEQ ID NO: 55807 - protein, 36 aa, Homo sapiens
  Payload ID: 10979
  Gene Symbol: NELFE
  Gene Name: negative elongation factor complex member E
  ENSP ID: ENSP00000420205
MLVIPPGLSEEEEALQKKFNKLKKKTVSFLRVGTMH

SEQ ID NO: 55808 - protein, 36 aa, Homo sapiens; identical to SEQ ID NO: 55807
  Payload ID: 10979
  Gene Symbol: NELFE
  Gene Name: negative elongation factor complex member E
  ENSP ID: ENSP00000486074

SEQ ID NO: 55809 - protein, 36 aa, Homo sapiens; identical to SEQ ID NO: 55807
  Payload ID: 10979
  Gene Symbol: NELFE
  Gene Name: negative elongation factor complex member E
  ENSP ID: ENSP00000486432

SEQ ID NO: 55810 - protein, 36 aa, Homo sapiens; identical to SEQ ID NO: 55807
  Payload ID: 10979
  Gene Symbol: NELFE
  Gene Name: negative elongation factor complex member E
  ENSP ID: ENSP00000486647

SEQ ID NO: 55811 - protein, 36 aa, Homo sapiens; identical to SEQ ID NO: 55807
  Payload ID: 10979
  Gene Symbol: NELFE
  Gene Name: negative elongation factor complex member E
  ENSP ID: ENSP00000486884

SEQ ID NO: 55812 - protein, 36 aa, Homo sapiens; identical to SEQ ID NO: 55807
  Payload ID: 10979
  Gene Symbol: NELFE
  Gene Name: negative elongation factor complex member E
  ENSP ID: ENSP00000487225

SEQ ID NO: 55813 - protein, 36 aa, Homo sapiens; identical to SEQ ID NO: 55807
  Payload ID: 10979
  Gene Symbol: NELFE
  Gene Name: negative elongation factor complex member E
  ENSP ID: ENSP00000487402

SEQ ID NO: 55814 - protein, 692 aa, Homo sapiens
  Payload ID: 10980
  Gene Symbol: NRROS
  Gene Name: negative regulator of reactive oxygen species
  Uniprot ID: Q86YC3
  ENSP ID: ENSP00000328625
MELLPLWLCLGFHFLTVGWRNRSGTATAASQGVCKLVGGAADCRGQSLASVPSSLPPHARMLTLDANPLKTLWNHSLQPYPLLESLSLHSCHLERISRGAFQEQGHLRSLVLGDNCLSENYEETAAALHALPGLRRLDLSGNALTEDMAALMLQNLSSLRSVSLAGNTIMRLDDSVFEGLERLRELDLQRNYIFEIEGGAFDGLAELRHLNLAFNNLPCIVDFGLTRLRVLNVSYNVLEWFLATGGEAAFELETLDLSHNQLLFFPLLPQYSKLRTLLLRDNNMGFYRDLYNTSSPREMVAQFLLVDGNVTNITTVSLWEEFSSSDLADLRFLDMSQNQFQYLPDGFLRKMPSLSHLNLHQNCLMTLHIREHEPPGALTELDLSHNQLSELHLAPGLASCLGSLRLFNLSSNQLLGVPPGLFANARNITTLDMSHNQISLCPLPAASDRVGPPSCVDFRNMASLRSLSLEGCGLGALPDCPFQGTSLTYLDLSSNWGVLNGSLAPLQDVAPMLQVLSLRNMGLHSSFMALDFSGFGNLRDLDLSGNCLTTFPRFGGSLALETLDLRRNSLTALPQKAVSEQLSRGLRTIYLSQNPYDCCGVDGWGALQHGQTVADWAMVTCNLSSKIIRVTELPGGVPRDCKWERLDLGLLYLVLILPSCLTLLVACTVIVLTFKKPLLQVIKSRCHWSSVY

SEQ ID NO: 55815 - protein, 625 aa, Homo sapiens
  Payload ID: 10981
  Gene Symbol: NUB1
  Gene Name: negative regulator of ubiquitin-like proteins 1
  ENSP ID: ENSP00000398644
MKTNGGRCRIRALCWSRREWRGAGMAQKKYLQAKLTQFLREDRIQLWKPPYTDENKKVGLALKDLAKQYSDRLECCENEVEKVIEEIRCKAIERGTGNDNYRTTGIATIEVFLPPRLKKDRKNLLETRLHITGRELRSKIAETFGLQENYIKIVINKKQLQLGKTLEEQGVAHNVKAMVLELKQSEEDARKNFQLEEEEQNEAKLKEKQIQRTKRGLEILAKRAAETVVDPEMTPYLDIANQTGRSIRIPPSERKALMLAMGYHEKGRAFLKRKEYGIALPCLLDADKYFCECCRELLDTVDNYAVLQLDIVWCYFRLEQLECLDDAEKKLNLAQKCFKNCYGENHQRLVHIKGNCGKEKVLFLRLYLLQGIRNYHSGNDVEAYEYLNKARQLFKELYIDPSKVDNLLQLGFTAQEARLGLRACDGNVDHAATHITNRREELAQIRKEEKEKKRRRLENIRFLKGMGYSTHAAQQILLSNPQMWWLNDSNPETDNRQESPSQENIDRLVYMGFDALVAEAALRVFRGNVQLAAQTLAHNGGSLPPELPLSPEDSLSPPATSPSDSAGTSSASTDEDMETEAVNEILEDIPEHEEDYLDSTLEDEEIIIAEYLSYVENRKSATKKN

SEQ ID NO: 55816 - protein, 154 aa, Homo sapiens
  Payload ID: 10981
  Gene Symbol: NUB1
  Gene Name: negative regulator of ubiquitin-like proteins 1
  ENSP ID: ENSP00000418234
MAQKKYLQAKLTQFLREDRIQLWKPPYTDENKKVGLALKDLAKQYSDRLECCENEVEKVIEEIRCKAIERGTGNDNYRTTGIATIEVFLPPRLKKDRKNLLETRLHITGRELRSKIAETFGLQENYIKIVINKKQLQLGKTLEEQGVAHNVKAM

SEQ ID NO: 55817 - protein, 128 aa, Homo sapiens
  Payload ID: 10981
  Gene Symbol: NUB1
  Gene Name: negative regulator of ubiquitin-like proteins 1
  ENSP ID: ENSP00000419679
  MOD_RES (1)..(1): Any amino acid
XRACDGNVDHAATHITNRREELAQIRKEEKEKKRRRLENIRFLKGMGYSTHAAQQVLHAASGNLDEALKVAAPSGPLALSLSSGSCPELPPWLSSILPGSLLWAAPSSGSEGQVSPGLQPRHRLREAT

SEQ ID NO: 55818 - protein, 149 aa, Homo sapiens
  Payload ID: 10981
  Gene Symbol: NUB1
  Gene Name: negative regulator of ubiquitin-like proteins 1
  ENSP ID: ENSP00000420023
MAQKKYLQAKLTQFLREDRIQLWKPPYTDENKKVGLALKDLAKQYSDRLECCENEVEKVIEEIRCKAIERGTGNDNYRTTGIATIEVFLPPRLKKDRKNLLETRLHITGRELRSKAVRGGFRKWHATHMRRRPCGSAPAMGFSRETTEE

SEQ ID NO: 55819 - protein, 254 aa, Homo sapiens
  Payload ID: 10981
  Gene Symbol: NUB1
  Gene Name: negative regulator of ubiquitin-like proteins 1
  ENSP ID: ENSP00000420086
MAQKKYLQAKLTQFLREDRIQLWKPPYTDENKKVGLALKDLAKQYSDRLECCENEVEKVIEEIRCKAIERGTGNDNYRTTGIATIEVFLPPRLKKDRKNLLETRLHITGRELRSKIAETFGLQENYIKIVINKKQLQLGKTLEEQGVAHNVKAMVLELKQSEEDARKNFQLEEEEQNEAKLKEKQIQRTKRGLEILAKRAAETVVDPEMTPYLDIANQTGRSIRIPPSERKALMLAMGYHEKGRAFLKRKEYGI

SEQ ID NO: 55820 - protein, 202 aa, Homo sapiens
  Payload ID: 10981
  Gene Symbol: NUB1
  Gene Name: negative regulator of ubiquitin-like proteins 1
  ENSP ID: ENSP00000420344
  MOD_RES (1)..(1): Any amino acid
XARQLFKELYIDPSKVDNLLQLGFTAQEARLGLRACDGNVDHAATHITNRREILLSNPQMWWLNDSNPETDNRQESPSQENIDRLVYMGFDALVAEAALRVFRGNVQLAAQTLAHNGGSLPPELPLSPEDSLSPPATSPSDSAGTSSASTDEDMETEAVNEILEDIPEHEEDYLDSTLEDEEIIIAEYLSYVENRKSATKKN

SEQ ID NO: 55821 - protein, 267 aa, Homo sapiens
  Payload ID: 10981
  Gene Symbol: NUB1
  Gene Name: negative regulator of ubiquitin-like proteins 1
  ENSP ID: ENSP00000420638
MAQKKYLQAKLTQFLREDRIQLWKPPYTDENKKVGLALKDLAKQYSDRLECCENEVEKVIEEIRCKAIERGTGNDNYRTTGIATIEVFLPPRLKKDRKNLLETRLHITGRELRSKIAETFGLQENYIKIVINKKQLQLGKTLEEQGVAHNVKAMVLELKQSEEDARKNFQLEEEEQNEAKLKEKQIQRTKRGLEILAKRAAETVVDPEMTPYLDIANQTGRSIRIPPSERKALMLAMGYHEKGRAFLKRKEYGIALPCLLDADKYFW

SEQ ID NO: 55822 - protein, 639 aa, Homo sapiens
  Payload ID: 10981
  Gene Symbol: NUB1
  Gene Name: negative regulator of ubiquitin-like proteins 1
  ENSP ID: ENSP00000454264
MKTNGGRCRIRALCWSRREWRGAGMAQKKYLQAKLTQFLREDRIQLWKPPYTDENKKVGLALKDLAKQYSDRLECCENEVEKVIEEIRCKAIERGTGNDNYRTTGIATIEVFLPPRLKKDRKNLLETRLHITGRELRSKIAETFGLQENYIKIVINKKQLQLGKTLEEQGVAHNVKAMVLELKQSEEDARKNFQLEEEEQNEAKLKEKQIQRTKRGLEILAKRAAETVVDPEMTPYLDIANQTGRSIRIPPSERKALMLAMGYHEKGRAFLKRKEYGIALPCLLDADKYFCECCRELLDTVDNYAVLQLDIVWCYFRLEQLECLDDAEKKLNLAQKCFKNCYGENHQRLVHIKGNCGKEKVLFLRLYLLQGIRNYHSGNDVEAYEYLNKARQLFKELYIDPSKVDNLLQLGFTAQEARLGLRACDGNVDHAATHITNRREELAQIRKEEKEKKRRRLENIRFLKGMGYSTHAAQQVLHAASGNLDEALKILLSNPQMWWLNDSNPETDNRQESPSQENIDRLVYMGFDALVAEAALRVFRGNVQLAAQTLAHNGGSLPPELPLSPEDSLSPPATSPSDSAGTSSASTDEDMETEAVNEILEDIPEHEEDYLDSTLEDEEIIIAEYLSYVENRKSATKKN

SEQ ID NO: 55823 - protein, 966 aa, Homo sapiens
  Payload ID: 10982
  Gene Symbol: NBR1
  Gene Name: neighbor of BRCA1 gene 1
  Uniprot ID: Q14596
  ENSP ID: ENSP00000343479
MEPQVTLNVTFKNEIQSFLVSDPENTTWADIEAMVKVSFDLNTIQIKYLDEENEEVSINSQGEYEEALKMAVKQGNQLQMQVHEGHHVVDEAPPPVVGAKRLAARAGKKPLAHYSSLVRVLGSDMKTPEDPAVQSFPLVPCDTDQPQDKPPDWFTSYLETFREQVVNETVEKLEQKLHEKLVLQNPSLGSCPSEVSMPTSEETLFLPENQFSWHIACNNCQRRIVGVRYQCSLCPSYNICEDCEAGPYGHDTNHVLLKLRRPVVGSSEPFCHSKYSTPRLPAALEQVRLQKQVDKNFLKAEKQRLRAEKKQRKAEVKELKKQLKLHRKIHLWNSIHGLQSPKSPLGRPESLLQSNTLMLPLQPCTSVMPMLSAAFVDENLPDGTHLQPGTKFIKHWRMKNTGNVKWSADTKLKFMWGNLTLASTEKKDVLVPCLKAGHVGVVSVEFIAPALEGTYTSHWRLSHKGQQFGPRVWCSIIVDPFPSEESPDNIEKGMISSSKTDDLTCQQEETFLLAKEERQLGEVTEQTEGTAACIPQKAKNVASERELYIPSVDLLTAQDLLSFELLDINIVQELERVPHNTPVDVTPCMSPLPHDSPLIEKPGLGQIEEENEGAGFKALPDSMVSVKRKAENIASVEEAEEDLSGTQFVCETVIRSLTLDAAPDHNPPCRQKSLQMTFALPEGPLGNEKEEIIHIAEEEAVMEEEEDEEDEEEEDELKDEVQSQSSASSEDYIIILPECFDTSRPLGDSMYSSALSQPGLERGAEGKPGVEAGQEPAEAGERLPGGENQPQEHSISDILTTSQTLETVPLIPEVVELPPSLPRSSPCVHHHGSPGVDLPVTIPEVSSVPDQIRGEPRGSSGLVNSRQKSYDHSRHHHGSSIAGGLVKGALSVAASAYKALFAGPPVTAQPIISEDQTAALMAHLFEMGFCDRQLNLRLLKKHNYNILQVVTELLQLNNNDWYSQRY

SEQ ID NO: 55824 - protein, 837 aa, Homo sapiens
  Payload ID: 10982
  Gene Symbol: NBR1
  Gene Name: neighbor of BRCA1 gene 1
  ENSP ID: ENSP00000437545
MEPQVTLNVTFKNEIQSFLVSDPENTTWADIEAMVSINSQGEYEEALKMAVKQGNQLQMQVHEGHHVVDEAPPPVVGAKRLAARAGKKPLAHYSSLVRVLGSDMKTPEDPAVQSFPLVPCDTDQPQDKPPDWFTSYLETFREQVVNETVEKLEQKLHEKLVLQNPSLGSCPSEVSMPTSEETLFLPENQFSWHIACNNCQRRIVGVRYQCSLCPSYNICEDCEAGPYGHDTNHVLLKLRRPVVGSSEPFCHSKYSTPRLPAALEQVRLQKQVDKNFLKAEKQRLRAEKKQRKAEVKELKKQLKLHRKIHLWNSIHGLQSPKSPLGRPESLLQSNTLMLPLQPCTSVMPMLSAAFVDENLPDGTHLQPGTKFIKHWRMKNTGNVKWSADTKLKFMWGNLTLASTEKKDVLVPCLKAGHVGVVSVEFIAPALEGTYTSHWRLSHKGQQFGPRVWCSIIVDPFPSEESPDNIEKGMISSSKTDDLTCQQEETFLLAKEERQLGEVTEQTEGTAACIPQKAKNVASERELYIPSVDLLTAQDLLSFELLDINIVQELERVPHNTPVDVTPCMSPLPHDSPLIEKPGLGQIEEENEGAGFKALPDSMVSVKRKAENIASVEEAEEDLSGTQFVCETVIRSLTLDAAPDHNPPCRQKSLQMTFALPEGPLGNEKEEIIHIAEEEAVMEEEEDEEDEEEEDELKDEVQSQSSASSEDYIIILPECFDTSRPLGDSMYSSALSQPGLERGAEGKPGVEAGQEPAEAGERLPGGENQPQEHSISDILTTSQTLETVPLIPEVVELPPSLPRSSPCVHHHGSPGVDLPVTIPEVSSVPDQIRGANNF

SEQ ID NO: 55825 - protein, 42 aa, Homo sapiens
  Payload ID: 10982
  Gene Symbol: NBR1
  Gene Name: neighbor of BRCA1 gene 1
  ENSP ID: ENSP00000466071
MEPQVTLNVTFKNEIQSFLVSDPENTTWADIEAMVKVSFDLN

SEQ ID NO: 55826 - protein, 966 aa, Homo sapiens; identical to SEQ ID NO: 55823
  Payload ID: 10982
  Gene Symbol: NBR1
  Gene Name: neighbor of BRCA1 gene 1
  Uniprot ID: Q14596
  ENSP ID: ENSP00000466667

SEQ ID NO: 55827 - protein, 937 aa, Homo sapiens
  Payload ID: 10982
  Gene Symbol: NBR1
  Gene Name: neighbor of BRCA1 gene 1
  Uniprot ID: Q14596
  ENSP ID: ENSP00000467816
MEPQVTLNVTFKNEIQSFLVSDPENTTWADIEAMVKVSFDLNTIQIKYLDEENEEVSINSQGEYEEALKMAVKQGNQLQMQVHEGHHVVDEAPPPVVGAKRLAARAGKKPLAHYSSLVRVLGSDMKTPEDPAVQSFPLVPCDTDQPQDKPPDWFTSYLETFREQVVNETVEKLEQKLHEKLVLQNPSLGSCPSEVSMPTSEETLFLPENQFSWHIACNNCQRRIVGVRYQCSLCPSYNICEDCEAGPYGHDTNHVLLKLRRPVVGSSEPFCHSKYSTPRLPAALEQVRLQKQVDKNFLKAEKQRLRAEKKQRKAEVKELKKQLKLHRKIHLWNSIHGLQSPKSPLGRPESLLQSNTLMLPLQPCTSVMPMLSAAFVDENLPDGTHLQPGTKFIKHWRMKNTGNVKWSADTKLKFMWGNLTLASTEKKDVLVPCLKAGHVGVVSVEFIAPALEGTYTSHWRLSHKGQQFGPRVWCSIIVDPFPSEESPDNIEKGMISSSKTDDLTCQQEETFLLAKEERQLGEVTEQTEGTAACIPQKAKNVASERELYIPSVDLLTAQDLLSFELLDINIVQELERVPHNTPVDVTPCMSPLPHDSPLIEKPGLGQIEEENEGAGFKALPDSMVSVKRKAENIASVEEAEEDLSGTQFVCETVIRSLTLDAAPDHNPPCRQKSLQMTFALPEGPLGNEKEEIIHIAEEEAVMEEEEDEEDEEEEDELKDEVQSQSSASSEDYIIILPECFDTSRPLGDSMYSSALSQPGLERGAEGKPGVEAGQEPAEAGERLPGGENQPQEHSISDILTTSQTLETVPLIPEVVELPPSLPRSSPCVHHHGSPGVDLPVTIPEVSSVPDQIRGEPRGSSGLVNSRQKSYDHSRHHHGSSIAGGLVKGALSVAASAYKALFAGPPVTAQGLWGLLSFLHLAKKCFFLKAPSEAFSWF

SEQ ID NO: 55828 - protein, 390 aa, Homo sapiens
  Payload ID: 10983
  Gene Symbol: NEIL1
  Gene Name: nei-like DNA glycosylase 1
  Uniprot ID: Q96FI4
  ENSP ID: ENSP00000347170
MPEGPELHLASQFVNEACRALVFGGCVEKSSVSRNPEVPFESSAYRISASARGKELRLILSPLPGAQPQQEPLALVFRFGMSGSFQLVPREELPRHAHLRFYTAPPGPRLALCFVDIRRFGRWDLGGKWQPGRGPCVLQEYQQFRENVLRNLADKAFDRPICEALLDQRFFNGIGNYLRAEILYRLKIPPFEKARSVLEALQQHRPSPELTLSQKIRTKLQNPDLLELCHSVPKEVVQLGGKGYGSESGEEDFAAFRAWLRCYGMPGMSSLQDRHGRTIWFQGDPGPLAPKGRKSRKKKSKATQLSPEDRVEDALPPSKAPSRTRRAKRDLPKRTATQRPEGTSLQQDPEAPTVPKKGRRKGRQAASGHCRPRKVKADIPSLEPEGTSAS

SEQ ID NO: 55829 - protein, 154 aa, Homo sapiens
  Payload ID: 10983
  Gene Symbol: NEIL1
  Gene Name: nei-like DNA glycosylase 1
  ENSP ID: ENSP00000454292
MPEGPELHLASQFVNEACRALVFGGCVEKSSVSRNPEVPFESSAYRISASARGKELRLILSPLPGAQPQQEPLALVFRFGMSGSFQLVPREELPRHAHLRFYTAPPGPRLALCFVDIRRFGRWDLGGKWQPGRGPCVLQEYQQFRNRFSEPLSP

SEQ ID NO: 55830 - protein, 39 aa, Homo sapiens
  Payload ID: 10983
  Gene Symbol: NEIL1
  Gene Name: nei-like DNA glycosylase 1
  ENSP ID: ENSP00000454729
MPEGPELHLASQFVNEACRALVFGGCVEKSSVSRNPEVP

SEQ ID NO: 55831 - protein, 390 aa, Homo sapiens; identical to SEQ ID NO: 55828
  Payload ID: 10983
  Gene Symbol: NEIL1
  Gene Name: nei-like DNA glycosylase 1
  Uniprot ID: Q96FI4
  ENSP ID: ENSP00000455730

SEQ ID NO: 55832 - protein, 88 aa, Homo sapiens
  Payload ID: 10983
  Gene Symbol: NEIL1
  Gene Name: nei-like DNA glycosylase 1
  ENSP ID: ENSP00000455745
MPEGPELHLASQFVNEACRALVFGGCVEKSSVSRNPEVPFESSAYRISASARGKELRLILSPLPGAQPQQEPLALVFRFGMSGSFQLV

SEQ ID NO: 55833 - protein, 184 aa, Homo sapiens
  Payload ID: 10983
  Gene Symbol: NEIL1
  Gene Name: nei-like DNA glycosylase 1
  ENSP ID: ENSP00000455949
MPEGPELHLASQFVNEACRALVFGGCVEKSSVSRNPEVPFESSAYRISASARGKELRLILSPLPGAQPQQEPLALVFRFGMSGSFQLVPREELPRHAHLRFYTAPPGPRLALCFVDIRRFGRWDLGGKWQPGRGPCVLQEYQQFRENVLRNLADKAFDRPICEALLDQRFFNGIGNYLRAEILY

SEQ ID NO: 55834 - protein, 22 aa, Homo sapiens
  Payload ID: 10983
  Gene Symbol: NEIL1
  Gene Name: nei-like DNA glycosylase 1
  ENSP ID: ENSP00000456466
MPEGPELHLASQFVNEACRALV

SEQ ID NO: 55835 - protein, 132 aa, Homo sapiens
  Payload ID: 10983
  Gene Symbol: NEIL1
  Gene Name: nei-like DNA glycosylase 1
  ENSP ID: ENSP00000456852
MPEGPELHLASQFVNEACRALVFGGCVEKSSVSRNPEVPFESSAYRISASARGKELRLILSPLPGAQPQQEPLALVFRFGMSGSFQLVPREELPRHAHLRFYTAPPGPRLALCFVDIRRFGRWDLGGKWQPG

SEQ ID NO: 55836 - protein, 152 aa, Homo sapiens
  Payload ID: 10983
  Gene Symbol: NEIL1
  Gene Name: nei-like DNA glycosylase 1
  ENSP ID: ENSP00000456945
MPEGPELHLASQFVNEACRALVFGGCVEKSSVSRNPEVPFESSAYRISASARGKELRLILSPLPGAQPQQEPLALVFRFGMSGSFQLVPREELPRHAHLRFYTAPPGPRLALCFVDIRRFGRWDLGGKWQPGRGPCVLQEYQQFRVSLCCLG

SEQ ID NO: 55837 - protein, 199 aa, Homo sapiens
  Payload ID: 10983
  Gene Symbol: NEIL1
  Gene Name: nei-like DNA glycosylase 1
  ENSP ID: ENSP00000457056
MPEGPELHLASQFVNEACRALVFGGCVEKSSVSRNPEVPFESSAYRISASARGKELRLILSPLPGAQPQQEPLALVFRFGMSGSFQLVPREELPRHAHLRFYTAPPGPRLALCFVDIRRFGRWDLGGKWQPGRGPCVLQEYQQFRLKIPPFEKARSVLEALQQHRPSPELTLSQKIRTKLQNPDLLELCHSVPKEVVQL

SEQ ID NO: 55838 - protein, 50 aa, Homo sapiens
  Payload ID: 10983
  Gene Symbol: NEIL1
  Gene Name: nei-like DNA glycosylase 1
  ENSP ID: ENSP00000457081
MPEGPELHLASQFVNEACRALVFGGCVEKSSVSRNPEVPFESSAYRISAS

SEQ ID NO: 55839 - protein, 390 aa, Homo sapiens; identical to SEQ ID NO: 55828
  Payload ID: 10983
  Gene Symbol: NEIL1
  Gene Name: nei-like DNA glycosylase 1
  Uniprot ID: Q96FI4
  ENSP ID: ENSP00000457352

SEQ ID NO: 55840 - protein, 82 aa, Homo sapiens
  Payload ID: 10983
  Gene Symbol: NEIL1
  Gene Name: nei-like DNA glycosylase 1
  ENSP ID: ENSP00000457371
MPEGPELHLASQFVNEACRALVFGGCVEKSSVSRNPEVPFESSAYRISASARGKELRLILSPLPGAQPQQEPLALVFRFGMS

SEQ ID NO: 55841 - protein, 64 aa, Homo sapiens
  Payload ID: 10983
  Gene Symbol: NEIL1
  Gene Name: nei-like DNA glycosylase 1
  ENSP ID: ENSP00000457541
MPEGPELHLASQFVNEACRALVFGGCVEKSSVSRNPEVPFESSAYRISASARGKELRLILSPLP

SEQ ID NO: 55842 - protein, 332 aa, Homo sapiens
  Payload ID: 10984
  Gene Symbol: NEIL2
  Gene Name: nei-like DNA glycosylase 2
  Uniprot ID: Q969S2
  ENSP ID: ENSP00000284503
MPEGPLVRKFHHLVSPFVGQQVVKTGGSSKKLQPASLQSLWLQDTQVHGKKLFLRFDLDEEMGPPGSSPTPEPPQKEVQKEGAADPKQVGEPSGQKTLDGSSRSAELVPQGEDDSEYLERDAPAGDAGRWLRVSFGLFGSVWVNDFSRAKKANKRGDWRDPSPRLVLHFGGGGFLAFYNCQLSWSSSPVVTPTCDILSEKFHRGQALEALGQAQPVCYTLLDQRYFSGLGNIIKNEALYRAGIHPLSLGSVLSASRREVLVDHVVEFSTAWLQGKFQGRPQHTQVYQKEQCPAGHQVMKEAFGPEDGLQRLTWWCPQCQPQLSEEPEQCQFS

SEQ ID NO: 55843 - protein, 271 aa, Homo sapiens
  Payload ID: 10984
  Gene Symbol: NEIL2
  Gene Name: nei-like DNA glycosylase 2
  Uniprot ID: Q969S2
  ENSP ID: ENSP00000384070
MGPPGSSPTPEPPQKEVQKEGAADPKQVGEPSGQKTLDGSSRSAELVPQGEDDSEYLERDAPAGDAGRWLRVSFGLFGSVWVNDFSRAKKANKRGDWRDPSPRLVLHFGGGGFLAFYNCQLSWSSSPVVTPTCDILSEKFHRGQALEALGQAQPVCYTLLDQRYFSGLGNIIKNEALYRAGIHPLSLGSVLSASRREVLVDHVVEFSTAWLQGKFQGRPQHTQVYQKEQCPAGHQVMKEAFGPEDGLQRLTWWCPQCQPQLSEEPEQCQFS

SEQ ID NO: 55844 - protein, 332 aa, Homo sapiens; identical to SEQ ID NO: 55842
  Payload ID: 10984
  Gene Symbol: NEIL2
  Gene Name: nei-like DNA glycosylase 2
  Uniprot ID: Q969S2
  ENSP ID: ENSP00000394023

SEQ ID NO: 55845 - protein, 332 aa, Homo sapiens; identical to SEQ ID NO: 55842
  Payload ID: 10984
  Gene Symbol: NEIL2
  Gene Name: nei-like DNA glycosylase 2
  Uniprot ID: Q969S2
  ENSP ID: ENSP00000397538

SEQ ID NO: 55846 - protein, 216 aa, Homo sapiens
  Payload ID: 10984
  Gene Symbol: NEIL2
  Gene Name: nei-like DNA glycosylase 2
  Uniprot ID: Q969S2
  ENSP ID: ENSP00000435657
MPEGPLVRKFHHLVSPFVGQQVVKTGGSSKKLQPASLQSLWLQDTQVRLVLHFGGGGFLAFYNCQLSWSSSPVVTPTCDILSEKFHRGQALEALGQAQPVCYTLLDQRYFSGLGNIIKNEALYRAGIHPLSLGSVLSASRREVLVDHVVEFSTAWLQGKFQGRPQHTQVYQKEQCPAGHQVMKEAFGPEDGLQRLTWWCPQCQPQLSEEPEQCQFS

SEQ ID NO: 55847 - protein, 60 aa, Homo sapiens
  Payload ID: 10984
  Gene Symbol: NEIL2
  Gene Name: nei-like DNA glycosylase 2
  ENSP ID: ENSP00000437004
MPEGPLVRKFHHLVSPFVGQQVVKTGGSSKKLQPASLQSLWLQDTQVGPALWWWWLPGIL

SEQ ID NO: 55848 - protein, 605 aa, Homo sapiens
  Payload ID: 10985
  Gene Symbol: NEIL3
  Gene Name: nei-like DNA glycosylase 3
  Uniprot ID: Q8TAT5
  ENSP ID: ENSP00000264596
MVEGPGCTLNGEKIRARVLPGQAVTGVRGSALRSLQGRALRLAASTVVVSPQAAALNNDSSQNVLSLFNGYVYSGVETLGKELFMYFGPKALRIHFGMKGFIMINPLEYKYKNGASPVLEVQLTKDLICFFDSSVELRNSMESQQRIRMMKELDVCSPEFSFLRAESEVKKQKGRMLGDVLMDQNVLPGVGNIIKNEALFDSGLHPAVKVCQLTDEQIHHLMKMIRDFSILFYRCRKAGLALSKHYKVYKRPNCGQCHCRITVCRFGDNNRMTYFCPHCQKENPQHVDICKLPTRNTIISWTSSRVDHVMDSVARKSEEHWTCVVCTLINKPSSKACDACLTSRPIDSVLKSEENSTVFSHLMKYPCNTFGKPHTEVKINRKTAFGTTTLVLTDFSNKSSTLERKTKQNQILDEEFQNSPPASVCLNDIQHPSKKTTNDITQPSSKVNISPTISSESKLFSPAHKKPKTAQYSSPELKSCNPGYSNSELQINMTDGPRTLNPDSPRCSKHNRLCILRVVGKDGENKGRQFYACPLPREAQCGFFEWADLSFPFCNHGKRSTMKTVLKIGPNNGKNFFVCPLGKEKQCNFFQWAENGPGIKIIPGC

SEQ ID NO: 55849 - protein, 63 aa, Homo sapiens
  Payload ID: 10985
  Gene Symbol: NEIL3
  Gene Name: nei-like DNA glycosylase 3
  ENSP ID: ENSP00000424735
MVEGPGCTLNGEKIRARVLPGQAVTGVRGSALRSLQGRALRLAASTVVVSPQDSFRNERLHHD

SEQ ID NO: 55850 - protein, 527 aa, Homo sapiens
  Payload ID: 10986
  Gene Symbol: NLK
  Gene Name: nemo-like kinase
  Uniprot ID: Q9UBE8
  ENSP ID: ENSP00000384625
MSLCGARANAKMMAAYNGGTSAAAAGHHHHHHHHLPHLPPPHLHHHHHPQHHLHPGSAAAVHPVQQHTSSAAAAAAAAAAAAAMLNPGQQQPYFPSPAPGQAPGPAAAAPAQVQAAAAATVKAHHHQHSHHPQQQLDIEPDRPIGYGAFGVVWSVTDPRDGKRVALKKMPNVFQNLVSCKRVFRELKMLCFFKHDNVLSALDILQPPHIDYFEEIYVVTELMQSDLHKIIVSPQPLSSDHVKVFLYQILRGLKYLHSAGILHRDIKPGNLLVNSNCVLKICDFGLARVEELDESRHMTQEVVTQYYRAPEILMGSRHYSNAIDIWSVGCIFAELLGRRILFQAQSPIQQLDLITDLLGTPSLEAMRTACEGAKAHILRGPHKQPSLPVLYTLSSQATHEAVHLLCRMLVFDPSKRISAKDALAHPYLDEGRLRYHTCMCKCCFSTSTGRVYTSDFEPVTNPKFDDTFEKNLSSVRQVKEIIHQFILEQQKGNRVPLCINPQSAAFKSFISSTVAQPSEMPPSPLVWE

SEQ ID NO: 55851 - protein, 475 aa, Homo sapiens
  Payload ID: 10986
  Gene Symbol: NLK
  Gene Name: nemo-like kinase
  ENSP ID: ENSP00000433117
LHPGSAAAVHPVQQHTSSAAAAAAAAAAAAAMLNPGQQQPYFPSPAPGQAPGPAAAAPAQVQAAAAATVKAHHHQHSHHPQQQLDIEPDRPIGYGAFGVVWSVTDPRDGKRVALKKMPNVFQNLVSCKRVFRELKMLCFFKHDNVLSALDILQPPHIDYFEEIYVVTELMQSDLHKIIVSPQPLSSDHVKVFLYQILRGLKYLHSAGILHRDIKPGNLLVNSNCVLKICDFGLARVEELDESRHMTQEVVTQYYRAPEILMGSRHYSNAIDIWSVGCIFAELLGRRILFQAQSPIQQLDLITDLLGTPSLEAMRTACEGAKAHILRGPHKQPSLPVLYTLSSQATHEAVHLLCRMLVFDPSKRISAKDALAHPYLDEGRLRYHTCMCKCCFSTSTGRVYTSDFEPVTNPKFDDTFEKNLSSVRQVKEIIHQFILEQQKGNRVPLCINPQSAAFKSFISSTVAQPSEMPPSPLVWE

SEQ ID NO: 55852 - protein, 181 aa, Homo sapiens
  Payload ID: 10986
  Gene Symbol: NLK
  Gene Name: nemo-like kinase
  ENSP ID: ENSP00000464656
MSLCGARANAKMMAAYNGGTSAAAAGHHHHHHHHLPHLPPPHLHHHHHPQHHLHPGSAAAVHPVQQHTSSAAAAAAAAAAAAAMLNPGQQQPYFPSPAPGQAPGPAAAAPAQVQAAAAATVKAHHHQHSHHPQQQLDIEPDRPIGYGAFGVVWLRICSTEKFLHYQPRLTATAGFFGGSAL

SEQ ID NO: 55853 - protein, 1461 aa, Homo sapiens
  Payload ID: 10987
  Gene Symbol: NEO1
  Gene Name: neogenin 1
  Uniprot ID: Q92859
  ENSP ID: ENSP00000261908
MAAERGARRLLSTPSFWLYCLLLLGRRAPGAAAARSGSAPQSPGASIRTFTPFYFLVEPVDTLSVRGSSVILNCSAYSEPSPKIEWKKDGTFLNLVSDDRRQLLPDGSLFISNVVHSKHNKPDEGYYQCVATVESLGTIISRTAKLIVAGLPRFTSQPEPSSVYAGNNAILNCEVNADLVPFVRWEQNRQPLLLDDRVIKLPSGMLVISNATEGDGGLYRCVVESGGPPKYSDEVELKVLPDPEVISDLVFLKQPSPLVRVIGQDVVLPCVASGLPTPTIKWMKNEEALDTESSERLVLLAGGSLEISDVTEDDAGTYFCIADNGNETIEAQAELTVQAQPEFLKQPTNIYAHESMDIVFECEVTGKPTPTVKWVKNGDMVIPSDYFKIVKEHNLQVLGLVKSDEGFYQCIAENDVGNAQAGAQLIILEHAPATTGPLPSAPRDVVASLVSTRFIKLTWRTPASDPHGDNLTYSVFYTKEGIARERVENTSHPGEMQVTIQNLMPATVYIFRVMAQNKHGSGESSAPLRVETQPEVQLPGPAPNLRAYAASPTSITVTWETPVSGNGEIQNYKLYYMEKGTDKEQDVDVSSHSYTINGLKKYTEYSFRVVAYNKHGPGVSTPDVAVRTLSDVPSAAPQNLSLEVRNSKSIMIHWQPPAPATQNGQITGYKIRYRKASRKSDVTETLVSGTQLSQLIEGLDRGTEYNFRVAALTINGTGPATDWLSAETFESDLDETRVPEVPSSLHVRPLVTSIVVSWTPPENQNIVVRGYAIGYGIGSPHAQTIKVDYKQRYYTIENLDPSSHYVITLKAFNNVGEGIPLYESAVTRPHTDTSEVDLFVINAPYTPVPDPTPMMPPVGVQASILSHDTIRITWADNSLPKHQKITDSRYYTVRWKTNIPANTKYKNANATTLSYLVTGLKPNTLYEFSVMVTKGRRSSTWSMTAHGTTFELVPTSPPKDVTVVSKEGKPKTIIVNWQPPSEANGKITGYIIYYSTDVNAEIHDWVIEPVVGNRLTHQIQELTLDTPYYFKIQARNSKGMGPMSEAVQFRTPKADSSDKMPNDQASGSGGKGSRLPDLGSDYKPPMSGSNSPHGSPTSPLDSNMLLVIIVSVGVITIVVVVIIAVFCTRRTTSHQKKKRAACKSVNGSHKYKGNSKDVKPPDLWIHHERLELKPIDKSPDPNPIMTDTPIPRNSQDITPVDNSMDSNIHQRRNSYRGHESEDSMSTLAGRRGMRPKMMMPFDSQPPQPVISAHPIHSLDNPHHHFHSSSLASPARSHLYHPGSPWPIGTSMSLSDRANSTESVRNTPSTDTMPASSSQTCCTDHQDPEGATSSSYLASSQEEDSGQSLPTAHVRPSHPLKSFAVPAIPPPGPPTYDPALPSTPLLSQQALNHHIHSVKTASIGTLGRSRPPMPVVVPSAPEVQETTRMLEDSESSYEPDELTKEMAHLEGLMKDLNAITTA

SEQ ID NO: 55854 - protein, 1461 aa, Homo sapiens; identical to SEQ ID NO: 55853
  Payload ID: 10987
  Gene Symbol: NEO1
  Gene Name: neogenin 1
  Uniprot ID: Q92859
  ENSP ID: ENSP00000341198

SEQ ID NO: 55855 - protein, 1450 aa, Homo sapiens
  Payload ID: 10987
  Gene Symbol: NEO1
  Gene Name: neogenin 1
  Uniprot ID: Q92859
  ENSP ID: ENSP00000453200
MAAERGARRLLSTPSFWLYCLLLLGRRAPGAAAARSGSAPQSPGASIRTFTPFYFLVEPVDTLSVRGSSVILNCSAYSEPSPKIEWKKDGTFLNLVSDDRRQLLPDGSLFISNVVHSKHNKPDEGYYQCVATVESLGTIISRTAKLIVAGLPRFTSQPEPSSVYAGNNAILNCEVNADLVPFVRWEQNRQPLLLDDRVIKLPSGMLVISNATEGDGGLYRCVVESGGPPKYSDEVELKVLPDPEVISDLVFLKQPSPLVRVIGQDVVLPCVASGLPTPTIKWMKNEEALDTESSERLVLLAGGSLEISDVTEDDAGTYFCIADNGNETIEAQAELTVQAQPEFLKQPTNIYAHESMDIVFECEVTGKPTPTVKWVKNGDMVIPSDYFKIVKEHNLQVLGLVKSDEGFYQCIAENDVGNAQAGAQLIILEHAPATTGPLPSAPRDVVASLVSTRFIKLTWRTPASDPHGDNLTYSVFYTKEGIARERVENTSHPGEMQVTIQNLMPATVYIFRVMAQNKHGSGESSAPLRVETQPEVQLPGPAPNLRAYAASPTSITVTWETPVSGNGEIQNYKLYYMEKGTDKEQDVDVSSHSYTINGLKKYTEYSFRVVAYNKHGPGVSTPDVAVRTLSDVPSAAPQNLSLEVRNSKSIMIHWQPPAPATQNGQITGYKIRYRKASRKSDVTETLVSGTQLSQLIEGLDRGTEYNFRVAALTINGTGPATDWLSAETFESDLDETRVPEVPSSLHVRPLVTSIVVSWTPPENQNIVVRGYAIGYGIGSPHAQTIKVDYKQRYYTIENLDPSSHYVITLKAFNNVGEGIPLYESAVTRPHTDTSEVDLFVINAPYTPVPDPTPMMPPVGVQASILSHDTIRITWADNSLPKHQKITDSRYYTVRWKTNIPANTKYKNANATTLSYLVTGLKPNTLYEFSVMVTKGRRSSTWSMTAHGTTFELVPTSPPKDVTVVSKEGKPKTIIVNWQPPSEANGKITGYIIYYSTDVNAEIHDWVIEPVVGNRLTHQIQELTLDTPYYFKIQARNSKGMGPMSEAVQFRTPKASGSGGKGSRLPDLGSDYKPPMSGSNSPHGSPTSPLDSNMLLVIIVSVGVITIVVVVIIAVFCTRRTTSHQKKKRAACKSVNGSHKYKGNSKDVKPPDLWIHHERLELKPIDKSPDPNPIMTDTPIPRNSQDITPVDNSMDSNIHQRRNSYRGHESEDSMSTLAGRRGMRPKMMMPFDSQPPQPVISAHPIHSLDNPHHHFHSSSLASPARSHLYHPGSPWPIGTSMSLSDRANSTESVRNTPSTDTMPASSSQTCCTDHQDPEGATSSSYLASSQEEDSGQSLPTAHVRPSHPLKSFAVPAIPPPGPPTYDPALPSTPLLSQQALNHHIHSVKTASIGTLGRSRPPMPVVVPSAPEVQETTRMLEDSESSYEPDELTKEMAHLEGLMKDLNAITTA

SEQ ID NO: 55856 - protein, 1408 aa, Homo sapiens
  Payload ID: 10987
  Gene Symbol: NEO1
  Gene Name: neogenin 1
  Uniprot ID: Q92859
  ENSP ID: ENSP00000453317
MAAERGARRLLSTPSFWLYCLLLLGRRAPGAAAARSGSAPQSPGASIRTFTPFYFLVEPVDTLSVRGSSVILNCSAYSEPSPKIEWKKDGTFLNLVSDDRRQLLPDGSLFISNVVHSKHNKPDEGYYQCVATVESLGTIISRTAKLIVAGLPRFTSQPEPSSVYAGNNAILNCEVNADLVPFVRWEQNRQPLLLDDRVIKLPSGMLVISNATEGDGGLYRCVVESGGPPKYSDEVELKVLPDPEVISDLVFLKQPSPLVRVIGQDVVLPCVASGLPTPTIKWMKNEEALDTESSERLVLLAGGSLEISDVTEDDAGTYFCIADNGNETIEAQAELTVQAQPEFLKQPTNIYAHESMDIVFECEVTGKPTPTVKWVKNGDMVIPSDYFKIVKEHNLQVLGLVKSDEGFYQCIAENDVGNAQAGAQLIILEHAPATTGPLPSAPRDVVASLVSTRFIKLTWRTPASDPHGDNLTYSVFYTKEGIARERVENTSHPGEMQVTIQNLMPATVYIFRVMAQNKHGSGESSAPLRVETQPEVQLPGPAPNLRAYAASPTSITVTWETPVSGNGEIQNYKLYYMEKGTDKEQDVDVSSHSYTINGLKKYTEYSFRVVAYNKHGPGVSTPDVAVRTLSDVPSAAPQNLSLEVRNSKSIMIHWQPPAPATQNGQITGYKIRYRKASRKSDVTETLVSGTQLSQLIEGLDRGTEYNFRVAALTINGTGPATDWLSAETFESDLDETRVPEVPSSLHVRPLVTSIVVSWTPPENQNIVVRGYAIGYGIGSPHAQTIKVDYKQRYYTIENLDPSSHYVITLKAFNNVGEGIPLYESAVTRPHTDTSEVDLFVINAPYTPVPDPTPMMPPVGVQASILSHDTIRITWADNSLPKHQKITDSRYYTVRWKTNIPANTKYKNANATTLSYLVTGLKPNTLYEFSVMVTKGRRSSTWSMTAHGTTFELVPTSPPKDVTVVSKEGKPKTIIVNWQPPSEANGKITGYIIYYSTDVNAEIHDWVIEPVVGNRLTHQIQELTLDTPYYFKIQARNSKGMGPMSEAVQFRTPKADSSDKMPNDQASGSGGKGSRLPDLGSDYKPPMSGSNSPHGSPTSPLDSNMLLVIIVSVGVITIVVVVIIAVFCTRRTTSHQKKKRAACKSVNGSHKYKGNSKDVKPPDLWIHHERLELKPIDKSPDPNPIMTDTPIPRNSQDITPVDNSMDSNIHQRRNSYRGHESEDSMSTLAGRRGMRPKMMMPFDSQPPQQSVRNTPSTDTMPASSSQTCCTDHQDPEGATSSSYLASSQEEDSGQSLPTAHVRPSHPLKSFAVPAIPPPGPPTYDPALPSTPLLSQQALNHHIHSVKTASIGTLGRSRPPMPVVVPSAPEVQETTRMLEDSESSYEPDELTKEMAHLEGLMKDLNAITTA

SEQ ID NO: 55857 - protein, 1130 aa, Homo sapiens
  Payload ID: 10987
  Gene Symbol: NEO1
  Gene Name: neogenin 1
  ENSP ID: ENSP00000454024
GNETIEAQAELTVQAQPEFLKQPTNIYAHESMDIVFECEVTGKPTPTVKWVKNGDMVIPSDYFKIVKEHNLQVLGLVKSDEGFYQCIAENDVGNAQAGAQLIILEHDVAIPTLPPTSLTSATTDHLAPATTGPLPSAPRDVVASLVSTRFIKLTWRTPASDPHGDNLTYSVFYTKEGIARERVENTSHPGEMQVTIQNLMPATVYIFRVMAQNKHGSGESSAPLRVETQPEVQLPGPAPNLRAYAASPTSITVTWETPVSGNGEIQNYKLYYMEKGTDKEQDVDVSSHSYTINGLKKYTEYSFRVVAYNKHGPGVSTPDVAVRTLSDVPSAAPQNLSLEVRNSKSIMIHWQPPAPATQNGQITGYKIRYRKASRKSDVTETLVSGTQLSQLIEGLDRGTEYNFRVAALTINGTGPATDWLSAETFESDLDETRVPEVPSSLHVRPLVTSIVVSWTPPENQNIVVRGYAIGYGIGSPHAQTIKVDYKQRYYTIENLDPSSHYVITLKAFNNVGEGIPLYESAVTRPHTVPDPTPMMPPVGVQASILSHDTIRITWADNSLPKHQKITDSRYYTVRWKTNIPANTKYKNANATTLSYLVTGLKPNTLYEFSVMVTKGRRSSTWSMTAHGTTFELVPTSPPKDVTVVSKEGKPKTIIVNWQPPSEANGKITGYIIYYSTDVNAEIHDWVIEPVVGNRLTHQIQELTLDTPYYFKIQARNSKGMGPMSEAVQFRTPKASGSGGKGSRLPDLGSDYKPPMSGSNSPHGSPTSPLDSNMLLVIIVSVGVITIVVVVIIAVFCTRRTTSHQKKKRAACKSVNGSHKYKGNSKDVKPPDLWIHHERLELKPIDKSPDPNPIMTDTPIPRNSQDITPVDNSMDSNIHQRRNSYRGHESEDSMSTLAGRRGMRPKMMMPFDSQPPQPVISAHPIHSLDNPHHHFHSSSLASPARSHLYHPGSPWPIGTSMSLSDRANSTESVRNTPSTDTMPASSSQTCCTDHQDPEGATSSSYLASSQEEDSGQSLPTAHVRPSHPLKSFAVPAIPPPGPPTYDPALPSTPLLSQQALNHHIHSVKTASIGTLGRSRPPMPVVVPSAPEVQETTRMLEDSESSYEPDELTKEMAHLEGLMKDLNAITTA

SEQ ID NO: 55858 - protein, 357 aa, Homo sapiens
  Payload ID: 10988
  Gene Symbol: NOV
  Gene Name: nephroblastoma overexpressed
  Uniprot ID: P48745
  ENSP ID: ENSP00000259526
MQSVQSTSFCLRKQCLCLTFLLLHLLGQVAATQRCPPQCPGRCPATPPTCAPGVRAVLDGCSCCLVCARQRGESCSDLEPCDESSGLYCDRSADPSNQTGICTAVEGDNCVFDGVIYRSGEKFQPSCKFQCTCRDGQIGCVPRCQLDVLLPEPNCPAPRKVEVPGECCEKWICGPDEEDSLGGLTLAAYRPEATLGVEVSDSSVNCIEQTTEWTACSKSCGMGFSTRVTNRNRQCEMLKQTRLCMVRPCEQEPEQPTDKKGKKCLRTKKSLKAIHLQFKNCTSLHTYKPRFCGVCSDGRCCTPHNTKTIQAEFQCSPGQIVKKPVMVIGTCTCHTNCPKNNEAFLQELELKTTRGKM

SEQ ID NO: 55859 - protein, 509 aa, Homo sapiens
  Payload ID: 10989
  Gene Symbol: NPNT
  Gene Name: nephronectin
  Uniprot ID: Q6UXI9
  ENSP ID: ENSP00000302557
MDFLLALVLVSSLYLQAAAEFDGRWPRQIVSSIGLCRYGGRIDCCWGWARQSWGQCQPVCQPRCKHGECIGPNKCKCHPGYAGKTCNQDLNECGLKPRPCKHRCMNTYGSYKCYCLNGYMLMPDGSCSSALTCSMANCQYGCDVVKGQIRCQCPSPGLQLAPDGRTCVDVDECATGRASCPRFRQCVNTFGSYICKCHKGFDLMYIGGKYQCHDIDECSLGQYQCSSFARCYNIRGSYKCKCKEGYQGDGLTCVYIPKVMIEPSGPIHVPKGNGTILKGDTGNNNWIPDVGSTWWPPKTPYIPPIITNRPTSKPTTRPTPKPTPIPTPPPPPPLPTELRTPLPPTTPERPTTGLTTIAPAASTPPGGITVDNRVQTDPQKPRGDVFSVLVHSCNFDHGLCGWIREKDNDLHWEPIRDPAGGQYLTVSAAKAPGGKAARLVLPLGRLMHSGDLCLSFRHKVTGLHSGTLQVFVRKHGAHGAALWGRNGGHGWRQTQITLRGADIKSESQR

SEQ ID NO: 55860 - protein, 565 aa, Homo sapiens
  Payload ID: 10989
  Gene Symbol: NPNT
  Gene Name: nephronectin
  Uniprot ID: Q6UXI9
  ENSP ID: ENSP00000369323
MDFLLALVLVSSLYLQAAAEFDGRWPRQIVSSIGLCRYGGRIDCCWGWARQSWGQCQPVCQPRCKHGECIGPNKCKCHPGYAGKTCNQDLNECGLKPRPCKHRCMNTYGSYKCYCLNGYMLMPDGSCSSALTCSMANCQYGCDVVKGQIRCQCPSPGLQLAPDGRTCVDVDECATGRASCPRFRQCVNTFGSYICKCHKGFDLMYIGGKYQCHDIDECSLGQYQCSSFARCYNIRGSYKCKCKEGYQGDGLTCVYIPKVMIEPSGPIHVPKGNGTILKGDTGNNNWIPDVGSTWWPPKTPYIPPIITNRPTSKPTTRPTPKPTPIPTPPPPPPLPTELRTPLPPTTPERPTTGLTTIAPAASTPPGGITVDNRVQTDPQKPRGDVFIPRQPSNDLFEIFEIERGVSADDEAKDDPGVLVHSCNFDHGLCGWIREKDNDLHWEPIRDPAGGQYLTVSAAKAPGGKAARLVLPLGRLMHSGDLCLSFRHKVTGLHSGTLQVFVRKHGAHGAALWGRNGGHGWRQTQITLRGADIKSVVFKGEKRRGHTGEIGLDDVSLKKGHCSEER

SEQ ID NO: 55861 - protein, 595 aa, Homo sapiens
  Payload ID: 10989
  Gene Symbol: NPNT
  Gene Name: nephronectin
  Uniprot ID: Q6UXI9
  ENSP ID: ENSP00000389252
MDFLLALVLVSSLYLQAAAEFDGRWPRQIVSSIGLCRYGGRIDCCWGWARQSWGQCQPVCQPRCKHGECIGPNKCKCHPGYAGKTCNQDEHIPAPLDQGSEQPLFQPLDHQATSLPSRDLNECGLKPRPCKHRCMNTYGSYKCYCLNGYMLMPDGSCSSALTCSMANCQYGCDVVKGQIRCQCPSPGLQLAPDGRTCVDVDECATGRASCPRFRQCVNTFGSYICKCHKGFDLMYIGGKYQCHDIDECSLGQYQCSSFARCYNIRGSYKCKCKEGYQGDGLTCVYIPKVMIEPSGPIHVPKGNGTILKGDTGNNNWIPDVGSTWWPPKTPYIPPIITNRPTSKPTTRPTPKPTPIPTPPPPPPLPTELRTPLPPTTPERPTTGLTTIAPAASTPPGGITVDNRVQTDPQKPRGDVFIPRQPSNDLFEIFEIERGVSADDEAKDDPGVLVHSCNFDHGLCGWIREKDNDLHWEPIRDPAGGQYLTVSAAKAPGGKAARLVLPLGRLMHSGDLCLSFRHKVTGLHSGTLQVFVRKHGAHGAALWGRNGGHGWRQTQITLRGADIKSVVFKGEKRRGHTGEIGLDDVSLKKGHCSEER

SEQ ID NO: 55862 - protein, 582 aa, Homo sapiens
  Payload ID: 10989
  Gene Symbol: NPNT
  Gene Name: nephronectin
  Uniprot ID: Q6UXI9
  ENSP ID: ENSP00000402884
MDFLLALVLVSSLYLQAAAEFDGRWPRQIVSSIGLCRYGGRIDCCWGWARQSWGQCQPFYVLRQRIARIRCQLKAVCQPRCKHGECIGPNKCKCHPGYAGKTCNQDLNECGLKPRPCKHRCMNTYGSYKCYCLNGYMLMPDGSCSSALTCSMANCQYGCDVVKGQIRCQCPSPGLQLAPDGRTCVDVDECATGRASCPRFRQCVNTFGSYICKCHKGFDLMYIGGKYQCHDIDECSLGQYQCSSFARCYNIRGSYKCKCKEGYQGDGLTCVYIPKVMIEPSGPIHVPKGNGTILKGDTGNNNWIPDVGSTWWPPKTPYIPPIITNRPTSKPTTRPTPKPTPIPTPPPPPPLPTELRTPLPPTTPERPTTGLTTIAPAASTPPGGITVDNRVQTDPQKPRGDVFIPRQPSNDLFEIFEIERGVSADDEAKDDPGVLVHSCNFDHGLCGWIREKDNDLHWEPIRDPAGGQYLTVSAAKAPGGKAARLVLPLGRLMHSGDLCLSFRHKVTGLHSGTLQVFVRKHGAHGAALWGRNGGHGWRQTQITLRGADIKSVVFKGEKRRGHTGEIGLDDVSLKKGHCSEER

SEQ ID NO: 55863 - protein, 104 aa, Homo sapiens
  Payload ID: 10989
  Gene Symbol: NPNT
  Gene Name: nephronectin
  ENSP ID: ENSP00000421480
  MOD_RES (1)..(1): Any amino acid
XGLCGWIREKDNDLHWEPIRDPAGITKMIKGLEKKIYDGKLKELGLLSLEKRRLRGKPLMVFKYMKGWHREGGDQLFSICTKNRTRGNWLRLEYKGAFLGRGHC

SEQ ID NO: 55864 - protein, 536 aa, Homo sapiens
  Payload ID: 10989
  Gene Symbol: NPNT
  Gene Name: nephronectin
  Uniprot ID: Q6UXI9
  ENSP ID: ENSP00000422044
MDFLLALVLVSSLYLQAAAEFDGRWPRQIVSSIGLCRYGGRIDCCWGWARQSWGQCQPVCQPRCKHGECIGPNKCKCHPGYAGKTCNQDLNECGLKPRPCKHRCMNTYGSYKCYCLNGYMLMPDGSCSSALTCSMANCQYGCDVVKGQIRCQCPSPGLQLAPDGRTCVDVDECATGRASCPRFRQCVNTFGSYICKCHKGFDLMYIGGKYQCHDIDECSLGQYQCSSFARCYNIRGSYKCKCKEGYQGDGLTCVYIPKVMIEPSGPIHVPKGNGTILKGDTGNNNWIPDVGSTWWPPKTPYIPPIITNRPTSKPTTRPTPKPTPIPTPPPPPPLPTELRTPLPPTTPERPTTGLTTIAPAASTPPGGITVDNRVQTDPQKPRGDVFSVLVHSCNFDHGLCGWIREKDNDLHWEPIRDPAGGQYLTVSAAKAPGGKAARLVLPLGRLMHSGDLCLSFRHKVTGLHSGTLQVFVRKHGAHGAALWGRNGGHGWRQTQITLRGADIKSVVFKGEKRRGHTGEIGLDDVSLKKGHCSEER

SEQ ID NO: 55865 - protein, 566 aa, Homo sapiens
  Payload ID: 10989
  Gene Symbol: NPNT
  Gene Name: nephronectin
  Uniprot ID: Q6UXI9
  ENSP ID: ENSP00000422474
MDFLLALVLVSSLYLQAAAEFDGRWPRQIVSSIGLCRYGGRIDCCWGWARQSWGQCQPVCQPRCKHGECIGPNKCKCHPGYAGKTCNQDEHIPAPLDQGSEQPLFQPLDHQATSLPSRDLNECGLKPRPCKHRCMNTYGSYKCYCLNGYMLMPDGSCSSALTCSMANCQYGCDVVKGQIRCQCPSPGLQLAPDGRTCVDVDECATGRASCPRFRQCVNTFGSYICKCHKGFDLMYIGGKYQCHDIDECSLGQYQCSSFARCYNIRGSYKCKCKEGYQGDGLTCVYIPKVMIEPSGPIHVPKGNGTILKGDTGNNNWIPDVGSTWWPPKTPYIPPIITNRPTSKPTTRPTPKPTPIPTPPPPPPLPTELRTPLPPTTPERPTTGLTTIAPAASTPPGGITVDNRVQTDPQKPRGDVFSVLVHSCNFDHGLCGWIREKDNDLHWEPIRDPAGGQYLTVSAAKAPGGKAARLVLPLGRLMHSGDLCLSFRHKVTGLHSGTLQVFVRKHGAHGAALWGRNGGHGWRQTQITLRGADIKSVVFKGEKRRGHTGEIGLDDVSLKKGHCSEER

SEQ ID NO: 55866 - protein, 609 aa, Homo sapiens
  Payload ID: 10989
  Gene Symbol: NPNT
  Gene Name: nephronectin
  ENSP ID: ENSP00000426146
MDFLLALVLVSSLYLQAAAEFDGRWPRQIVSSIGLCRYGGRIDCCWGWARQSWGQCQPFYVLRQRIARIRCQLKAVCQPRCKHGECIGPNKCKCHPGYAGKTCNQDEHIPAPLDQGSEQPLFQPLDHQATSLPSRDLNECGLKPRPCKHRCMNTYGSYKCYCLNGYMLMPDGSCSSALTCSMANCQYGCDVVKGQIRCQCPSPGLQLAPDGRTCVDVDECATGRASCPRFRQCVNTFGSYICKCHKGFDLMYIGGKYQCHDIDECSLGQYQCSSFARCYNIRGSYKCKCKEGYQGDGLTCVYIPKVMIEPSGPIHVPKGNGTILKGDTGNNNWIPDVGSTWWPPKTPYIPPIITNRPTSKPTTRPTPKPTPIPTPPPPPPLPTELRTPLPPTTPERPTTGLTTIAPAASTPPGGITVDNRVQTDPQKPRGDVFIPRQPSNDLFEIFEIERGVSADDEAKDDPGVLVHSCNFDHGLCGWIREKDNDLHWEPIRDPAGGQYLTVSAAKAPGGKAARLVLPLGRLMHSGDLCLSFRHKVTGLHSGTLQVFVRKHGAHGAALWGRNGGHGWRQTQITLRGADIKSVVFKGEKRRGHTGEIGLDDVSLKKGHCS

SEQ ID NO: 55867 - protein, 26 aa, Homo sapiens
  Payload ID: 10989
  Gene Symbol: NPNT
  Gene Name: nephronectin
  ENSP ID: ENSP00000426219
  MOD_RES (1)..(1): Any amino acid
XNDLHWEPIRDPADNCSCLHAGGLDL

SEQ ID NO: 55868 - protein, 61 aa, Homo sapiens
  Payload ID: 10989
  Gene Symbol: NPNT
  Gene Name: nephronectin
  ENSP ID: ENSP00000426951
MNTYGSYKCYCLNGYMLMPDGSCSSALTCSMANCQYGCDVVKGQIRCQCPSPGLQLAPDGR

SEQ ID NO: 55869 - protein, 453 aa, Homo sapiens
  Payload ID: 10989
  Gene Symbol: NPNT
  Gene Name: nephronectin
  ENSP ID: ENSP00000427507
  MOD_RES (1)..(1): Any amino acid
XWPRQIVSSIGLCRYGGRIDCCWGWARQSWGQCQPVCQPRCKHGECIGPNKCKCHPGYAGKTCNQDLNECGLKPRPCKHRCMNTYGSYKCYCLNGYMLMPDGSCSSALTCSMANCQYGCDVVKGQIRCQCPSPGLQLAPDGRTCVDVDECATGRASCPRFRQCVNTFGSYICKCHKGFDLMYIGGKYQCHDIDECSLGQYQCSSFARCYNIRGSYKCKCKEGYQGDGLTCVYIPKVMIEPSGPIHVPKGNGTILKGDTGNNNWIPDVGSTWWPPKTPYIPPIITNRPTSKPTTRPTPKPTPIPTPPPPPPLPTELRTPLPPTTPERPTTGLTTIAPAASTPPGGITVDNRVQTDPQKPRGDVFIPRQPSNDLFEIFEIERGVSADDEAKDDPGVLVHSCNFDHGLCGWIREKDNDLHWEPIRDPAEILQGTQFREIFIGCILSASCVTSYLGC

SEQ ID NO: 55870 - protein, 733 aa, Homo sapiens
  Payload ID: 10990
  Gene Symbol: NPHP1
  Gene Name: nephronophthisis 1 (juvenile)
  Uniprot ID: O15259
  ENSP ID: ENSP00000313169
MLARRQRDPLQALRRRNQELKQQVDSLLSESQLKEALEPNKRQHIYQRCIQLKQAIDENKNALQKLSKADESAPVANYNQRKEEEHTLLDKLTQQLQGLAVTISRENITEVGAPTEEEEESESEDSEDSGGEEEDAEEEEEEKEENESHKWSTGEEYIAVGDFTAQQVGDLTFKKGEILLVIEKKPDGWWIAKDAKGNEGLVPRTYLEPYSEEEEGQESSEEGSEEDVEAVDETADGAEVKQRTDPHWSAVQKAISEAGIFCLVNHVSFCYLIVLMRNRMETVEDTNGSETGFRAWNVQSRGRIFLVSKPVLQQINTVDVLTTMGAIPAGFRPSTLSQLLEEGNQFRANYFLQPELMPSQLAFRDLMWDATEGTIRSRPSRISLILTLWSCKMIPLPGMSIQVLSRHVRLCLFDGNKVLSNIHTVRATWQPKKPKTWTFSPQVTRILPCLLDGDCFIRSNSASPDLGILFELGISYIRNSTGERGELSCGWVFLKLFDASGVPIPAKTYELFLNGGTPYEKGIEVDPSISRRAHGSVFYQIMTMRRQPQLLVKLRSLNRRSRNVLSLLPETLIGNMCSIHLLIFYRQILGDVLLKDRMSLQSTDLISHPMLATFPMLLEQPDVMDALRSSWAGKESTLKRSEKRDKEFLKSTFLLVYHDCVLPLLHSTRLPPFRWAEEETETARWKVITDFLKQNQENQGALQALLSPDGVHEPFDLSEQTYDFLGEMRKNAV

SEQ ID NO: 55871 - protein, 614 aa, Homo sapiens
  Payload ID: 10990
  Gene Symbol: NPHP1
  Gene Name: nephronophthisis 1 (juvenile)
  Uniprot ID: O15259
  ENSP ID: ENSP00000347452
MLARRQRDPLQALRRRNQELKQQVDSLLSESQLKEALEPNKRQHIYQRVGAPTEEEEESESEDSEDSGGEEEDAEEEEEEKEENESHKWSTGEEYIAVGDFTAQQVGDLTFKKGEILLVIEKKPDGWWIAKDAKGNEGLVPRTYLEPYSEEEEGQESSEEGSEEDVEAVDETADGAEVKQRTDPHWSAVQKAISEINTVDVLTTMGAIPAGFRPSTLSQLLEEGNQFRANYFLQPELMPSQLAFRDLMWDATEGTIRSRPSRISLILTLWSCKMIPLPGMSIQVLSRHVRLCLFDGNKVLSNIHTVRATWQPKKPKTWTFSPQVTRILPCLLDGDCFIRSNSASPDLGILFELGISYIRNSTGERGELSCGWVFLKLFDASGVPIPAKTYELFLNGGTPYEKGIEVDPSISRRAHGSVFYQIMTMRRQPQLLVKLRSLNRRSRNVLSLLPETLIGNMCSIHLLIFYRQILGDVLLKDRMSLQSTDLISHPMLATFPMLLEQPDVMDALRSSWAGKESTLKRSEKRDKEFLKSTFLLVYHDCVLPLLHSTRLPPFRWAEEETETARWKVITDFLKQNQENQGALQALLSPDGVHEPFDLSEQTYDFLGEMRKNAV

SEQ ID NO: 55872 - protein, 732 aa, Homo sapiens
  Payload ID: 10990
  Gene Symbol: NPHP1
  Gene Name: nephronophthisis 1 (juvenile)
  Uniprot ID: O15259
  ENSP ID: ENSP00000376953
MLARRQRDPLQALRRRNQELKQQVDSLLSESQLKEALEPNKRQHIYQRCIQLKQAIDENKNALQKLSKADESAPVANYNQRKEEEHTLLDKLTQQLQGLAVTISRENITEVGAPTEEEEESESEDSEDSGGEEEDAEEEEEEKEENESHKWSTGEEYIAVGDFTAQQVGDLTFKKGEILLVIEKKPDGWWIAKDAKGNEGLVPRTYLEPYSEEEEGQESSEEGSEEDVEAVDETADGAEVKQRTDPHWSAVQKAISEAGIFCLVNHVSFCYLIVLMRNRMETVEDTNGSETGFRAWNVQSRGRIFLVSKPVLQINTVDVLTTMGAIPAGFRPSTLSQLLEEGNQFRANYFLQPELMPSQLAFRDLMWDATEGTIRSRPSRISLILTLWSCKMIPLPGMSIQVLSRHVRLCLFDGNKVLSNIHTVRATWQPKKPKTWTFSPQVTRILPCLLDGDCFIRSNSASPDLGILFELGISYIRNSTGERGELSCGWVFLKLFDASGVPIPAKTYELFLNGGTPYEKGIEVDPSISRRAHGSVFYQIMTMRRQPQLLVKLRSLNRRSRNVLSLLPETLIGNMCSIHLLIFYRQILGDVLLKDRMSLQSTDLISHPMLATFPMLLEQPDVMDALRSSWAGKESTLKRSEKRDKEFLKSTFLLVYHDCVLPLLHSTRLPPFRWAEEETETARWKVITDFLKQNQENQGALQALLSPDGVHEPFDLSEQTYDFLGEMRKNAV

SEQ ID NO: 55873 - protein, 677 aa, Homo sapiens
  Payload ID: 10990
  Gene Symbol: NPHP1
  Gene Name: nephronophthisis 1 (juvenile)
  Uniprot ID: O15259
  ENSP ID: ENSP00000389879
MLARRQRDPLQALRRRNQELKQQVDSLLSESQLKEALEPNKRQHIYQRCIQLKQAIDENKNALQKLSKADESAPVANYNQRKEEEHTLLDKLTQQLQGLAVTISRENITEVGAPTEEEEESESEDSEDSGGEEEDAEEEEEEKEENESHKWSTGEEYIAVGDFTAQQVGDLTFKKGEILLVIEKKPDGWWIAKDAKGNEGLVPRTYLEPYSEEEEGQESSEEGSEEDVEAVDETADGAEVKQRTDPHWSAVQKAISEQINTVDVLTTMGAIPAGFRPSTLSQLLEEGNQFRANYFLQPELMPSQLAFRDLMWDATEGTIRSRPSRISLILTLWSCKMIPLPGMSIQVLSRHVRLCLFDGNKVLSNIHTVRATWQPKKPKTWTFSPQVTRILPCLLDGDCFIRSNSASPDLGILFELGISYIRNSTGERGELSCGWVFLKLFDASGVPIPAKTYELFLNGGTPYEKGIEVDPSISRRAHGSVFYQIMTMRRQPQLLVKLRSLNRRSRNVLSLLPETLIGNMCSIHLLIFYRQILGDVLLKDRMSLQSTDLISHPMLATFPMLLEQPDVMDALRSSWAGKESTLKRSEKRDKEFLKSTFLLVYHDCVLPLLHSTRLPPFRWAEEETETARWKVITDFLKQNQENQGALQALLSPDGVHEPFDLSEQTYDFLGEMRKNAV

SEQ ID NO: 55874 - protein, 47 aa, Homo sapiens
  Payload ID: 10990
  Gene Symbol: NPHP1
  Gene Name: nephronophthisis 1 (juvenile)
  ENSP ID: ENSP00000392562
  MOD_RES (1)..(1): Any amino acid
XLISHPMLATFPMLLEQPDVMDALRSSWAGKESTLKRSEKVKYESPH

SEQ ID NO: 55875 - protein, 711 aa, Homo sapiens
  Payload ID: 10990
  Gene Symbol: NPHP1
  Gene Name: nephronophthisis 1 (juvenile)
  ENSP ID: ENSP00000402176
MLARRQRDPLQALRRRNQELKQQVDSLLSESQLKEALEPNKRQHIYQRCIQLKQAIDENKNALQKLSKADESAPVANYNQRKEEEHTLLDKLTQQLQGLAVTISRENITEVGAPTEEEEESESEDSEDSGGEEEDAEEEEEEKEENESHKWSTGEEYIAVGDFTAQQVGDLTFKKGEILLVIEKKPDGWWIAKDAKGNEGLVPRTYLEPYSEEEEGQESSEEGSEEDVEAVDETADGAEVKQRTDPHWSAVQKAISEINTVDVLTTMGAIPAGFRPSTLSQLLEEGNQFRANYFLQPELMPSQLAFRDLMWDATEGTIRSRPSRISLILTLWSCKMIPLPGMSIQVLSRHVRLCLFDGNKVLSNIHTVRATWQPKKPKTWTFSPQVTRILPCLLDGDCFIRSNSASPDLGILFELGISYIRNSTGERGELSCGWVFLKLFDASGVPIPAKTYELFLNGGTPYEKGIEVDPSISRRAHGSVFYQIMTMRRQPQLLVKLRSLNRRSRNVLSLLPETLIGNMCSIHLLIFYRQILGDVLLKDRMSLQSTDLISHPMLATFPMLLEQPDVMDALRSSWAGKESTLKRSEKLSKPVSPREGKKKWPELYHILKTMHCSCLPCYKIMRDKEFLKSTFLLVYHDCVLPLLHSTRLPPFRWAEEETETARWKVITDFLKQNQENQGALQALLSPDGVHEPFDLSEQTYDFLGEMRKNAV

SEQ ID NO: 55876 - protein, 45 aa, Homo sapiens
  Payload ID: 10990
  Gene Symbol: NPHP1
  Gene Name: nephronophthisis 1 (juvenile)
  ENSP ID: ENSP00000406453
  MOD_RES (1)..(1): Any amino acid
XRRQRDPLQALRRRNQELKQQRTPEAEYGTDFLFGVCRTSNQQPL

SEQ ID NO: 55877 - protein, 121 aa, Homo sapiens
  Payload ID: 10990
  Gene Symbol: NPHP1
  Gene Name: nephronophthisis 1 (juvenile)
  ENSP ID: ENSP00000412351
MLARRQRDPLQALRRRNQELKQQVDSLLSESQLKEALEPNKRQHIYQRCIQLKQAIDENKNALQKLSKADESAPVANYNQRKEEEHTLLDKLTQQLQGLAVTISRENITEYASFLPFFFLF

SEQ ID NO: 55878 - protein, 1330 aa, Homo sapiens
  Payload ID: 10991
  Gene Symbol: NPHP3
  Gene Name: nephronophthisis 3 (adolescent)
  Uniprot ID: Q7Z494
  ENSP ID: ENSP00000338766
MGTASSLVSPAGGEVIEDTYGAGGGEACEIPVEVKPKARLLRNSFRRGAGAAAGAGPGSLPRGVGAGGLLGASFKSTGSSVPELEYAAAEYERLRKEYEIFRVSKNQELLSMGRREAKLDTENKRLRAELQALQKTYQKILREKESALEAKYQAMERAATFEHDRDKVKRQFKIFRETKENEIQDLLRAKRELESKLQRLQAQGIQVFDPGESDSDDNCTDVTAAGTQCEYWTGGALGSEPSIGSMIQLQQSFRGPEFAHSSIDVEGPFANVNRDDWDIAVASLLQVTPLFSHSLWSNTVRCYLIYTDETQPEMDLFLKDYSPKLKRMCETMGYFFHAVYFPIDVENQYLTVRKWEIEKSSLVILFIHLTLPSLLLEDCEEAFLKNPEGKPRLIFHRLEDGKVSSDSVQQLIDQVSNLNKTSKAKIIDHSGDPAEGVYKTYICVEKIIKQDILGFENTDLETKDLGSEDSIPEEDDFGDVLWDIHDEQEQMETFQQASNSAHELGFEKYYQRLNDLVAAPAPIPPLLVSGGPGSGKSLLLSKWIQLQQKNSPNTLILSHFVGRPMSTSSESSLIIKRLTLKLMQHSWSVSALTLDPAKLLEEFPRWLEKLSARHQGSIIIVIDSIDQVQQVEKHMKWLIDPLPVNVRVIVSVNVETCPPAWRLWPTLHLDPLSPKDAKSIIIAECHSVDIKLSKEQEKKLERHCRSATTCNALYVTLFGKMIARAGRAGNLDKILHQCFQCQDTLSLYRLVLHSIRESMANDVDKELMKQILCLVNVSHNGVSESELMELYPEMSWTFLTSLIHSLYKMCLLTYGCGLLRFQHLQAWETVRLEYLEGPTVTSSYRQKLINYFTLQLSQDRVTWRSADELPWLFQQQGSKQKLHDCLLNLFVSQNLYKRGHFAELLSYWQFVGKDKSAMATEYFDSLKQYEKNCEGEDNMSCLADLYETLGRFLKDLGLLSQAIVPLQRSLEIRETALDPDHPRVAQSLHQLASVYVQWKKFGNAEQLYKQALEISENAYGADHPYTARELEALATLYQKQNKYEQAEHFRKKSFKIHQKAIKKKGNLYGFALLRRRALQLEELTLGKDTPDNARTLNELGVLYYLQNNLETADQFLKRSLEMRERVLGPDHPDCAQSLNNLAALCNEKKQYDKAEELYERALDIRRRALAPDHPSLAYTVKHLAILYKKMGKLDKAVPLYELAVEIRQKSFGPKHPSVATALVNLAVLYSQMKKHVEALPLYERALKIYEDSLGRMHPRVGETLKNLAVLSYEGGDFEKAAELYKRAMEIKEAETSLLGGKAPSRHSSSGDTFSLKTAHSPNVFLQQGQR

SEQ ID NO: 55879 - protein, 123 aa, Homo sapiens
  Payload ID: 10991
  Gene Symbol: NPHP3
  Gene Name: nephronophthisis 3 (adolescent)
  ENSP ID: ENSP00000418664
AKLDTENKRLRAELQALQKTYQKILREKESALEAKYQAMERAATFEHDRDKVKRQFKIFRETKENEIQDLLRAKRELESKLQRLQAQGIQVFDPGESDSDDNCTDVTVSLESDQHPGIFIANF

SEQ ID NO: 55880 - protein, 538 aa, Homo sapiens
  Payload ID: 10991
  Gene Symbol: NPHP3
  Gene Name: nephronophthisis 3 (adolescent)
  ENSP ID: ENSP00000419907
MGTASSLVSPAGGEVIEDTYGAGGGEACEIPVEALQKTYQKILREKESALEAKYQAMERAATFEHDRDKVKRQFKIFRETKENEIQDLLRAKRELESKLQRLQAQGIQVFDPGESDSDDNCTDVTAAGTQCEYWTGGALGSEPSIGSMIQLQQSFRGPEFAHSSIDVEGPFANVNRDDWDIAVASLLQVTPLFSHSLWSNTVRCYLIYTDETQPEMDLFLKDYSPKLKRMCETMGYFFHAVYFPIDVENQYLTVRKWEIEKSSLVILFIHLTLPSLLLEDCEEAFLKNPEGKPRLIFHRLEDGKVSSDSVQQLIDQVSNLNKTSKAKIIDHSGDPAEGVYKTYICVEKIIKQDILGFENTDLETKDLGSEDSIPEEDDFGDVLWDIHDEQEQMETFQQASNSAHELGFEKYYQRLNDLVAAPAPIPPLLVSGGPGSGKSLLLSKWIQLQQKNSPNTLILSHFVGRPMSTSSESSLIIKRLTLKLMQHSWSVSALTLDPAKLLEEFPRWLEKLSARHQGSIIIVIDSIDQVQVVAYTSS

SEQ ID NO: 55881 - protein, 87 aa, Homo sapiens
  Payload ID: 10991
  Gene Symbol: NPHP3
  Gene Name: nephronophthisis 3 (adolescent)
  ENSP ID: ENSP00000427666
EKKQYDKAEELYERALDIRRRALAPDHPSLAYTVKHLAILYKKMGKLDKAVPLYELAVEIRQKSFGPKHPSVATALVNLAVLYSQML

SEQ ID NO: 55882 - protein, 1426 aa, Homo sapiens
  Payload ID: 10992
  Gene Symbol: NPHP4
  Gene Name: nephronophthisis 4
  Uniprot ID: O75161
  ENSP ID: ENSP00000367398
MNDWHRIFTQNVLVPPHPQRARQPWKESTAFQCVLKWLDGPVIRQGVLEVLSEVECHLRVSFFDVTYRHFFGRTWKTTVKPTKRPPSRIVFNEPLYFHTSLNHPHIVAVVEVVAEGKKRDGSLQTLSCGFGILRIFSNQPDSPISASQDKRLRLYHGTPRALLHPLLQDPAEQNRHMTLIENCSLQYTLKPHPALEPAFHLLPENLLVSGLQQIPGLLPAHGESGDALRKPRLQKPITGHLDDLFFTLYPSLEKFEEELLELHVQDHFQEGCGPLDGGALEILERRLRVGVHNGLGFVQRPQVVVLVPEMDVALTRSASFSRKVVSSSKTSSGSQALVLRSRLRLPEMVGHPAFAVIFQLEYVFSSPAGVDGNAASVTSLSNLACMHMVRWAVWNPLLEADSGRVTLPLQGGIQPNPSHCLVYKVPSASMSSEEVKQVESGTLRFQFSLGSEEHLDAPTEPVSGPKVERRPSRKPPTSPSSPPAPVPRVLAAPQNSPVGPGLSISQLAASPRSPTQHCLARPTSQLPHGSQASPAQAQEFPLEAGISHLEADLSQTSLVLETSIAEQLQELPFTPLHAPIVVGTQTRSSAGQPSRASMVLLQSSGFPEILDANKQPAEAVSATEPVTFNPQKEESDCLQSNEMVLQFLAFSRVAQDCRGTSWPKTVYFTFQFYRFPPATTPRLQLVQLDEAGQPSSGALTHILVPVSRDGTFDAGSPGFQLRYMVGPGFLKPGERRCFARYLAVQTLQIDVWDGDSLLLIGSAAVQMKHLLRQGRPAVQASHELEVVATEYEQDNMVVSGDMLGFGRVKPIGVHSVVKGRLHLTLANVGHPCEQKVRGCSTLPPSRSRVISNDGASRFSGGSLLTTGSSRRKHVVQAQKLADVDSELAAMLLTHARQGKGPQDVSRESDATRRRKLERMRSVRLQEAGGDLGRRGTSVLAQQSVRTQHLRDLQVIAAYRERTKAESIASLLSLAITTEHTLHATLGVAEFFEFVLKNPHNTQHTVTVEIDNPELSVIVDSQEWRDFKGAAGLHTPVEEDMFHLRGSLAPQLYLRPHETAHVPFKFQSFSAGQLAMVQASPGLSNEKGMDAVSPWKSSAVPTKHAKVLFRASGGKPIAVLCLTVELQPHVVDQVFRFYHPELSFLKKAIRLPPWHTFPGAPVGMLGEDPPVHVRCSDPNVICETQNVGPGEPRDIFLKVASGPSPEIKDFFVIIYSDRWLATPTQTWQVYLHSLQRVDVSCVAGQLTRLSLVLRGTQTVRKVRAFTSHPQELKTDPKGVFVLPPRGVQDLHVGVRPLRAGSRFVHLNLVDVDCHQLVASWLVCLCCRQPLISKAFEIMLAAGEGKGVNKRITYTNPYPSRRTFHLHSDHPELLRFREDSFQVGGGETYTIGLQFAPSQRVGEEEILIYINDHEDKNEEAFCVKVIYQ

SEQ ID NO: 55883 - protein, 262 aa, Homo sapiens
  Payload ID: 10992
  Gene Symbol: NPHP4
  Gene Name: nephronophthisis 4
  ENSP ID: ENSP00000367411
MNDWHRIFTQNVLVPPHPQRARQPWKESTAFQCVLKWLDGPVIRQGVLEVLSEVECHLRVSFFDVTYRHFFGRTWKTTVKPTKRPPSRIVFNEPLYFHTSLNHPHIVAVVEVVAEGKKRDGSLQTLSCGFGILRIFSNQPDSPISASQDKRLRLYHGTPRALLHPLLQDPAEQNRHMTLIENCSLQYTLKPHPALEPAFHLLPENLLVSGLQQIPGLLPAHGESGMWPTGRWCPGDPGAAPACGRAQWSGLRAEAAGRCTGA

SEQ ID NO: 55884 - protein, 911 aa, Homo sapiens
  Payload ID: 10992
  Gene Symbol: NPHP4
  Gene Name: nephronophthisis 4
  Uniprot ID: O75161
  ENSP ID: ENSP00000423747
MNDWHRIFTQNVLVPPHPQRARQPWKESTAFQCVLKWLDGPVIRQGVLEVLSEVECHLRVSFFDVTYRHFFGRTWKTTVKPTKRPPSRIVFNEPLYFHTSLNHPHIVAVVEVVAEGKKRDGSLQTLSCGFGILRIFSNQPDSPISASQDKRLRLYHGTPRALLHPLLQDPAEQNRHMTLIENCSLQYTLKPHPALEPAFHLLPENLLVSGLQQIPGLLPAHGESGDALRKPRLQKPITGHLDDLFFTLYPSLEKFEEELLELHVQDHFQEGCGPLDGGALEILERRLRVGVHNGLGFVQRPQVVVLVPEMDVALTRSASFSRKVVSSSKTSSGSQALVLRSRLRLPEMVGHPAFAVIFQLEYVFSSPAGVDGNAASVTSLSNLACMHMVRWAVWNPLLEADSGRVTLPLQGGIQPNPSHCLVYKVPSASMSSEEVKQVESGTLRFQFSLGSEEHLDAPTEPVSGPKVERRPSRKPPTSPSSPPAPVPRVLAAPQNSPVGPGLSISQLAASPRSPTQHCLARPTSQLPHGSQASPAQAEFPLEAGISHLEADLSQTSLVLETSIAEQLQELPFTPLHAPIVVGTQTRSSAGQPSRASMVLLQSSGFPEILDANKQPAEAVSATEPVTFNPQKEESDCLQSNEMVLQFLAFSRVAQDCRGTSWPKTVYFTFQFYRFPPATTPRLQLVQLDEAGQPSSGALTHILVPVSRDGTFDAGSPGFQLRYMVGPGFLKPGERRCFARYLAVQTLQIDVWDGDSLLLIGSAAVQMKHLLRQGRPAVQASHELEVVATEYEQDNMVVSGDMLGFGRVKPIGVHSVVKGRLHLTLANVGHPCEQKVRGCSTLPPSRSRVISNDGASRFSGGSLLTTGSSRRWALQATVLFGEVGTLPVAFVSGWLLICKGRRNGEKVRRNID

SEQ ID NO: 55885 - protein, 138 aa, Homo sapiens
  Payload ID: 10992
  Gene Symbol: NPHP4
  Gene Name: nephronophthisis 4
  ENSP ID: ENSP00000425745
  MOD_RES (1)..(1): Any amino acid
XEMVLQFLAFSRVAQDCRGTSWPKTVYFTFQFYRFPPATTPRLQLVQLDEAGQPSSGALTHILVPVSRDGTFDAGSPGFQLRYMVGPGFLKPGERRCFARYLAVQTLQIDVWDGDSLLLIGSAAVQMKETSHIFSVSQ

SEQ ID NO: 55886 - protein, 911 aa, Homo sapiens; identical to SEQ ID NO: 55884
  Payload ID: 10992
  Gene Symbol: NPHP4
  Gene Name: nephronophthisis 4
  Uniprot ID: O75161
  ENSP ID: ENSP00000481831

SEQ ID NO: 55887 - protein, 1201 aa, Homo sapiens
  Payload ID: 10993
  Gene Symbol: NPHS1
  Gene Name: nephrosis 1, congenital, Finnish type (nephrin)
  Uniprot ID: O60500
  ENSP ID: ENSP00000343634
MALGTTLRASLLLLGLLTEGLAQLAIPASVPRGFWALPENLTVVEGASVELRCGVSTPGSAVQWAKDGLLLGPDPRIPGFPRYRLEGDPARGEFHLHIEACDLSDDAEYECQVGRSEMGPELVSPRVILSILVPPKLLLLTPEAGTMVTWVAGQEYVVNCVSGDAKPAPDITILLSGQTISDISANVNEGSQQKLFTVEATARVTPRSSDNRQLLVCEASSPALEAPIKASFTVNVLFPPGPPVIEWPGLDEGHVRAGQSLELPCVARGGNPLATLQWLKNGQPVSTAWGTEHTQAVARSVLVMTVRPEDHGAQLSCEAHNSVSAGTQEHGITLQVTFPPSAIIILGSASQTENKNVTLSCVSKSSRPRVLLRWWLGWRQLLPMEETVMDGLHGGHISMSNLTFLARREDNGLTLTCEAFSEAFTKETFKKSLILNVKYPAQKLWIEGPPEGQKLRAGTRVRLVCLAIGGNPEPSLMWYKDSRTVTESRLPQESRRVHLGSVEKSGSTFSRELVLVTGPSDNQAKFTCKAGQLSASTQLAVQFPPTNVTILANASALRPGDALNLTCVSVSSNPPVNLSWDKEGERLEGVAAPPRRAPFKGSAAARSVLLQVSSRDHGQRVTCRAHSAELRETVSSFYRLNVLYRPEFLGEQVLVVTAVEQGEALLPVSVSANPAPEAFNWTFRGYRLSPAGGPRHRILSSGALHLWNVTRADDGLYQLHCQNSEGTAEARLRLDVHYAPTIRALQDPTEVNVGGSVDIVCTVDANPILPGMFNWERLGEDEEDQSLDDMEKISRGPTGRLRIHHAKLAQAGAYQCIVDNGVAPPARRLLRLVVRFAPQVEHPTPLTKVAAAGDSTSSATLHCRARGVPNIVFTWTKNGVPLDLQDPRYTEHTYHQGGVHSSLLTIANVSAAQDYALFTCTATNALGSDQTNIQLVSISRPDPPSGLKVVSLTPHSVGLEWKPGFDGGLPQRFCIRYEALGTPGFHYVDVVPPQATTFTLTGLQPSTRYRVWLLASNALGDSGLADKGTQLPITTPGLHQPSGEPEDQLPTEPPSGISEKTEAGSEEDRVRNEYEESQWTGERDTQSSTVSTTEAEPYYRSLRDFSPQLPPTQEEVSYSRGFTGEDEDMAFPGHLYDEVERTYPPSGAWGPLYDEVQMGPWDLHWPEDTYQDPRGIYDQVAGDLDTLEPDSLPFELRGHLV

SEQ ID NO: 55888 - protein, 1241 aa, Homo sapiens
  Payload ID: 10993
  Gene Symbol: NPHS1
  Gene Name: nephrosis 1, congenital, Finnish type (nephrin)
  Uniprot ID: O60500
  ENSP ID: ENSP00000368190
MALGTTLRASLLLLGLLTEGLAQLAIPASVPRGFWALPENLTVVEGASVELRCGVSTPGSAVQWAKDGLLLGPDPRIPGFPRYRLEGDPARGEFHLHIEACDLSDDAEYECQVGRSEMGPELVSPRVILSILVPPKLLLLTPEAGTMVTWVAGQEYVVNCVSGDAKPAPDITILLSGQTISDISANVNEGSQQKLFTVEATARVTPRSSDNRQLLVCEASSPALEAPIKASFTVNVLFPPGPPVIEWPGLDEGHVRAGQSLELPCVARGGNPLATLQWLKNGQPVSTAWGTEHTQAVARSVLVMTVRPEDHGAQLSCEAHNSVSAGTQEHGITLQVTFPPSAIIILGSASQTENKNVTLSCVSKSSRPRVLLRWWLGWRQLLPMEETVMDGLHGGHISMSNLTFLARREDNGLTLTCEAFSEAFTKETFKKSLILNVKYPAQKLWIEGPPEGQKLRAGTRVRLVCLAIGGNPEPSLMWYKDSRTVTESRLPQESRRVHLGSVEKSGSTFSRELVLVTGPSDNQAKFTCKAGQLSASTQLAVQFPPTNVTILANASALRPGDALNLTCVSVSSNPPVNLSWDKEGERLEGVAAPPRRAPFKGSAAARSVLLQVSSRDHGQRVTCRAHSAELRETVSSFYRLNVLYRPEFLGEQVLVVTAVEQGEALLPVSVSANPAPEAFNWTFRGYRLSPAGGPRHRILSSGALHLWNVTRADDGLYQLHCQNSEGTAEARLRLDVHYAPTIRALQDPTEVNVGGSVDIVCTVDANPILPGMFNWERLGEDEEDQSLDDMEKISRGPTGRLRIHHAKLAQAGAYQCIVDNGVAPPARRLLRLVVRFAPQVEHPTPLTKVAAAGDSTSSATLHCRARGVPNIVFTWTKNGVPLDLQDPRYTEHTYHQGGVHSSLLTIANVSAAQDYALFTCTATNALGSDQTNIQLVSISRPDPPSGLKVVSLTPHSVGLEWKPGFDGGLPQRFCIRYEALGTPGFHYVDVVPPQATTFTLTGLQPSTRYRVWLLASNALGDSGLADKGTQLPITTPGLHQPSGEPEDQLPTEPPSGPSGLPLLPVLFALGGLLLLSNASCVGGVLWQRRLRRLAEGISEKTEAGSEEDRVRNEYEESQWTGERDTQSSTVSTTEAEPYYRSLRDFSPQLPPTQEEVSYSRGFTGEDEDMAFPGHLYDEVERTYPPSGAWGPLYDEVQMGPWDLHWPEDTYQDPRGIYDQVAGDLDTLEPDSLPFELRGHLV

SEQ ID NO: 55889 - protein, 383 aa, Homo sapiens
  Payload ID: 10994
  Gene Symbol: NPHS2
  Gene Name: nephrosis 2, idiopathic, steroid-resistant (podocin)
  Uniprot ID: Q9NP85
  ENSP ID: ENSP00000356587
MERRARSSSRESRGRGGRTPHKENKRAKAERSGGGRGRQEAGPEPSGSGRAGTPGEPRAPAATVVDVDEVRGSGEEGTEVVALLESERPEEGTKSSGLGACEWLLVLISLLFIIMTFPFSIWFCVKVVQEYERVIIFRLGHLLPGRAKGPGLFFFLPCLDTYHKVDLRLQTLEIPFHEIVTKDMFIMEIDAICYYRMENASLLLSSLAHVSKAVQFLVQTTMKRLLAHRSLTEILLERKSIAQDAKVALDSVTCIWGIKVERIEIKDVRLPAGLQHSLAVEAEAQRQAKVRMIAAEAEKAASESLRMAAEILSGTPAAVQLRYLHTLQSLSTEKPSTVVLPLPFDLLNCLSSPSNRTQGSLPFPSPSKPVEPLNPKKKDSPML

SEQ ID NO: 55890 - protein, 315 aa, Homo sapiens
  Payload ID: 10994
  Gene Symbol: NPHS2
  Gene Name: nephrosis 2, idiopathic, steroid-resistant (podocin)
  Uniprot ID: Q9NP85
  ENSP ID: ENSP00000356588
MERRARSSSRESRGRGGRTPHKENKRAKAERSGGGRGRQEAGPEPSGSGRAGTPGEPRAPAATVVDVDEVRGSGEEGTEVVALLESERPEEGTKSSGLGACEWLLVLISLLFIIMTFPFSIWFCVKVVQEYERVIIFRLGHLLPGRAKGPGLFFFLPCLDTYHKVDLRLQTLEIPFHEVALDSVTCIWGIKVERIEIKDVRLPAGLQHSLAVEAEAQRQAKVRMIAAEAEKAASESLRMAAEILSGTPAAVQLRYLHTLQSLSTEKPSTVVLPLPFDLLNCLSSPSNRTQGSLPFPSPSKPVEPLNPKKKDSPML

SEQ ID NO: 55891 - protein, 241 aa, Homo sapiens
  Payload ID: 10995
  Gene Symbol: NGF
  Gene Name: nerve growth factor (beta polypeptide)
  Uniprot ID: P01138
  ENSP ID: ENSP00000358525
MSMLFYTLITAFLIGIQAEPHSESNVPAGHTIPQAHWTKLQHSLDTALRRARSAPAAAIAARVAGQTRNITVDPRLFKKRRLRSPRVLFSTQPPREAADTQDLDFEVGGAAPFNRTHRSKRSSSHPIFHRGEFSVCDSVSVWVGDKTTATDIKGKEVMVLGEVNINNSVFKQYFFETKCRDPNPVDSGCRGIDSKHWNSYCTTTHTFVKALTMDGKQAAWRFIRIDTACVCVLSRKAVRRA

SEQ ID NO: 55892 - protein, 427 aa, Homo sapiens
  Payload ID: 10996
  Gene Symbol: NGFR
  Gene Name: nerve growth factor receptor
  Uniprot ID: P08138
  ENSP ID: ENSP00000172229
MGAGATGRAMDGPRLLLLLLLGVSLGGAKEACPTGLYTHSGECCKACNLGEGVAQPCGANQTVCEPCLDSVTFSDVVSATEPCKPCTECVGLQSMSAPCVEADDAVCRCAYGYYQDETTGRCEACRVCEAGSGLVFSCQDKQNTVCEECPDGTYSDEANHVDPCLPCTVCEDTERQLRECTRWADAECEEIPGRWITRSTPPEGSDSTAPSTQEPEAPPEQDLIASTVAGVVTTVMGSSQPVVTRGTTDNLIPVYCSILAAVVVGLVAYIAFKRWNSCKQNKQGANSRPVNQTPPPEGEKLHSDSGISVDSQSLHDQQPHTQTASGQALKGDGGLYSSLPPAKREEVEKLLNGSAGDTWRHLAGELGYQPEHIDSFTHEACPVRALLASWATQDSATLDALLAALRRIQRADLVESLCSESTATSPV

SEQ ID NO: 55893 - protein, 4 aa, Homo sapiens
  Payload ID: 10996
  Gene Symbol: NGFR
  Gene Name: nerve growth factor receptor
  ENSP ID: ENSP00000421514
MSAP

SEQ ID NO: 55894 - protein, 333 aa, Homo sapiens
  Payload ID: 10996
  Gene Symbol: NGFR
  Gene Name: nerve growth factor receptor
  Uniprot ID: P08138
  ENSP ID: ENSP00000421731
MSAPCVEADDAVCRCAYGYYQDETTGRCEACRVCEAGSGLVFSCQDKQNTVCEECPDGTYSDEANHVDPCLPCTVCEDTERQLRECTRWADAECEEIPGRWITRSTPPEGSDSTAPSTQEPEAPPEQDLIASTVAGVVTTVMGSSQPVVTRGTTDNLIPVYCSILAAVVVGLVAYIAFKRWNSCKQNKQGANSRPVNQTPPPEGEKLHSDSGISVDSQSLHDQQPHTQTASGQALKGDGGLYSSLPPAKREEVEKLLNGSAGDTWRHLAGELGYQPEHIDSFTHEACPVRALLASWATQDSATLDALLAALRRIQRADLVESLCSESTATSPV

SEQ ID NO: 55895 - protein, 101 aa, Homo sapiens
  Payload ID: 10997
  Gene Symbol: NGFRAP1
  Gene Name: nerve growth factor receptor (TNFRSF16) associated protein 1
  Uniprot ID: Q00994
  ENSP ID: ENSP00000354843
MEQPMQNGEEDRPLGGGEGHQPAGNRRGQARRLAPNFRWAIPNRQINDGMGGDGDDMEIFMEEMREIRRKLRELQLRNCLRILMGELSNHHDHHDEFCLMP

SEQ ID NO: 55896 - protein, 101 aa, Homo sapiens; identical to SEQ ID NO: 55895
  Payload ID: 10997
  Gene Symbol: NGFRAP1
  Gene Name: nerve growth factor receptor (TNFRSF16) associated protein 1
  Uniprot ID: Q00994
  ENSP ID: ENSP00000361717

SEQ ID NO: 55897 - protein, 111 aa, Homo sapiens
  Payload ID: 10997
  Gene Symbol: NGFRAP1
  Gene Name: nerve growth factor receptor (TNFRSF16) associated protein 1
  Uniprot ID: Q00994
  ENSP ID: ENSP00000361718
MANIHQENEEMEQPMQNGEEDRPLGGGEGHQPAGNRRGQARRLAPNFRWAIPNRQINDGMGGDGDDMEIFMEEMREIRRKLRELQLRNCLRILMGELSNHHDHHDEFCLMP

SEQ ID NO: 55898 - protein, 111 aa, Homo sapiens; identical to SEQ ID NO: 55897
  Payload ID: 10997
  Gene Symbol: NGFRAP1
  Gene Name: nerve growth factor receptor (TNFRSF16) associated protein 1
  Uniprot ID: Q00994
  ENSP ID: ENSP00000361728

SEQ ID NO: 55899 - protein, 133 aa, Homo sapiens
  Payload ID: 10998
  Gene Symbol: NHLH1
  Gene Name: nescient helix loop helix 1
  Uniprot ID: Q02575
  ENSP ID: ENSP00000302189
MMLNSDTMELDLPPTHSETESGFSDCGGGAGPDGAGPGGPGGGQARGPEPGEPGRKDLQHLSREERRRRRRATAKYRTAHATRERIRVEAFNLAFAELRKLLPTLPPDKKLSKIEILRLAICYISYLNHVLDV

SEQ ID NO: 55900 - protein, 135 aa, Homo sapiens
  Payload ID: 10999
  Gene Symbol: NHLH2
  Gene Name: nescient helix loop helix 2
  Uniprot ID: Q02577
  ENSP ID: ENSP00000322087
MMLSPDQAADSDHPSSAHSDPESLGGTDTKVLGSVSDLEPVEEAEGDGKGGSRAALYPHPQQLSREEKRRRRRATAKYRSAHATRERIRVEAFNLAFAELRKLLPTLPPDKKLSKIEILRLAICYISYLNHVLDV

SEQ ID NO: 55901 - protein, 135 aa, Homo sapiens; identical to SEQ ID NO: 55900
  Payload ID: 10999
  Gene Symbol: NHLH2
  Gene Name: nescient helix loop helix 2
  Uniprot ID: Q02577
  ENSP ID: ENSP00000358519

SEQ ID NO: 55902 - protein, 107 aa, Homo sapiens
  Payload ID: 10999
  Gene Symbol: NHLH2
  Gene Name: nescient helix loop helix 2
  ENSP ID: ENSP00000405062
MMLSPDQAADSDHPSSAHSDPESLGGTDTKVLGSVSDLEPVEEAEGDGKGGSRAALYPHPQQLSREEKRRRRRATAKYRSAHATRERIRVEAFNLAFAELRKLLPTL

SEQ ID NO: 55903 - protein, 1621 aa, Homo sapiens
  Payload ID: 11000
  Gene Symbol: NES
  Gene Name: nestin
  Uniprot ID: P48681
  ENSP ID: ENSP00000357206
MEGCMGEESFQMWELNRRLEAYLARVKALEEQNELLSAELGGLRAQSADTSWRAHADDELAALRALVDQRWREKHAAEVARDNLAEELEGVAGRCQQLRLARERTTEEVARNRRAVEAEKCARAWLSSQVAELERELEALRVAHEEERVGLNAQAACAPRCPAPPRGPPAPAPEVEELARRLGEAWRGAVRGYQERVAHMETSLGQARERLGRAVQGAREGRLELQQLQAERGGLLERRAALEQRLEGRWQERLRATEKFQLAVEALEQEKQGLQSQIAQVLEGRQQLAHLKMSLSLEVATYRTLLEAENSRLQTPGGGSKTSLSFQDPKLELQFPRTPEGRRLGSLLPVLSPTSLPSPLPATLETPVPAFLKNQEFLQARTPTLASTPIPPTPQAPSPAVDAEIRAQDAPLSLLQTQGGRKQAPEPLRAEARVAIPASVLPGPEEPGGQRQEASTGQSPEDHASLAPPLSPDHSSLEAKDGESGGSRVFSICRGEGEGQIWGLVEKETAIEGKVVSSLQQEIWEEEDLNRKEIQDSQVPLEKETLKSLGEEIQESLKTLENQSHETLERENQECPRSLEEDLETLKSLEKENKELLKDVEVVRPLEKEAVGQLKPTGKEDTQTLQSLQKENQELMKSLEGNLETFLFPGTENQELVSSLQENLESLTALEKENQEPLRSPEVGDEEALRPLTKENQEPLRSLEDENKEAFRSLEKENQEPLKTLEEEDQSIVRPLETENHKSLRSLEEQDQETLRTLEKETQQRRRSLGEQDQMTLRPPEKVDLEPLKSLDQEIARPLENENQEFLKSLKEESVEAVKSLETEILESLKSAGQENLETLKSPETQAPLWTPEEINQGAMNPLEKEIQEPLESVEVNQETFRLLEEENQESLRSLGAWNLENLRSPEEVDKESQRNLEEEENLGKGEYQESLRSLEEEGQELPQSADVQRWEDTVEKDQELAQESPPGMAGVENEDEAELNLREQDGFTGKEEVVEQGELNATEEVWIPGEGHPESPEPKEQRGLVEGASVKGGAEGLQDPEGQSQQVGAPGLQAPQGLPEAIEPLVEDDVAPGGDQASPEVMLGSEPAMGESAAGAEPGPGQGVGGLGDPGHLTREEVMEPPLEEESLEAKRVQGLEGPRKDLEEAGGLGTEFSELPGKSRDPWEPPREGREESEAEAPRGAEEAFPAETLGHTGSDAPSPWPLGSEEAEEDVPPVLVSPSPTYTPILEDAPGPQPQAEGSQEASWGVQGRAEALGKVESEQEELGSGEIPEGPQEEGEESREESEEDELGETLPDSTPLGFYLRSPTSPRWDPTGEQRPPPQGETGKEGWDPAVLASEGLEAPPSEKEEGEEGEEECGRDSDLSEEFEDLGTEAPFLPGVPGEVAEPLGQVPQLLLDPAAWDRDGESDGFADEEESGEEGEEDQEEGREPGAGRWGPGSSVGSLQALSSSQRGEFLESDSVSVSVPWDDSLRGAVAGAPKTALETESQDSAEPSGSEEESDPVSLEREDKVPGPLEIPSGMEDAGPGADIIGVNGQGPNLEGKSQHVNGGVMNGLEQSEEVGQGMPLVSEGDRGSPFQEEEGSALKTSWAGAPVHLGQGQFLKFTQREGDRESWSSGED

SEQ ID NO: 55904 - protein, 744 aa, Homo sapiens
  Payload ID: 11001
  Gene Symbol: NSF
  Gene Name: N-ethylmaleimide-sensitive factor
  Uniprot ID: P46459
  ENSP ID: ENSP00000381293
MAGRSMQAARCPTDELSLTNCAVVNEKDFQSGQHVIVRTSPNHRYTFTLKTHPSVVPGSIAFSLPQRKWAGLSIGQEIEVSLYTFDKAKQCIGTMTIEIDFLQKKSIDSNPYDTDKMAAEFIQQFNNQAFSVGQQLVFSFNEKLFGLLVKDIEAMDPSILKGEPATGKRQKIEVGLVVGNSQVAFEKAENSSLNLIGKAKTKENRQSIINPDWNFEKMGIGGLDKEFSDIFRRAFASRVFPPEIVEQMGCKHVKGILLYGPPGCGKTLLARQIGKMLNAREPKVVNGPEILNKYVGESEANIRKLFADAEEEQRRLGANSGLHIIIFDEIDAICKQRGSMAGSTGVHDTVVNQLLSKIDGVEQLNNILVIGMTNRPDLIDEALLRPGRLEVKMEIGLPDEKGRLQILHIHTARMRGHQLLSADVDIKELAVETKNFSGAELEGLVRAAQSTAMNRHIKASTKVEVDMEKAESLQVTRGDFLASLENDIKPAFGTNQEDYASYIMNGIIKWGDPVTRVLDDGELLVQQTKNSDRTPLVSVLLEGPPHSGKTALAAKIAEESNFPFIKICSPDKMIGFSETAKCQAMKKIFDDAYKSQLSCVVVDDIERLLDYVPIGPRFSNLVLQALLVLLKKAPPQGRKLLIIGTTSRKDVLQEMEMLNAFSTTIHVPNIATGEQLLEALELLGNFKDKERTTIAQQVKGKKVWIGIKKLLMLIEMSLQMDPEYRVRKFLALLREEGASPLDFD

SEQ ID NO: 55905 - protein, 161 aa, Homo sapiens
  Payload ID: 11001
  Gene Symbol: NSF
  Gene Name: N-ethylmaleimide-sensitive factor
  ENSP ID: ENSP00000458184
MQAARCPTDELSLTNCAVVNEKDFQSGQHVIVRTSPNHRYTFTLKTHPSVVPGSIAFSLPQRKWAGLSIGQEIEVSLYTFDKAKQCIGTMTIEIDFLQKKSIDSNPYDTDKMAAEFIQQFNNQAFSVGQQLVFSFNEKLFGLLVKDIEAMDPSILKGEPAT

SEQ ID NO: 55906 - protein, 739 aa, Homo sapiens
  Payload ID: 11001
  Gene Symbol: NSF
  Gene Name: N-ethylmaleimide-sensitive factor
  ENSP ID: ENSP00000458221
MQAARCPTDELSLTNCAVVNEKDFQSGQHVIVRTSPNHRYTFTLKTHPSVVPGSIAFSLPQRKWAGLSIGQEIEVSLYTFDKAKQCIGTMTIEIDFLQKKSIDSNPYDTDKMAAEFIQQFNNQAFSVGQQLVFSFNEKLFGLLVKDIEAMDPSILKGEPATGKRQKIEVGLVVGNSQVAFEKAENSSLNLIGKAKTKENRQSIINPDWNFEKMGIGGLDKEFSDIFRRAFASRVFPPEIVEQMGCKHVKGILLYGPPGCGKTLLARQIGKMLNAREPKVVNGPEILNKYVGESEANIRKLFADAEEEQRRLGANSGLHIIIFDEIDAICKQRGSMAGSTGVHDTVVNQLLSKIDGVEQLNNILVIGMTNRPDLIDEALLRPGRLEVKMEIGLPDEKGRLQILHIHTARMRGHQLLSADVDIKELAVETKNFSGAELEGLVRAAQSTAMNRHIKASTKVEVDMEKAESLQVTRGDFLASLENDIKPAFGTNQEDYASYIMNGIIKWGDPVTRVLDDGELLVQQTKNSDRTPLVSVLLEGPPHSGKTALAAKIAEESNFPFIKICSPDKMIGFSETAKCQAMKKIFDDAYKSQLSCVVVDDIERLLDYVPIGPRFSNLVLQALLVLLKKAPPQGRKLLIIGTTSRKDVLQEMEMLNAFSTTIHVPNIATGEQLLEALELLGNFKDKERTTIAQQVKGKKVWIGIKKLLMLIEMSLQMDPEYRVRKFLALLREEGASPLDFD

SEQ ID NO: 55907 - protein, 136 aa, Homo sapiens
  Payload ID: 11001
  Gene Symbol: NSF
  Gene Name: N-ethylmaleimide-sensitive factor
  ENSP ID: ENSP00000459646
MIGFSETAKCQAMKKIFDDAYKSQLSCVVVDDIERLLDYVPIGPRFSNLVLQALLVLLKKAPPQGRKLLIIGTTSRKDVLQEMEMLNAFSTTIHVPNIATGEQLLEALELLGNFKDKERTTIAQQVKGKKVWIGIK

SEQ ID NO: 55908 - protein, 44 aa, Homo sapiens
  Payload ID: 11001
  Gene Symbol: NSF
  Gene Name: N-ethylmaleimide-sensitive factor
  ENSP ID: ENSP00000460152
MQAARCPTDELSLTNCAVVNEKDFQSGQHVIVRTSPNHRYTFTL

SEQ ID NO: 55909 - protein, 81 aa, Homo sapiens
  Payload ID: 11001
  Gene Symbol: NSF
  Gene Name: N-ethylmaleimide-sensitive factor
  ENSP ID: ENSP00000461448
MAGRSMQAARCPTDELSLTNCAVVNEKDFQSGQHVIVRTSPNHRYTFTLKTHPSVVPGSIAFSLPQSPYIHLTKPNSVLAQ

SEQ ID NO: 55910 - protein, 180 aa, Homo sapiens
  Payload ID: 11001
  Gene Symbol: NSF
  Gene Name: N-ethylmaleimide-sensitive factor
  ENSP ID: ENSP00000467779
  MOD_RES (1)..(1): Any amino acid
XDAYKSQLSCVVVDDIERLLDYVPIGPRFSNLVLQALLVLLKKAPPQGRKLLIIGTTSRKDVLQEMEMLNAFSTTIHVPNIATGEQLLEALELLGNFKDKERTTIAQQVKGKKVWIGIKKLLMLIEMSLQMDPEYRVRKFLALLREEGASERPSKEVGCTVGLLSLSCFAKLPCHNAGKT

SEQ ID NO: 55911 - protein, 744 aa, Homo sapiens; identical to SEQ ID NO: 55904
  Payload ID: 11001
  Gene Symbol: NSF
  Gene Name: N-ethylmaleimide-sensitive factor
  Uniprot ID: P46459
  ENSP ID: ENSP00000478614

SEQ ID NO: 55912 - protein, 744 aa, Homo sapiens; identical to SEQ ID NO: 55904
  Payload ID: 11001
  Gene Symbol: NSF
  Gene Name: N-ethylmaleimide-sensitive factor
  Uniprot ID: P46459
  ENSP ID: ENSP00000481714

SEQ ID NO: 55913 - protein, 739 aa, Homo sapiens; identical to SEQ ID NO: 55906
  Payload ID: 11001
  Gene Symbol: NSF
  Gene Name: N-ethylmaleimide-sensitive factor
  ENSP ID: ENSP00000486150

SEQ ID NO: 55914 - protein, 136 aa, Homo sapiens; identical to SEQ ID NO: 55907
  Payload ID: 11001
  Gene Symbol: NSF
  Gene Name: N-ethylmaleimide-sensitive factor
  ENSP ID: ENSP00000486400

SEQ ID NO: 55915 - protein, 161 aa, Homo sapiens; identical to SEQ ID NO: 55905
  Payload ID: 11001
  Gene Symbol: NSF
  Gene Name: N-ethylmaleimide-sensitive factor
  ENSP ID: ENSP00000486903

SEQ ID NO: 55916 - protein, 44 aa, Homo sapiens; identical to SEQ ID NO: 55908
  Payload ID: 11001
  Gene Symbol: NSF
  Gene Name: N-ethylmaleimide-sensitive factor
  ENSP ID: ENSP00000487064

SEQ ID NO: 55917 - protein, 81 aa, Homo sapiens; identical to SEQ ID NO: 55909
  Payload ID: 11001
  Gene Symbol: NSF
  Gene Name: N-ethylmaleimide-sensitive factor
  ENSP ID: ENSP00000487474

SEQ ID NO: 55918 - protein, 180 aa, Homo sapiens; identical to SEQ ID NO: 55910
  Payload ID: 11001
  Gene Symbol: NSF
  Gene Name: N-ethylmaleimide-sensitive factor
  ENSP ID: ENSP00000487479
  MOD_RES (1)..(1): Any amino acid

SEQ ID NO: 55919 - protein, 44 aa, Homo sapiens; identical to SEQ ID NO: 55908
  Payload ID: 11001
  Gene Symbol: NSF
  Gene Name: N-ethylmaleimide-sensitive factor
  ENSP ID: ENSP00000487668

SEQ ID NO: 55920 - protein, 739 aa, Homo sapiens; identical to SEQ ID NO: 55906
  Payload ID: 11001
  Gene Symbol: NSF
  Gene Name: N-ethylmaleimide-sensitive factor
  ENSP ID: ENSP00000488015

SEQ ID NO: 55921 - protein, 161 aa, Homo sapiens; identical to SEQ ID NO: 55905
  Payload ID: 11001
  Gene Symbol: NSF
  Gene Name: N-ethylmaleimide-sensitive factor
  ENSP ID: ENSP00000488185

SEQ ID NO: 55922 - protein, 180 aa, Homo sapiens; identical to SEQ ID NO: 55910
  Payload ID: 11001
  Gene Symbol: NSF
  Gene Name: N-ethylmaleimide-sensitive factor
  ENSP ID: ENSP00000488480
  MOD_RES (1)..(1): Any amino acid

SEQ ID NO: 55923 - protein, 81 aa, Homo sapiens; identical to SEQ ID NO: 55909
  Payload ID: 11001
  Gene Symbol: NSF
  Gene Name: N-ethylmaleimide-sensitive factor
  ENSP ID: ENSP00000488517

SEQ ID NO: 55924 - protein, 295 aa, Homo sapiens
  Payload ID: 11002
  Gene Symbol: NAPA
  Gene Name: N-ethylmaleimide-sensitive factor attachment protein, alpha
  Uniprot ID: P54920
  ENSP ID: ENSP00000263354
MDNSGKEAEAMALLAEAERKVKNSQSFFSGLFGGSSKIEEACEIYARAANMFKMAKNWSAAGNAFCQAAQLHLQLQSKHDAATCFVDAGNAFKKADPQEAINCLMRAIEIYTDMGRFTIAAKHHISIAEIYETELVDIEKAIAHYEQSADYYKGEESNSSANKCLLKVAGYAALLEQYQKAIDIYEQVGTNAMDSPLLKYSAKDYFFKAALCHFCIDMLNAKLAVQKYEELFPAFSDSRECKLMKKLLEAHEEQNVDSYTESVKEYDSISRLDQWLTTMLLRIKKTIQGDEEDLR

SEQ ID NO: 55925 - protein, 35 aa, Homo sapiens
  Payload ID: 11002
  Gene Symbol: NAPA
  Gene Name: N-ethylmaleimide-sensitive factor attachment protein, alpha
  ENSP ID: ENSP00000470654
MDNSGKEAEAMALLAEAERKVKNSQSFFSGLFGGH

SEQ ID NO: 55926 - protein, 60 aa, Homo sapiens
  Payload ID: 11002
  Gene Symbol: NAPA
  Gene Name: N-ethylmaleimide-sensitive factor attachment protein, alpha
  ENSP ID: ENSP00000470665
MDNSGKEAEAMALLAEAERKVKNSQSFFSGLFGPHPDPTERIPKCVAVGLWFDEMSTSCG

SEQ ID NO: 55927 - protein, 102 aa, Homo sapiens
  Payload ID: 11002
  Gene Symbol: NAPA
  Gene Name: N-ethylmaleimide-sensitive factor attachment protein, alpha
  ENSP ID: ENSP00000470946
MRAIEIYTDMGRFTIAAKHHISIAEIYETELVDIEKAIAHYEQSADYYKGEESNSSANKCLLKVAGYAALLEQYQKAIDIYEQVGTNAMDSPLLKYSAKDYF

SEQ ID NO: 55928 - protein, 74 aa, Homo sapiens
  Payload ID: 11002
  Gene Symbol: NAPA
  Gene Name: N-ethylmaleimide-sensitive factor attachment protein, alpha
  ENSP ID: ENSP00000470954
MDNSGKEAEAMALLAEAERKVKNSQSFFSGLFGCWKRVLPGCTAAPAAPEQARRSHLLCGRWQRIQESRPPRGH

SEQ ID NO: 55929 - protein, 137 aa, Homo sapiens
  Payload ID: 11002
  Gene Symbol: NAPA
  Gene Name: N-ethylmaleimide-sensitive factor attachment protein, alpha
  ENSP ID: ENSP00000471018
MFKMAKNWSAAGNAFCQAAQLHLQLQSKHDAATCFVDAGNAFKKADPQEAINCLMRAIEIYTDMGRFTIAAKHHISIAEIYETELVDIEKAIAHYEQSADYYKGEESNSSANKCLLKVAGYAALLEQYQKAIDIYEQ

SEQ ID NO: 55930 - protein, 139 aa, Homo sapiens
  Payload ID: 11002
  Gene Symbol: NAPA
  Gene Name: N-ethylmaleimide-sensitive factor attachment protein, alpha
  ENSP ID: ENSP00000471261
  MOD_RES (1)..(1): Any amino acid
XAGNAFCQAAQLHLQLQSKHDAATCFVDAGNAFKKADPQEAINCLMRAIEIYTDMGRFTIAAKHHISIAEIYETELVDIEKVGTNAMDSPLLKYSAKDYFFKAALCHFCIDMLNAKLAVQKYEELFPAFSDSRECKLMK

SEQ ID NO: 55931 - protein, 256 aa, Homo sapiens
  Payload ID: 11002
  Gene Symbol: NAPA
  Gene Name: N-ethylmaleimide-sensitive factor attachment protein, alpha
  ENSP ID: ENSP00000471520
MDNSGKEAEAMALLAEAERKVKNSQSFFSGLFGGSSKIEEACEIYARAANMFKMAKNWSEAINCLMRAIEIYTDMGRFTIAAKHHISIAEIYETELVDIEKAIAHYEQSADYYKGEESNSSANKCLLKVAGYAALLEQYQKAIDIYEQVGTNAMDSPLLKYSAKDYFFKAALCHFCIDMLNAKLAVQKYEELFPAFSDSRECKLMKKLLEAHEEQNVDSYTESVKEYDSISRLDQWLTTMLLRIKKTIQGDEEDLR

SEQ ID NO: 55932 - protein, 83 aa, Homo sapiens
  Payload ID: 11002
  Gene Symbol: NAPA
  Gene Name: N-ethylmaleimide-sensitive factor attachment protein, alpha
  ENSP ID: ENSP00000472235
HFCIDMLNAKLAVQKYEELFPAFSDSRECKLMKKLLEAHEEQNVDSYTESVKEYDSISRLDQWLTTMLLRIKKTIQGDEEDLR

SEQ ID NO: 55933 - protein, 268 aa, Homo sapiens
  Payload ID: 11002
  Gene Symbol: NAPA
  Gene Name: N-ethylmaleimide-sensitive factor attachment protein, alpha
  ENSP ID: ENSP00000472667
MDNSGKEAEAMALLAEAERKVKNSQSFFSGLFGGSSKIEEACEIYARAANMFKMAKNWSGMSSPLELLQAAGNAFCQAAQLHLQLQSKHDAATCFVDAGNAFKKADPQEAINCLMRAIEIYTDMGRFTIAAKHHISIAEIYETELVDIEKAIAHYEQSADYYKGEESNSSANKCLLKVAGYAALLEQYQKAIDIYEQVGTNAMDSPLLKYSAKDYFFKAALCHFCIDMLNAKLAVQKYEELFPAFSDSRECKLMKKLLEAHEEQNVDS

SEQ ID NO: 55934 - protein, 298 aa, Homo sapiens
  Payload ID: 11003
  Gene Symbol: NAPB
  Gene Name: N-ethylmaleimide-sensitive factor attachment protein, beta
  Uniprot ID: Q9H115
  ENSP ID: ENSP00000366225
MDNAGKEREAVQLMAEAEKRVKASHSFLRGLFGGNTRIEEACEMYTRAANMFKMAKNWSAAGNAFCQAAKLHMQLQSKHDSATSFVDAGNAYKKADPQEAINCLNAAIDIYTDMGRFTIAAKHHITIAEIYETELVDIEKAIAHYEQSADYYKGEESNSSANKCLLKVAAYAAQLEQYQKAIEIYEQVGANTMDNPLLKYSAKDYFFKAALCHFIVDELNAKLALEKYEEMFPAFTDSRECKLLKKLLEAHEEQNSEAYTEAVKEFDSISRLDQWLTTMLLRIKKSIQGDGEGDGDLK

SEQ ID NO: 55935 - protein, 204 aa, Homo sapiens
  Payload ID: 11003
  Gene Symbol: NAPB
  Gene Name: N-ethylmaleimide-sensitive factor attachment protein, beta
  Uniprot ID: Q9H115
  ENSP ID: ENSP00000381459
MTLLPALWMLEMLTKRQIPKGRFTIAAKHHITIAEIYETELVDIEKAIAHYEQSADYYKGEESNSSANKCLLKVAAYAAQLEQYQKAIEIYEQVGANTMDNPLLKYSAKDYFFKAALCHFIVDELNAKLALEKYEEMFPAFTDSRECKLLKKLLEAHEEQNSEAYTEAVKEFDSISRLDQWLTTMLLRIKKSIQGDGEGDGDLK

SEQ ID NO: 55936 - protein, 259 aa, Homo sapiens
  Payload ID: 11003
  Gene Symbol: NAPB
  Gene Name: N-ethylmaleimide-sensitive factor attachment protein, beta
  Uniprot ID: Q9H115
  ENSP ID: ENSP00000413600
MDNAGKEREAVQLMAEAEKRVKASHSFLRGLFGGNTRIEEACEMYTRAANMFKMAKNWSEAINCLNAAIDIYTDMGRFTIAAKHHITIAEIYETELVDIEKAIAHYEQSADYYKGEESNSSANKCLLKVAAYAAQLEQYQKAIEIYEQVGANTMDNPLLKYSAKDYFFKAALCHFIVDELNAKLALEKYEEMFPAFTDSRECKLLKKLLEAHEEQNSEAYTEAVKEFDSISRLDQWLTTMLLRIKKSIQGDGEGDGDLK

SEQ ID NO: 55937 - protein, 302 aa, Homo sapiens
  Payload ID: 11003
  Gene Symbol: NAPB
  Gene Name: N-ethylmaleimide-sensitive factor attachment protein, beta
  ENSP ID: ENSP00000482826
MDNAGKEREAVQLMAEAEKRVKASHSFLRGLFGGNTRIEEACEMYTRAANMFKMAKNWSVSSSAAGNAFCQAAKLHMQLQSKHDSATSFVDAGNAYKKADPQEAINCLNAAIDIYTDMGRFTIAAKHHITIAEIYETELVDIEKAIAHYEQSADYYKGEESNSSANKCLLKVAAYAAQLEQYQKAIEIYEQVGANTMDNPLLKYSAKDYFFKAALCHFIVDELNAKLALEKYEEMFPAFTDSRECKLLKKLLEAHEEQNSEAYTEAVKEFDSISRLDQWLTTMLLRIKKSIQGDGEGDGDLK

SEQ ID NO: 55938 - protein, 312 aa, Homo sapiens
  Payload ID: 11004
  Gene Symbol: NAPG
  Gene Name: N-ethylmaleimide-sensitive factor attachment protein, gamma
  Uniprot ID: Q99747
  ENSP ID: ENSP00000324628
MAAQKINEGLEHLAKAEKYLKTGFLKWKPDYDSAASEYGKAAVAFKNAKQFEQAKDACLREAVAHENNRALFHAAKAYEQAGMMLKEMQKLPEAVQLIEKASMMYLENGTPDTAAMALERAGKLIENVDPEKAVQLYQQTANVFENEERLRQAVELLGKASRLLVRGRRFDEAALSIQKEKNIYKEIENYPTCYKKTIAQVLVHLHRNDYVAAERCVRESYSIPGFNGSEDCAALEQLLEGYDQQDQDQVSDVCNSPLFKYMDNDYAKLGLSLVVPGGGIKKKSPATPQAKPDGVTATAADEEEDEYSGGLC

SEQ ID NO: 55939 - protein, 177 aa, Homo sapiens
  Payload ID: 11004
  Gene Symbol: NAPG
  Gene Name: N-ethylmaleimide-sensitive factor attachment protein, gamma
  ENSP ID: ENSP00000463018
MSSGEQHRSVENHRPRRAPCVEGTIGLPQKLLGEPLSSGILLSLWAGTVLRSSFDVYVLPPLVHLKTGFLKWKPDYDSAASEYGKAAVAFKNAKQFEQAKDACLREAVAHENNRALFHAAKAYEQAGMMLKEMQKLPEAVQLIEKASMMYLENGTPDTAAMALERAGKLIENVDPEK

SEQ ID NO: 55940 - protein, 22 aa, Homo sapiens
  Payload ID: 11004
  Gene Symbol: NAPG
  Gene Name: N-ethylmaleimide-sensitive factor attachment protein, gamma
  ENSP ID: ENSP00000463265
MAAQKINEGLEHLAKAEKYCCF

SEQ ID NO: 55941 - protein, 18 aa, Homo sapiens
  Payload ID: 11004
  Gene Symbol: NAPG
  Gene Name: N-ethylmaleimide-sensitive factor attachment protein, gamma
  ENSP ID: ENSP00000464496
MAAQKINEGLEHLAKAEK

SEQ ID NO: 55942 - protein, 604 aa, Homo sapiens
  Payload ID: 11005
  Gene Symbol: NTN1
  Gene Name: netrin 1
  Uniprot ID: O95631
  ENSP ID: ENSP00000173229
MMRAVWEALAALAAVACLVGAVRGGPGLSMFAGQAAQPDPCSDENGHPRRCIPDFVNAAFGKDVRVSSTCGRPPARYCVVSERGEERLRSCHLCNASDPKKAHPPAFLTDLNNPHNLTCWQSENYLQFPHNVTLTLSLGKKFEVTYVSLQFCSPRPESMAIYKSMDYGRTWVPFQFYSTQCRKMYNRPHRAPITKQNEQEAVCTDSHTDMRPLSGGLIAFSTLDGRPSAHDFDNSPVLQDWVTATDIRVAFSRLHTFGDENEDDSELARDSYFYAVSDLQVGGRCKCNGHAARCVRDRDDSLVCDCRHNTAGPECDRCKPFHYDRPWQRATAREANECVACNCNLHARRCRFNMELYKLSGRKSGGVCLNCRHNTAGRHCHYCKEGYYRDMGKPITHRKACKACDCHPVGAAGKTCNQTTGQCPCKDGVTGITCNRCAKGYQQSRSPIAPCIKIPVAPPTTAASSVEEPEDCDSYCKASKGKLKINMKKYCKKDYAVQIHILKADKAGDWWKFTVNIISVYKQGTSRIRRGDQSLWIRSRDIACKCPKIKPLKKYLLLGNAEDSPDQSGIVADKSSLVIQWRDTWARRLRKFQQREKKGKCKKA

SEQ ID NO: 55943 - protein, 153 aa, Homo sapiens
  Payload ID: 11005
  Gene Symbol: NTN1
  Gene Name: netrin 1
  ENSP ID: ENSP00000389375
HYCKEGYYRDMGKPITHRKACKACDCHPVGAAGKTCNQTTGQCPCKDGVTGITCNRCAKGYQQSRSPIAPCIKIPVAPPTTAASSVEEPEAARQPNTFQAEGLSLLPGAAEKEGARCWGYRRRLGHRVAQAECRGPRSWAWGRITSSFSFASN

SEQ ID NO: 55944 - protein, 580 aa, Homo sapiens
  Payload ID: 11006
  Gene Symbol: NTN3
  Gene Name: netrin 3
  Uniprot ID: O00634
  ENSP ID: ENSP00000293973
MPGWPWGLLLTAGTLFAALSPGPPAPADPCHDEGGAPRGCVPGLVNAALGREVLASSTCGRPATRACDASDPRRAHSPALLTSPGGTASPLCWRSESLPRAPLNVTLTVPLGKAFELVFVSLRFCSAPPASVALLKSQDHGRSWAPLGFFSSHCDLDYGRLPAPANGPAGPGPEALCFPAPLAQPDGSGLLAFSMQDSSPPGLDLDSSPVLQDWVTATDVRVVLTRPSTAGDPRDMEAVVPYSYAATDLQVGGRCKCNGHASRCLLDTQGHLICDCRHGTEGPDCGRCKPFYCDRPWQRATARESHACLACSCNGHARRCRFNMELYRLSGRRSGGVCLNCRHNTAGRHCHYCREGFYRDPGRALSDRRACRACDCHPVGAAGKTCNQTTGQCPCKDGVTGLTCNRCAPGFQQSRSPVAPCVKTPIPGPTEDSSPVQPQDCDSHCKPARGSYRISLKKFCKKDYAVQVAVGARGEARGAWTRFPVAVLAVFRSGEERARRGSSALWVPAGDAACGCPRLLPGRRYLLLGGGPGAAAGGAGGRGPGLIAARGSLVLPWRDAWTRRLRRLQRRERRGRCSAA

SEQ ID NO: 55945 - protein, 591 aa, Homo sapiens
  Payload ID: 11007
  Gene Symbol: NTN4
  Gene Name: netrin 4
  Uniprot ID: Q9HB63
  ENSP ID: ENSP00000339436
MGNLALGRKLWADTTCGQNATELYCFYSENTDLTCRQPKCDKCNAAYPHLAHLPSAMADSSFRFPRTWWQSAEDVHREKIQLDLEAEFYFTHLIVMFKSPRPAAMVLDRSQDFGKTWKPYKYFATNCSATFGLEDDVVKKGAICTSKYSSPFPCTGGEVIFKALSPPYDTENPYSAKVQEQLKITNLRVQLLKRQSCPCQRNDLNEEPQHFTHYAIYDFIVKGSCFCNGHADQCIPVHGFRPVKAPGTFHMVHGKCMCKHNTAGSHCQHCAPLYNDRPWEAADGKTGAPNECRTCKCNGHADTCHFDVNVWEASGNRSGGVCDDCQHNTEGQYCQRCKPGFYRDLRRPFSAPDACKPCSCHPVGSAVLPANSVTFCDPSNGDCPCKPGVAGRRCDRCMVGYWGFGDYGCRPCDCAGSCDPITGDCISSHTDIDWYHEVPDFRPVHNKSEPAWEWEDAQGFSALLHSGKCECKEQTLGNAKAFCGMKYSYVLKIKILSAHDKGTHVEVNVKIKKVLKSTKLKIFRGKRTLYPESWTDRGCTCPILNPGLEYLVAGHEDIRTGKLIVNMKSFVQHWKPSLGRKVMDILKRECK

SEQ ID NO: 55946 - protein, 628 aa, Homo sapiens
  Payload ID: 11007
  Gene Symbol: NTN4
  Gene Name: netrin 4
  Uniprot ID: Q9HB63
  ENSP ID: ENSP00000340998
MGSCARLLLLWGCTVVAAGLSGVAGVSSRCEKACNPRMGNLALGRKLWADTTCGQNATELYCFYSENTDLTCRQPKCDKCNAAYPHLAHLPSAMADSSFRFPRTWWQSAEDVHREKIQLDLEAEFYFTHLIVMFKSPRPAAMVLDRSQDFGKTWKPYKYFATNCSATFGLEDDVVKKGAICTSKYSSPFPCTGGEVIFKALSPPYDTENPYSAKVQEQLKITNLRVQLLKRQSCPCQRNDLNEEPQHFTHYAIYDFIVKGSCFCNGHADQCIPVHGFRPVKAPGTFHMVHGKCMCKHNTAGSHCQHCAPLYNDRPWEAADGKTGAPNECRTCKCNGHADTCHFDVNVWEASGNRSGGVCDDCQHNTEGQYCQRCKPGFYRDLRRPFSAPDACKPCSCHPVGSAVLPANSVTFCDPSNGDCPCKPGVAGRRCDRCMVGYWGFGDYGCRPCDCAGSCDPITGDCISSHTDIDWYHEVPDFRPVHNKSEPAWEWEDAQGFSALLHSGKCECKEQTLGNAKAFCGMKYSYVLKIKILSAHDKGTHVEVNVKIKKVLKSTKLKIFRGKRTLYPESWTDRGCTCPILNPGLEYLVAGHEDIRTGKLIVNMKSFVQHWKPSLGRKVMDILKRECK

SEQ ID NO: 55947 - protein, 591 aa, Homo sapiens; identical to SEQ ID NO: 55945
  Payload ID: 11007
  Gene Symbol: NTN4
  Gene Name: netrin 4
  Uniprot ID: Q9HB63
  ENSP ID: ENSP00000444432

SEQ ID NO: 55948 - protein, 605 aa, Homo sapiens
  Payload ID: 11007
  Gene Symbol: NTN4
  Gene Name: netrin 4
  Uniprot ID: Q9HB63
  ENSP ID: ENSP00000447292
MGSCARLLLLWGCTVVAAGLSGVAGVSSRCEKACNPRMGNLALGRKLWADTTCGQNATELYCFYSENTDLTCRQPKCDKCNAAYPHLAHLPSAMADSSFRFPRTWWQSAEDVHREKIQLDLEAEFYFTHLIVMFKSPRPAAMVLDRSQDFGKTWKPYKYFATNCSATFGLEDDVVKKGAICTSKYSSPFPCTGGEVIFKALSPPYDTENPYSAKVQEQLKITNLRVQLLKRQSCPCQRNDLNEEPQHFTHYAIYDFIVKGSCFCNGHADQCIPVHGFRPVKAPGTFHMVHGKCMCKHNTAGSHCQHCAPLYNDRPWEAADGKTGAPNECRTCKCNGHADTCHFDVNVWEASGNRSGGVCDDCQHNTEGQYCQRCKPGFYRDLRRPFSAPDACKPCSCHPVGSAVLPANSVTFCDPSNGDCPCKPGVAGRRCDRCMVGYWGFGDYGCRPCDCAGSCDPITGDCISSHTDIDWYHEVPDFRPVHNKSEPAWEWEDAQGFSALLHSVLKIKILSAHDKGTHVEVNVKIKKVLKSTKLKIFRGKRTLYPESWTDRGCTCPILNPGLEYLVAGHEDIRTGKLIVNMKSFVQHWKPSLGRKVMDILKRECK

SEQ ID NO: 55949 - protein, 176 aa, Homo sapiens
  Payload ID: 11007
  Gene Symbol: NTN4
  Gene Name: netrin 4
  ENSP ID: ENSP00000447594
MGNLALGRKLWADTTCGQNATELYCFYSENTDLTCRQPKCDKCNAAYPHLAHLPSAMADSSFRFPRTWWQSAEDVHREKIQLDLEAEFYFTHLIVMFKSPRPAAMVLDRSQDFGKTWKPYKYFATNCSATFGLEDDVVKKGAICTSKYSSPFPCTGGEVIFKALSPPYDTENPYSA

SEQ ID NO: 55950 - protein, 489 aa, Homo sapiens
  Payload ID: 11008
  Gene Symbol: NTN5
  Gene Name: netrin 5
  Uniprot ID: Q8WTR8
  ENSP ID: ENSP00000270235
MPVTFALLLLLGQATADPCYDPQGRPQFCLPPVTQLAAVAASCPQACALSPGNHLGARETCNGSLTLALGGPFLLTSVSLRFCTPGPPALILSAAWASGGPWRLLWHRPAWPGALGGPERVTFHSTPGPKATVAASHLRVEFGGQAGLAAAGLRGRCQCHGHAARCAARARPPRCHCRHHTTGPGCESCRPSHRDWPWRPATPRHPHPCLPCSCNQHARRCRFNSELFRLSGGRSGGVCERCRHHTAGRHCHYCQPGFWRDPSQPIFSRRACRACQCHPIGATGGTCNQTSGQCTCKLGVTGLTCNRCGPGYQQSRSPRMPCQRIPEATTTLATTPGAYSSDPQCQNYCNMSDTRVHMSLRRYCQQDHVLRAQVLASEAAGPAWQRLAVRVLAVYKQRAQPVRRGDQDAWVPRADLTCGCLRLQPGTDYLLLGSAVGDPDPTRLILDRHGLALPWRPRWARPLKRLQQEERAGGCRGVRAPTPSPRPEH

SEQ ID NO: 55951 - protein, 75 aa, Homo sapiens
  Payload ID: 11008
  Gene Symbol: NTN5
  Gene Name: netrin 5
  ENSP ID: ENSP00000469490
MPCQRIPEATTTLATTPGAYSSDPQCQNYCNMSDTRVHMSLRRYCQQDHVLRAQVLASEAAGPAWQRLAVRVLAV

SEQ ID NO: 55952 - protein, 494 aa, Homo sapiens
  Payload ID: 11009
  Gene Symbol: NTNG1
  Gene Name: netrin G1
  Uniprot ID: Q9Y2I2
  ENSP ID: ENSP00000359082
MYLSRFLSIHALWVTVSSVMQPYPLVWGHYDLCKTQIYTEEGKVWDYMACQPESTDMTKYLKVKLDPPDITCGDPPETFCAMGNPYMCNNECDASTPELAHPPELMFDFEGRHPSTFWQSATWKEYPKPLQVNITLSWSKTIELTDNIVITFESGRPDQMILEKSLDYGRTWQPYQYYATDCLDAFHMDPKSVKDLSQHTVLEIICTEEYSTGYTTNSKIIHFEIKDRFAFFAGPRLRNMASLYGQLDTTKKLRDFFTVTDLRIRLLRPAVGEIFVDELHLARYFYAISDIKVRGRCKCNLHATVCVYDNSKLTCECEHNTTGPDCGKCKKNYQGRPWSPGSYLPIPKGTANTCIPSISSIGNCECFGHSNRCSYIDLLNTVICVSCKHNTRGQHCELCRLGYFRNASAQLDDENVCIANVCDNELLHCQNGGTCHNNVRCLCPAAYTGILCEKLRCEEAGSCGSDSGQGAPPHGSPALLLLTTLLGTASPLVF

SEQ ID NO: 55953 - protein, 480 aa, Homo sapiens
  Payload ID: 11009
  Gene Symbol: NTNG1
  Gene Name: netrin G1
  Uniprot ID: Q9Y2I2
  ENSP ID: ENSP00000359083
MYLSRFLSIHALWVTVSSVMQPYPLVWGHYDLCKTQIYTEEGKVWDYMACQPESTDMTKYLKVKLDPPDITCGDPPETFCAMGNPYMCNNECDASTPELAHPPELMFDFEGRHPSTFWQSATWKEYPKPLQVNITLSWSKTIELTDNIVITFESGRPDQMILEKSLDYGRTWQPYQYYATDCLDAFHMDPKSVKDLSQHTVLEIICTEEYSTGYTTNSKIIHFEIKDRFAFFAGPRLRNMASLYGQLDTTKKLRDFFTVTDLRIRLLRPAVGEIFVDELHLARYFYAISDIKVRGRCKCNLHATVCVYDNSKLTCECEHNTTGPDCGKCKKNYQGRPWSPGSYLPIPKGTANTCIPSISSIGNPPKFNRIWPNISSLEVSNPKQVAPKLALSTVSSVQVANHKRANVCDNELLHCQNGGTCHNNVRCLCPAAYTGILCEKLRCEEAGSCGSDSGQGAPPHGSPALLLLTTLLGTASPLVF

SEQ ID NO: 55954 - protein, 460 aa, Homo sapiens
  Payload ID: 11009
  Gene Symbol: NTNG1
  Gene Name: netrin G1
  Uniprot ID: Q9Y2I2
  ENSP ID: ENSP00000359084
MYLSRFLSIHALWVTVSSVMQPYPLVWGHYDLCKTQIYTEEGKVWDYMACQPESTDMTKYLKVKLDPPDITCGDPPETFCAMGNPYMCNNECDASTPELAHPPELMFDFEGRHPSTFWQSATWKEYPKPLQVNITLSWSKTIELTDNIVITFESGRPDQMILEKSLDYGRTWQPYQYYATDCLDAFHMDPKSVKDLSQHTVLEIICTEEYSTGYTTNSKIIHFEIKDRFAFFAGPRLRNMASLYGQLDTTKKLRDFFTVTDLRIRLLRPAVGEIFVDELHLARYFYAISDIKVRGRCKCNLHATVCVYDNSKLTCECEHNTTGPDCGKCKKNYQGRPWSPGSYLPIPKGTANTCIPSISSIGNPPKFNRIWPNISSLEVSNPKQANVCDNELLHCQNGGTCHNNVRCLCPAAYTGILCEKLRCEEAGSCGSDSGQGAPPHGSPALLLLTTLLGTASPLVF

SEQ ID NO: 55955 - protein, 539 aa, Homo sapiens
  Payload ID: 11009
  Gene Symbol: NTNG1
  Gene Name: netrin G1
  Uniprot ID: Q9Y2I2
  ENSP ID: ENSP00000359085
MYLSRFLSIHALWVTVSSVMQPYPLVWGHYDLCKTQIYTEEGKVWDYMACQPESTDMTKYLKVKLDPPDITCGDPPETFCAMGNPYMCNNECDASTPELAHPPELMFDFEGRHPSTFWQSATWKEYPKPLQVNITLSWSKTIELTDNIVITFESGRPDQMILEKSLDYGRTWQPYQYYATDCLDAFHMDPKSVKDLSQHTVLEIICTEEYSTGYTTNSKIIHFEIKDRFAFFAGPRLRNMASLYGQLDTTKKLRDFFTVTDLRIRLLRPAVGEIFVDELHLARYFYAISDIKVRGRCKCNLHATVCVYDNSKLTCECEHNTTGPDCGKCKKNYQGRPWSPGSYLPIPKGTANTCIPSISSIGNCECFGHSNRCSYIDLLNTVICVSCKHNTRGQHCELCRLGYFRNASAQLDDENVCIECYCNPLGSIHDRCNGSGFCECKTGTTGPKCDECLPGNSWHYGCQPNVCDNELLHCQNGGTCHNNVRCLCPAAYTGILCEKLRCEEAGSCGSDSGQGAPPHGSPALLLLTTLLGTASPLVF

SEQ ID NO: 55956 - protein, 480 aa, Homo sapiens; identical to SEQ ID NO: 55953
  Payload ID: 11009
  Gene Symbol: NTNG1
  Gene Name: netrin G1
  Uniprot ID: Q9Y2I2
  ENSP ID: ENSP00000359088

SEQ ID NO: 55957 - protein, 539 aa, Homo sapiens; identical to SEQ ID NO: 55955
  Payload ID: 11009
  Gene Symbol: NTNG1
  Gene Name: netrin G1
  Uniprot ID: Q9Y2I2
  ENSP ID: ENSP00000359090

SEQ ID NO: 55958 - protein, 438 aa, Homo sapiens
  Payload ID: 11009
  Gene Symbol: NTNG1
  Gene Name: netrin G1
  Uniprot ID: Q9Y2I2
  ENSP ID: ENSP00000359091
MYLSRFLSIHALWVTVSSVMQPYPLVWGHYDLCKTQIYTEEGKVWDYMACQPESTDMTKYLKVKLDPPDITCGDPPETFCAMGNPYMCNNECDASTPELAHPPELMFDFEGRHPSTFWQSATWKEYPKPLQVNITLSWSKTIELTDNIVITFESGRPDQMILEKSLDYGRTWQPYQYYATDCLDAFHMDPKSVKDLSQHTVLEIICTEEYSTGYTTNSKIIHFEIKDRFAFFAGPRLRNMASLYGQLDTTKKLRDFFTVTDLRIRLLRPAVGEIFVDELHLARYFYAISDIKVRGRCKCNLHATVCVYDNSKLTCECEHNTTGPDCGKCKKNYQGRPWSPGSYLPIPKGTANTCIPSISSIGTNVCDNELLHCQNGGTCHNNVRCLCPAAYTGILCEKLRCEEAGSCGSDSGQGAPPHGSPALLLLTTLLGTASPLVF

SEQ ID NO: 55959 - protein, 422 aa, Homo sapiens
  Payload ID: 11010
  Gene Symbol: NTNG2
  Gene Name: netrin G2
  Uniprot ID: Q96CW9
  ENSP ID: ENSP00000361252
MLHLLALFLHCLPLASGDYDICKSWVTTDEGPTWEFYACQPKVMRLKDYVKVKVEPSGITCGDPPERFCSHENPYLCSNECDASNPDLAHPPRLMFDKEEEGLATYWQSITWSRYPSPLEANITLSWNKTVELTDDVVMTFEYGRPTVMVLEKSLDNGRTWQPYQFYAEDCMEAFGMSARRARDMSSSSAHRVLCTEEYSRWAGSKKEKHVRFEVRDRFAIFAGPDLRNMDNLYTRLESAKGLKEFFTLTDLRMRLLRPALGGTYVQRENLYKYFYAISNIEVIGRCKCNLHANLCSMREGSLQCECEHNTTGPDCGKCKKNFRTRSWRAGSYLPLPHGSPNACATAGSFGTLQTPPPGRSPSALRGSRRGLANVKEPAGSRPQISEMLLGCTVTLHQGSVGPHIPPKLSLPDPGGPWLGSQ

SEQ ID NO: 55960 - protein, 530 aa, Homo sapiens
  Payload ID: 11010
  Gene Symbol: NTNG2
  Gene Name: netrin G2
  Uniprot ID: Q96CW9
  ENSP ID: ENSP00000376921
MLHLLALFLHCLPLASGDYDICKSWVTTDEGPTWEFYACQPKVMRLKDYVKVKVEPSGITCGDPPERFCSHENPYLCSNECDASNPDLAHPPRLMFDKEEEGLATYWQSITWSRYPSPLEANITLSWNKTVELTDDVVMTFEYGRPTVMVLEKSLDNGRTWQPYQFYAEDCMEAFGMSARRARDMSSSSAHRVLCTEEYSRWAGSKKEKHVRFEVRDRFAIFAGPDLRNMDNLYTRLESAKGLKEFFTLTDLRMRLLRPALGGTYVQRENLYKYFYAISNIEVIGRCKCNLHANLCSMREGSLQCECEHNTTGPDCGKCKKNFRTRSWRAGSYLPLPHGSPNACATAGSFGNCECYGHSNRCSYIDFLNVVTCVSCKHNTRGQHCQHCRLGYYRNGSAELDDENVCIECNCNQIGSVHDRCNETGFCECREGAAGPKCDDCLPTHYWRQGCYPNVCDDDQLLCQNGGTCLQNQRCACPRGYTGVRCEQPRCDPADDDGGLDCDRAPGAAPRPATLLGCLLLLGLAARLGR

SEQ ID NO: 55961 - protein, 172 aa, Homo sapiens
  Payload ID: 11011
  Gene Symbol: NENF
  Gene Name: neudesin neurotrophic factor
  Uniprot ID: Q9UMX5
  ENSP ID: ENSP00000355955
MVGPAPRRRLRPLAALALVLALAPGLPTARAGQTPRPAERGPPVRLFTEEELARYGGEEEDQPIYLAVKGVVFDVTSGKEFYGRGAPYNALTGKDSTRGVAKMSLDPADLTHDTTGLTAKELEALDEVFTKVYKAKYPIVGYTARRILNEDGSPNLDFKPEDQPHFDIKDEF

SEQ ID NO: 55962 - protein, 291 aa, Homo sapiens
  Payload ID: 11012
  Gene Symbol: NGRN
  Gene Name: neugrin, neurite outgrowth associated
  Uniprot ID: Q9NPE2
  ENSP ID: ENSP00000368389
MAVTLSLLLGGRVCAAVTRCGFATRGVAGPGPIGREPDPDSDWEPEERELQEVESTLKRQKQAIRFQKIRRQMEAPGAPPRTLTWEAMEQIRYLHEEFPESWSVPRLAEGFDVSTDVIRRVLKSKFLPTLEQKLKQDQKVLKKAGLAHSLQHLRGSGNTSKLLPAGHSVSGSLLMPGHEASSKDPNHSTALKVIESDTHRTNTPRRRKGRNKEIQDLEESFVPVAAPLGHPRELQKYSSDSESPRGTGSGALPSGQKLEELKAEEPDNFSSKVVQRGREFFDSNGNFLYRI

SEQ ID NO: 55963 - protein, 23 aa, Homo sapiens
  Payload ID: 11012
  Gene Symbol: NGRN
  Gene Name: neugrin, neurite outgrowth associated
  ENSP ID: ENSP00000480153
EAPGAPPRTLTWEAMEQIRYLSS

SEQ ID NO: 55964 - protein, 858 aa, Homo sapiens
  Payload ID: 11013
  Gene Symbol: NCAM1
  Gene Name: neural cell adhesion molecule 1
  Uniprot ID: P13591
  ENSP ID: ENSP00000318472
MLQTKDLIWTLFFLGTAVSLQVDIVPSQGEISVGESKFFLCQVAGDAKDKDISWFSPNGEKLTPNQQRISVVWNDDSSSTLTIYNANIDDAGIYKCVVTGEDGSESEATVNVKIFQKLMFKNAPTPQEFREGEDAVIVCDVVSSLPPTIIWKHKGRDVILKKDVRFIVLSNNYLQIRGIKKTDEGTYRCEGRILARGEINFKDIQVIVNVPPTIQARQNIVNATANLGQSVTLVCDAEGFPEPTMSWTKDGEQIEQEEDDEKYIFSDDSSQLTIKKVDKNDEAEYICIAENKAGEQDATIHLKVFAKPKITYVENQTAMELEEQVTLTCEASGDPIPSITWRTSTRNISSEEKASWTRPEKQETLDGHMVVRSHARVSSLTLKSIQYTDAGEYICTASNTIGQDSQSMYLEVQYAPKLQGPVAVYTWEGNQVNITCEVFAYPSATISWFRDGQLLPSSNYSNIKIYNTPSASYLEVTPDSENDFGNYNCTAVNRIGQESLEFILVQADTPSSPSIDQVEPYSSTAQVQFDEPEATGGVPILKYKAEWRAVGEEVWHSKWYDAKEASMEGIVTIVGLKPETTYAVRLAALNGKGLGEISAASEFKTQPVQGEPSAPKLEGQMGEDGNSIKVNLIKQDDGGSPIRHYLVRYRALSSEWKPEIRLPSGSDHVMLKSLDWNAEYEVYVVAENQQGKSKAAHFVFRTSAQPTAIPANGSPTSGLSTGAIVGILIVIFVLLLVVVDITCYFLNKCGLFMCIAVNLCGKAGPGAKGKDMEEGKAAFSKDESKEPIVEVRTEEERTPNHDGGKHTEPNETTPLTEPEKGPVEAKPECQETETKPAPAEVKTVPNDATQTKENESKA

SEQ ID NO: 55965 - protein, 725 aa, Homo sapiens
  Payload ID: 11013
  Gene Symbol: NCAM1
  Gene Name: neural cell adhesion molecule 1
  ENSP ID: ENSP00000384055
MLQTKDLIWTLFFLGTAVSLQVDIVPSQGEISVGESKFFLCQVAGDAKDKDISWFSPNGEKLTPNQQRISVVWNDDSSSTLTIYNANIDDAGIYKCVVTGEDGSESEATVNVKIFQKLMFKNAPTPQEFREGEDAVIVCDVVSSLPPTIIWKHKGRDVILKKDVRFIVLSNNYLQIRGIKKTDEGTYRCEGRILARGEINFKDIQVIVNVPPTIQARQNIVNATANLGQSVTLVCDAEGFPEPTMSWTKDGEQIEQEEDDEKYIFSDDSSQLTIKKVDKNDEAEYICIAENKAGEQDATIHLKVFAKPKITYVENQTAMELEEQVTLTCEASGDPIPSITWRTSTRNISSEEKTLDGHMVVRSHARVSSLTLKSIQYTDAGEYICTASNTIGQDSQSMYLEVQYAPKLQGPVAVYTWEGNQVNITCEVFAYPSATISWFRDGQLLPSSNYSNIKIYNTPSASYLEVTPDSENDFGNYNCTAVNRIGQESLEFILVQADTPSSPSIDQVEPYSSTAQVQFDEPEATGGVPILKYKAEWRAVGEEVWHSKWYDAKEASMEGIVTIVGLKPETTYAVRLAALNGKGLGEISAASEFKTQPVREPSAPKLEGQMGEDGNSIKVNLIKQDDGGSPIRHYLVRYRALSSEWKPEIRLPSGSDHVMLKSLDWNAEYEVYVVAENQQGKSKAAHFVFRTSAQPTAIPATLGGNSASYTFVSLLFSAVTLLLLC

SEQ ID NO: 55966 - protein, 165 aa, Homo sapiens
  Payload ID: 11013
  Gene Symbol: NCAM1
  Gene Name: neural cell adhesion molecule 1
  ENSP ID: ENSP00000475074
EFILVQADTPSSPSIDQVEPYSSTAQVQFDEPEATGGVPILKYKAEWRAVGEEVWHSKWYDAKEASMEGIVTIVGLKPETTYAVRLAALNGKGLGEISAASEFKTQPVHSPPPPASASSSTPVPLSPPDTTWPLPALATTEPAKNIAQNHCCNMFQAGLHNALMK

SEQ ID NO: 55967 - protein, 761 aa, Homo sapiens [sequence omitted]

SEQ ID NO: 55968 - protein, 848 aa, Homo sapiens [sequence omitted]

SEQ ID NO: 55969 - protein, 84 aa, Homo sapiens
  Payload ID: 11013
  Gene Symbol: NCAM1
  Gene Name: neural cell adhesion molecule 1
  ENSP ID: ENSP00000478072
  MOD_RES (1)..(1): Any amino acid
XQDDGGSPIRHYLVRYRALSSEWKPEIRLPSGSDHVMLKSLDWNAEYEVYVVAENQQGKSKAAHFVFRTSAQPTAIPVTLLLLC

SEQ ID NO: 55970 - protein, 884 aa, Homo sapiens [sequence omitted]

SEQ ID NO: 55971 - protein, 133 aa, Homo sapiens
  Payload ID: 11013
  Gene Symbol: NCAM1
  Gene Name: neural cell adhesion molecule 1
  ENSP ID: ENSP00000479353
MLQTKDLIWTLFFLGTAAKPKITYVENQTAMELEEQVTLTCEASGDPIPSITWRTSTRNISSEEKTLDGHMVVRSHARVSSLTLKSIQYTDAGEYICTASNTIGQDSQSMYLEVQYAPKLQGPVAVYTWEGNQ

SEQ ID NO: 55972 - protein, 305 aa, Homo sapiens
  Payload ID: 11013
  Gene Symbol: NCAM1
  Gene Name: neural cell adhesion molecule 1
  ENSP ID: ENSP00000479687
YNTPSASYLEVTPDSENDFGNYNCTAVNRIGQESLEFILVQADTPSSPSIDQVEPYSSTAQVQFDEPEATGGVPILKYKAEWRAVGEEVWHSKWYDAKEASMEGIVTIVGLKPETTYAVRLAALNGKGLGEISAASEFKTQPVHSPPPPASASSSTPVPLSPPDTTWPLPALATTEPAREPSAPKLEGQMGEDGNSIKVNLIKQDDGGSPIRHYLVRYRALSSEWKPEIRLPSGSDHVMLKSLDWNAEYEVYVVAENQQGKSKAAHFVFRTSAQPTAIPATLGGNSASYTFVSLLFSAVTLLLLC

SEQ ID NO: 55973 - protein, 884 aa, Homo sapiens
  Payload ID: 11013
  Gene Symbol: NCAM1
  Gene Name: neural cell adhesion molecule 1
  ENSP ID: ENSP00000480132
MLQTKDLIWTLFFLGTAVSLQVDIVPSQGEISVGESKFFLCQVAGDAKDKDISWFSPNGEKLTPNQQRISVVWNDDSSSTLTIYNANIDDAGIYKCVVTGEDGSESEATVNVKIFQKLMFKNAPTPQEFREGEDAVIVCDVVSSLPPTIIWKHKGRDVILKKDVRFIVLSNNYLQIRGIKKTDEGTYRCEGRILARGEINFKDIQVIVNVPPTIQARQNIVNATANLGQSVTLVCDAEGFPEPTMSWTKDGEQIEQEEDDEKYIFSDDSSQLTIKKVDKNDEAEYICIAENKAGEQDATIHLKVFAKPKITYVENQTAMELEEQVTLTCEASGDPIPSITWRTSTRNISSEEKASWTRPEKQEVHAPWNWQVGRQKGQAGSAGFPGSHETLDGHMVVRSHARVSSLTLKSIQYTDAGEYICTASNTIGQDSQSMYLEVQYAPKLQGPVAVYTWEGNQVNITCEVFAYPSATISWFRDGQLLPSSNYSNIKIYNTPSASYLEVTPDSENDFGNYNCTAVNRIGQESLEFILVQADTPSSPSIDQVEPYSSTAQVQFDEPEATGGVPILKYKAEWRAVGEEVWHSKWYDAKEASMEGIVTIVGLKPETTYAVRLAALNGKGLGEISAASEFKTQPVQGEPSAPKLEGQMGEDGNSIKVNLIKQDDGGSPIRHYLVRYRALSSEWKPEIRLPSGSDHVMLKSLDWNAEYEVYVVAENQQGKSKAAHFVFRTSAQPTAIPANGSPTSGLSTGAIVGILIVIFVLLLVVVDITCYFLNKCGLFMCIAVNLCGKAGPGAKGKDMEEGKAAFSKDESKEPIVEVRTEEERTPNHDGGKHTEPNETTPLTEPEKGPVEAKPECQETETKPAPAEVKTVPNDATQTKENESKA

SEQ ID NO: 55974 - protein, 372 aa, Homo sapiens
  Payload ID: 11013
  Gene Symbol: NCAM1
  Gene Name: neural cell adhesion molecule 1
  ENSP ID: ENSP00000480269
  MOD_RES (1)..(1): Any amino acid
XTPSSPSIDQVEPYSSTAQVQFDEPEATGGVPILKYKAEWRAVGEEVWHSKWYDAKEASMEGIVTIVGLKPETTYAVRLAALNGKGLGEISAASEFKTQPVHSPPPPASASSSTPVPLSPPDKGEPSAPKLEGQMGEDGNSIKVNLIKQDDGGSPIRHYLVRYRALSSEWKPEIRLPSGSDHVMLKSLDWNAEYEVYVVAENQQGKSKAAHFVFRTSAQPTAIPANGSPTSGLSTGAIVGILIVIFVLLLVVVDITCYFLNKCGLFMCIAVNLCGKAGPGAKGKDMEEGKAAFSKDESKEPIVEVRTEEERTPNHDGGKHTEPNETTPLTEPEKGPVEAKPECQETETKPAPAEVKTVPNDATQTKENESKA

SEQ ID NO: 55975 - protein, 761 aa, Homo sapiens
  Payload ID: 11013
  Gene Symbol: NCAM1
  Gene Name: neural cell adhesion molecule 1
  Uniprot ID: P13591
  ENSP ID: ENSP00000480774
MLQTKDLIWTLFFLGTAVSLQVDIVPSQGEISVGESKFFLCQVAGDAKDKDISWFSPNGEKLTPNQQRISVVWNDDSSSTLTIYNANIDDAGIYKCVVTGEDGSESEATVNVKIFQKLMFKNAPTPQEFREGEDAVIVCDVVSSLPPTIIWKHKGRDVILKKDVRFIVLSNNYLQIRGIKKTDEGTYRCEGRILARGEINFKDIQVIVNVPPTIQARQNIVNATANLGQSVTLVCDAEGFPEPTMSWTKDGEQIEQEEDDEKYIFSDDSSQLTIKKVDKNDEAEYICIAENKAGEQDATIHLKVFAKPKITYVENQTAMELEEQVTLTCEASGDPIPSITWRTSTRNISSEEKTLDGHMVVRSHARVSSLTLKSIQYTDAGEYICTASNTIGQDSQSMYLEVQYAPKLQGPVAVYTWEGNQVNITCEVFAYPSATISWFRDGQLLPSSNYSNIKIYNTPSASYLEVTPDSENDFGNYNCTAVNRIGQESLEFILVQADTPSSPSIDQVEPYSSTAQVQFDEPEATGGVPILKYKAEWRAVGEEVWHSKWYDAKEASMEGIVTIVGLKPETTYAVRLAALNGKGLGEISAASEFKTQPVHSPPPPASASSSTPVPLSPPDTTWPLPALATTEPAKGEPSAPKLEGQMGEDGNSIKVNLIKQDDGGSPIRHYLVRYRALSSEWKPEIRLPSGSDHVMLKSLDWNAEYEVYVVAENQQGKSKAAHFVFRTSAQPTAIPATLGGNSASYTFVSLLFSAVTLLLLC

SEQ ID NO: 55976 - protein, 858 aa, Homo sapiens [sequence omitted]

SEQ ID NO: 55977 - protein, 726 aa, Homo sapiens
  Payload ID: 11013
  Gene Symbol: NCAM1
  Gene Name: neural cell adhesion molecule 1
  Uniprot ID: P13591
  ENSP ID: ENSP00000481083
MLQTKDLIWTLFFLGTAVSLQVDIVPSQGEISVGESKFFLCQVAGDAKDKDISWFSPNGEKLTPNQQRISVVWNDDSSSTLTIYNANIDDAGIYKCVVTGEDGSESEATVNVKIFQKLMFKNAPTPQEFREGEDAVIVCDVVSSLPPTIIWKHKGRDVILKKDVRFIVLSNNYLQIRGIKKTDEGTYRCEGRILARGEINFKDIQVIVNVPPTIQARQNIVNATANLGQSVTLVCDAEGFPEPTMSWTKDGEQIEQEEDDEKYIFSDDSSQLTIKKVDKNDEAEYICIAENKAGEQDATIHLKVFAKPKITYVENQTAMELEEQVTLTCEASGDPIPSITWRTSTRNISSEEKTLDGHMVVRSHARVSSLTLKSIQYTDAGEYICTASNTIGQDSQSMYLEVQYAPKLQGPVAVYTWEGNQVNITCEVFAYPSATISWFRDGQLLPSSNYSNIKIYNTPSASYLEVTPDSENDFGNYNCTAVNRIGQESLEFILVQADTPSSPSIDQVEPYSSTAQVQFDEPEATGGVPILKYKAEWRAVGEEVWHSKWYDAKEASMEGIVTIVGLKPETTYAVRLAALNGKGLGEISAASEFKTQPVQGEPSAPKLEGQMGEDGNSIKVNLIKQDDGGSPIRHYLVRYRALSSEWKPEIRLPSGSDHVMLKSLDWNAEYEVYVVAENQQGKSKAAHFVFRTSAQPTAIPATLGGNSASYTFVSLLFSAVTLLLLC

SEQ ID NO: 55978 - protein, 364 aa, Homo sapiens
  Payload ID: 11013
  Gene Symbol: NCAM1
  Gene Name: neural cell adhesion molecule 1
  Uniprot ID: P13591
  ENSP ID: ENSP00000482205
MLQTKDLIWTLFFLGTAVSLQVDIVPSQGEISVGESKFFLCQVAGDAKDKDISWFSPNGEKLTPNQQRISVVWNDDSSSTLTIYNANIDDAGIYKCVVTGEDGSESEATVNVKIFQKLMFKNAPTPQEFREGEDAVIVCDVVSSLPPTIIWKHKGRDVILKKDVRFIVLSNNYLQIRGIKKTDEGTYRCEGRILARGEINFKDIQVIVNVPPTIQARQNIVNATANLGQSVTLVCDAEGFPEPTMSWTKDGEQIEQEEDDEKYIFSDDSSQLTIKKVDKNDEAEYICIAENKAGEQDATIHLKVFAKPKITYVENQTAMELEEQVTLTCEASGDPIPSITWRTSTRNISSEEKASWTRPEKQEV

SEQ ID NO: 55979 - protein, 135 aa, Homo sapiens
  Payload ID: 11013
  Gene Symbol: NCAM1
  Gene Name: neural cell adhesion molecule 1
  ENSP ID: ENSP00000482852
MLQTKDLIWTLFFLGTAGEPSAPKLEGQMGEDGNSIKVNLIKQDDGGSPIRHYLVRYRALSSEWKPEIRLPSGSDHVMLKSLDWNAEYEVYVVAENQQGKSKAAHFVFRTSAQPTAIPANGSPTSGLSTGAIVGI

SEQ ID NO: 55980 - protein, 228 aa, Homo sapiens
  Payload ID: 11013
  Gene Symbol: NCAM1
  Gene Name: neural cell adhesion molecule 1
  ENSP ID: ENSP00000484481
TISWFRDGQLLPSSNYSNIKIYNTPSASYLEVTPDSENDFGNYNCTAVNRIGQESLEFILVQADTPSSPSIDQVEPYSSTAQVQFDEPEATGGVPILKYKAEWRAVGEEVWHSKWYDAKEASMEGIVTIVGLKPETTYAVRLAALNGKGLGEISAASEFKTQPVHSPPPREPSAPKLEGQMGEDGNSIKVNLIKQDDGGSPIRHYLVRYRALSSEWKPEIRLPSGSDH

SEQ ID NO: 55981 - protein, 848 aa, Homo sapiens
  Payload ID: 11013
  Gene Symbol: NCAM1
  Gene Name: neural cell adhesion molecule 1
  Uniprot ID: P13591
  ENSP ID: ENSP00000484943
MLQTKDLIWTLFFLGTAVSLQVDIVPSQGEISVGESKFFLCQVAGDAKDKDISWFSPNGEKLTPNQQRISVVWNDDSSSTLTIYNANIDDAGIYKCVVTGEDGSESEATVNVKIFQKLMFKNAPTPQEFREGEDAVIVCDVVSSLPPTIIWKHKGRDVILKKDVRFIVLSNNYLQIRGIKKTDEGTYRCEGRILARGEINFKDIQVIVNVPPTIQARQNIVNATANLGQSVTLVCDAEGFPEPTMSWTKDGEQIEQEEDDEKYIFSDDSSQLTIKKVDKNDEAEYICIAENKAGEQDATIHLKVFAKPKITYVENQTAMELEEQVTLTCEASGDPIPSITWRTSTRNISSEEKTLDGHMVVRSHARVSSLTLKSIQYTDAGEYICTASNTIGQDSQSMYLEVQYAPKLQGPVAVYTWEGNQVNITCEVFAYPSATISWFRDGQLLPSSNYSNIKIYNTPSASYLEVTPDSENDFGNYNCTAVNRIGQESLEFILVQADTPSSPSIDQVEPYSSTAQVQFDEPEATGGVPILKYKAEWRAVGEEVWHSKWYDAKEASMEGIVTIVGLKPETTYAVRLAALNGKGLGEISAASEFKTQPVQGEPSAPKLEGQMGEDGNSIKVNLIKQDDGGSPIRHYLVRYRALSSEWKPEIRLPSGSDHVMLKSLDWNAEYEVYVVAENQQGKSKAAHFVFRTSAQPTAIPANGSPTSGLSTGAIVGILIVIFVLLLVVVDITCYFLNKCGLFMCIAVNLCGKAGPGAKGKDMEEGKAAFSKDESKEPIVEVRTEEERTPNHDGGKHTEPNETTPLTEPEKGPVEAKPECQETETKPAPAEVKTVPNDATQTKENESKA

SEQ ID NO: 55982 - protein, 468 aa, Homo sapiens
  Payload ID: 11013
  Gene Symbol: NCAM1
  Gene Name: neural cell adhesion molecule 1
  ENSP ID: ENSP00000486241
  MOD_RES (1)..(1): Any amino acid
XSGSDHVMLKSLDWNAEYEVYVVAENQQGKSKAAHFVFRTSAQPTAIPANGSPTSGLSTGAIVGILIVIFVLLLVVVDITCYFLNKCGLFMCIAVNLCGKAGPGAKGKDMEEGKAAFSKDESKEPIVEVRTEEERTPNHDGGKHTEPNETTPLTEPELPADTTATVEDMLPSVTTVTTNSDTITETFATAQNSPTSETTTLTSSIAPPATATPDSNSVPAGQATPSKGPSASAPSPAPASAPKVAPLVDLSDTPTSTPAASNLSSSVLANQGAVLSPSAPAGVGEASKAPPASKPTPAPVPTPTGAASPLAAAAAPATEAPQAKQEAPSTKGPDPEPTQPGAAKSPAEAATALASPKSEAASVSTTNPSQGEDFKMDEGNFKTPDIDLAKDVFAALGSPAPAAGASGQAPELAPSTADSSVSPAPAKTEKGPVEAKPECQETETKPAPAEVKTVPNDATQTKENESKA

SEQ ID NO: 55983 - protein, 357 aa, Homo sapiens
  Payload ID: 11013
  Gene Symbol: NCAM1
  Gene Name: neural cell adhesion molecule 1
  ENSP ID: ENSP00000486406
  MOD_RES (1)..(1): Any amino acid
XFILVQADTPSSPSIDQVEPYSSTAQVQFDEPEATGGVPILKYKAEWRAVGEEVWHSKWYDAKEASMEGIVTIVGLKPETTYAVRLAALNGKGLGEISAASEFKTQPVREPSAPKLEGQMGEDGNSIKVNLIKQDDGGSPIRHYLVRYRALSSEWKPEIRLPSGSDHVMLKSLDWNAEYEVYVVAENQQGKSKAAHFVFRTSAQPTAIPANGSPTSGLSTGAIVGILIVIFVLLLVVVDITCYFLNKCGLFMCIAVNLCGKAGPGAKGKDMEEGKAAFSKDESKEPIVEVRTEEERTPNHDGGKHTEPNETTPLTEPEKGPVEAKPECQETETKPAPAEVKTVPNDATQTKENESKA

SEQ ID NO: 55984 - protein, 819 aa, Homo sapiens
  Payload ID: 11014
  Gene Symbol: NCAM2
  Gene Name: neural cell adhesion molecule 2
  ENSP ID: ENSP00000284894
ALLQVTISLSKVELSVGESKFFTCTAIGEPESIDWYNPQGEKIISTQRVVVQKEGVRSRLTIYNANIEDAGIYRCQATDAKGQTQEATVVLEIYQKLTFREVVSPQEFKQGEDAEVVCRVSSSPAPAVSWLYHNEEVTTISDNRFAMLANNNLQILNINKSDEGIYRCEGRVEARGEIDFRDIIVIVNVPPAISMPQKSFNATAERGEEMTFSCRASGSPEPAISWFRNGKLIEENEKYILKGSNTELTVRNIINSDGGPYVCRATNKAGEDEKQAFLQVFVQPHIIQLKNETTYENGQVTLVCDAEGEPIPEITWKRAVDGFTFTEGDKSLDGRIEVKGQHGSSSLHIKDVKLSDSGRYDCEAASRIGGHQKSMYLDIEYAPKFISNQTIYYSWEGNPINISCDVKSNPPASIHWRRDKLVLPAKNTTNLKTYSTGRKMILEIAPTSDNDFGRYNCTATNHIGTRFQEYILALADVPSSPYGVKIIELSQTTAKVSFNKPDSHGGVPIHHYQVDVKEVASEIWKIVRSHGVQTMVVLNNLEPNTTYEIRVAAVNGKGQGDYSKIEIFQTLPVREPSPPSIHGQPSSGKSFKLSITKQDDGGAPILEYIVKYRSKDKEDQWLEKKVQGNKDHIILEHLQWTMGYEVQITAANRLGYSEPTVYEFSMPPKPNIIKDTLFNGLGLGAVIGLGVAALLLILVVTDVSCFFIRQCGLLMCITRRMCGKKSGSSGKSKELEEGKAAYLKDGSKEPIVEMRTEDERVTNHEDGSPVNEPNETTPLTEPEKLPLKEEDGKEALNPETIEIKVSNDIIQSKEDDSKA

SEQ ID NO: 55985 - protein, 837 aa, Homo sapiens
  Payload ID: 11014
  Gene Symbol: NCAM2
  Gene Name: neural cell adhesion molecule 2
  Uniprot ID: O15394
  ENSP ID: ENSP00000383392
MSLLLSFYLLGLLVSSGQALLQVTISLSKVELSVGESKFFTCTAIGEPESIDWYNPQGEKIISTQRVVVQKEGVRSRLTIYNANIEDAGIYRCQATDAKGQTQEATVVLEIYQKLTFREVVSPQEFKQGEDAEVVCRVSSSPAPAVSWLYHNEEVTTISDNRFAMLANNNLQILNINKSDEGIYRCEGRVEARGEIDFRDIIVIVNVPPAISMPQKSFNATAERGEEMTFSCRASGSPEPAISWFRNGKLIEENEKYILKGSNTELTVRNIINSDGGPYVCRATNKAGEDEKQAFLQVFVQPHIIQLKNETTYENGQVTLVCDAEGEPIPEITWKRAVDGFTFTEGDKSLDGRIEVKGQHGSSSLHIKDVKLSDSGRYDCEAASRIGGHQKSMYLDIEYAPKFISNQTIYYSWEGNPINISCDVKSNPPASIHWRRDKLVLPAKNTTNLKTYSTGRKMILEIAPTSDNDFGRYNCTATNHIGTRFQEYILALADVPSSPYGVKIIELSQTTAKVSFNKPDSHGGVPIHHYQVDVKEVASEIWKIVRSHGVQTMVVLNNLEPNTTYEIRVAAVNGKGQGDYSKIEIFQTLPVREPSPPSIHGQPSSGKSFKLSITKQDDGGAPILEYIVKYRSKDKEDQWLEKKVQGNKDHIILEHLQWTMGYEVQITAANRLGYSEPTVYEFSMPPKPNIIKDTLFNGLGLGAVIGLGVAALLLILVVTDVSCFFIRQCGLLMCITRRMCGKKSGSSGKSKELEEGKAAYLKDGSKEPIVEMRTEDERVTNHEDGSPVNEPNETTPLTEPEKLPLKEEDGKEALNPETIEIKVSNDIIQSKEDDSKA

SEQ ID NO: 55986 - protein, 838 aa, Homo sapiens
  Payload ID: 11015
  Gene Symbol: NELL1
  Gene Name: neural EGFL like 1
  ENSP ID: ENSP00000298925
MPMDLILVVWFCVCTARTAEDMKPPVLSLIWRTRVLKSLLQQSLQGVVGFGMDPDLQMDIVTELDLVNTTLGVAQVSGMHNASKAFLFQDIEREIHAAPHVSEKLIQLFRNKSEFTILATVQQKPSTSGVILSIRELEHSYFELESSGLRDEIRYHYIHNGKPRTEALPYRMADGQWHKVALSVSASHLLLHVDCNRIYERVIDPPDTNLPPGINLWLGQRNQKHGLFKGIIQDGKIIFMPNGYITQCPNLNHTCPTCSDFLSLVQGIMDLQELLAKMTAKLNYAETRLSQLENCHCEKTCQVSGLLYRDQDSWVDGDHCRNCTCKSGAVECRRMSCPPLNCSPDSLPVHIAGQCCKVCRPKCIYGGKVLAEGQRILTKSCRECRGGVLVKITEMCPPLNCSEKDHILPENQCCRVCRGHNFCAEGPKCGENSECKNWNTKATCECKSGYISVQGDSAYCEDIDECAAKMHYCHANTVCVNLPGLYRCDCVPGYIRVDDFSCTEHDECGSGQHNCDENAICTNTVQGHSCTCKPGYVGNGTICRAFCEEGCRYGGTCVAPNKCVCPSGFTGSHCEKDIDECSEGIIECHNHSRCVNLPGWYHCECRSGFHDDGTYSLSGESCIDIDECALRTHTCWNDSACINLAGGFDCLCPSGPSCSGDCPHEGGLKHNGQVWTLKEDRCSVCSCKDGKIFCRRTACDCQNPSADLFCCPECDTRVTSQCLDQNGHKLYRSGDNWTHSCQQCRCLEGEVDCWPLTCPNLSCEYTAILEGECCPRCVSDPCLADNITYDIRKTCLDSYGVSRLSGSVWTMAGSPCTTCKCKNGRVCCSVDFECLQNN

SEQ ID NO: 55987 - protein, 753 aa, Homo sapiens
  Payload ID: 11015
  Gene Symbol: NELL1
  Gene Name: neural EGFL like 1
  ENSP ID: ENSP00000317837
MPMDLILVVWFCVCTARTVVGFGMDPDLQMDIVTELDLVNTTLGVAQVSGMHNASKAFLFQDIEREIHAAPHVSEKLIQLFRNKSEFTILATVQQKPSTSGVILSIRELEHRIYERVIDPPDTNLPPGINLWLGQRNQKHGLFKGIIQDGKIIFMPNGYITQCPNLNHTCPTCSDFLSLVQGIMDLQELLAKMTAKLNYAETRLSQLENCHCEKTCQVSGLLYRDQDSWVDGDHCRNCTCKSGAVECRRMSCPPLNCSPDSLPVHIAGQCCKVCRPKCIYGGKVLAEGQRILTKSCRECRGGVLVKITEMCPPLNCSEKDHILPENQCCRVCRGHNFCAEGPKCGENSECKNWNTKATCECKSGYISVQGDSAYCEDIDECAAKMHYCHANTVCVNLPGLYRCDCVPGYIRVDDFSCTEHDECGSGQHNCDENAICTNTVQGHSCTCKPGYVGNGTICRAFCEEGCRYGGTCVAPNKCVCPSGFTGSHCEKDIDECSEGIIECHNHSRCVNLPGWYHCECRSGFHDDGTYSLSGESCIDIDECALRTHTCWNDSACINLAGGFDCLCPSGPSCSGDCPHEGGLKHNGQVWTLKEDRCSVCSCKDGKIFCRRTACDCQNPSADLFCCPECDTRVTSQCLDQNGHKLYRSGDNWTHSCQQCRCLEGEVDCWPLTCPNLSCEYTAILEGECCPRCVSDPCLADNITYDIRKTCLDSYGVSRLSGSVWTMAGSPCTTCKCKNGRVCCSVDFECLQNN

SEQ ID NO: 55988 - protein, 810 aa, Homo sapiens
  Payload ID: 11015
  Gene Symbol: NELL1
  Gene Name: neural EGFL like 1
  Uniprot ID: Q92832
  ENSP ID: ENSP00000349654
MPMDLILVVWFCVCTARTVVGFGMDPDLQMDIVTELDLVNTTLGVAQVSGMHNASKAFLFQDIEREIHAAPHVSEKLIQLFRNKSEFTILATVQQKPSTSGVILSIRELEHSYFELESSGLRDEIRYHYIHNGKPRTEALPYRMADGQWHKVALSVSASHLLLHVDCNRIYERVIDPPDTNLPPGINLWLGQRNQKHGLFKGIIQDGKIIFMPNGYITQCPNLNHTCPTCSDFLSLVQGIMDLQELLAKMTAKLNYAETRLSQLENCHCEKTCQVSGLLYRDQDSWVDGDHCRNCTCKSGAVECRRMSCPPLNCSPDSLPVHIAGQCCKVCRPKCIYGGKVLAEGQRILTKSCRECRGGVLVKITEMCPPLNCSEKDHILPENQCCRVCRGHNFCAEGPKCGENSECKNWNTKATCECKSGYISVQGDSAYCEDIDECAAKMHYCHANTVCVNLPGLYRCDCVPGYIRVDDFSCTEHDECGSGQHNCDENAICTNTVQGHSCTCKPGYVGNGTICRAFCEEGCRYGGTCVAPNKCVCPSGFTGSHCEKDIDECSEGIIECHNHSRCVNLPGWYHCECRSGFHDDGTYSLSGESCIDIDECALRTHTCWNDSACINLAGGFDCLCPSGPSCSGDCPHEGGLKHNGQVWTLKEDRCSVCSCKDGKIFCRRTACDCQNPSADLFCCPECDTRVTSQCLDQNGHKLYRSGDNWTHSCQQCRCLEGEVDCWPLTCPNLSCEYTAILEGECCPRCVSDPCLADNITYDIRKTCLDSYGVSRLSGSVWTMAGSPCTTCKCKNGRVCCSVDFECLQNN

SEQ ID NO: 55989 - protein, 763 aa, Homo sapiens
  Payload ID: 11015
  Gene Symbol: NELL1
  Gene Name: neural EGFL like 1
  Uniprot ID: Q92832
  ENSP ID: ENSP00000437170
MPMDLILVVWFCVCTARTVVGFGMDPDLQMDIVTELDLVNTTLGVAQVSGMHNASKAFLFQDIEREIHAAPHVSEKLIQLFRNKSEFTILATVQQKPSTSGVILSIRELEHSYFELESSGLRDEIRYHYIHNGKPRTEALPYRMADGQWHKVALSVSASHLLLHVDCNRIYERVIDPPDTNLPPGINLWLGQRNQKHGLFKGIIQDGKIIFMPNGYITQCPNLNHTCPTCSDFLSLVQGIMDLQELLAKMTAKLNYAETRLSQLENCHCEKTCQVSGLLYRDQDSWVDGDHCRNCTCKSGAVECRRMSCPPLNCSPDSLPVHIAGQCCKVCRPKCIYGGKVLAEGQRILTKSCRECRGGVLVKITEMCPPLNCSEKDHILPENQCCRVCRGHNFCAEGPKCGENSECKNWNTKATCECKSGYISVQGDSAYCEDIDECAAKMHYCHANTVCVNLPGLYRCDCVPGYIRVDDFSCTEHDECGSGQHNCDENAICTNTVQGHSCTCKPGYVGNGTICRAFCEEGCRYGGTCVAPNKCVCPSGFTGSHCEKDIDECALRTHTCWNDSACINLAGGFDCLCPSGPSCSGDCPHEGGLKHNGQVWTLKEDRCSVCSCKDGKIFCRRTACDCQNPSADLFCCPECDTRVTSQCLDQNGHKLYRSGDNWTHSCQQCRCLEGEVDCWPLTCPNLSCEYTAILEGECCPRCVSDPCLADNITYDIRKTCLDSYGVSRLSGSVWTMAGSPCTTCKCKNGRVCCSVDFECLQNN

SEQ ID NO: 55990 - protein, 570 aa, Homo sapiens
  Payload ID: 11015
  Gene Symbol: NELL1
  Gene Name: neural EGFL like 1
  ENSP ID: ENSP00000479479
MDLQELLAKMTAKLNYAETRLSQLENCHCEKTCQVSGLLYRDQDSWVDGDHCRNCTCKSGAVECRRMSCPPLNCSPDSLPVHIAGQCCKVCRPKCIYGGKVLAEGQRILTKSCRECRGGVLVKITEMCPPLNCSEKDHILPENQCCRVCRGHNFCAEGPKCGENSECKNWNTKATCECKSGYISVQGDSAYCEDIDECAAKMHYCHANTVCVNLPGLYRCDCVPGYIRVDDFSCTEHDECGSGQHNCDENAICTNTVQGHSCTCKPGYVGNGTICRAFCEEGCRYGGTCVAPNKCVCPSGFTGSHCEKDIDECSEGIIECHNHSRCVNLPGWYHCECRSGFHDDGTYSLSGESCIDIDECALRTHTCWNDSACINLAGGFDCLCPSGPSCSGDCPHEGGLKHNGQVWTLKEDRCSVCSCKDGKIFCRRTACDCQNPSADLFCCPECDTRVTSQCLDQNGHKLYRSGDNWTHSCQQCRCLEGEVDCWPLTCPNLSCEYTAILEGECCPRCVSDPCLADNITYDIRKTCLDSYGVSRLSGSVWTMAGSPCTTCKCKNGRVCCSVDFECLQNN

SEQ ID NO: 55991 - protein, 839 aa, Homo sapiens
  Payload ID: 11016
  Gene Symbol: NELL2
  Gene Name: neural EGFL like 2
  Uniprot ID: Q99435
  ENSP ID: ENSP00000327988
MSIRRLLILILKIGRRWTELIRTMESRVLLRTFCLIFGLGAVWGLGVDPSLQIDVLTELELGESTTGVRQVPGLHNGTKAFLFQDTPRSIKASTATAEQFFQKLRNKHEFTILVTLKQTHLNSGVILSIHHLDHRYLELESSGHRNEVRLHYRSGSHRPHTEVFPYILADDKWHKLSLAISASHLILHIDCNKIYERVVEKPSTDLPLGTTFWLGQRNNAHGYFKGIMQDVQLLVMPQGFIAQCPDLNRTCPTCNDFHGLVQKIMELQDILAKTSAKLSRAEQRMNRLDQCYCERTCTMKGTTYREFESWIDGCKNCTCLNGTIQCETLICPNPDCPLKSALAYVDGKCCKECKSICQFQGRTYFEGERNTVYSSSGVCVLYECKDQTMKLVESSGCPALDCPESHQITLSHSCCKVCKGYDFCSERHNCMENSICRNLNDRAVCSCRDGFRALREDNAYCEDIDECAEGRHYCRENTMCVNTPGSFMCICKTGYIRIDDYSCTEHDECITNQHNCDENALCFNTVGGHNCVCKPGYTGNGTTCKAFCKDGCRNGGACIAANVCACPQGFTGPSCETDIDECSDGFVQCDSRANCINLPGWYHCECRDGYHDNGMFSPSGESCEDIDECGTGRHSCANDTICFNLDGGYDCRCPHGKNCTGDCIHDGKVKHNGQIWVLENDRCSVCSCQNGFVMCRRMVCDCENPTVDLFCCPECDPRLSSQCLHQNGETLYNSGDTWVQNCQQCRCLQGEVDCWPLPCPDVECEFSILPENECCPRCVTDPCQADTIRNDITKTCLDEMNVVRFTGSSWIKHGTECTLCQCKNGHICCSVDPQCLQEL

SEQ ID NO: 55992 - protein, 815 aa, Homo sapiens
  Payload ID: 11016
  Gene Symbol: NELL2
  Gene Name: neural EGFL like 2
  Uniprot ID: Q99435
  ENSP ID: ENSP00000378866
METGLGAPLFKAWLLISVWGLGVDPSLQIDVLTELELGESTTGVRQVPGLHNGTKAFLFQDTPRSIKASTATAEQFFQKLRNKHEFTILVTLKQTHLNSGVILSIHHLDHRYLELESSGHRNEVRLHYRSGSHRPHTEVFPYILADDKWHKLSLAISASHLILHIDCNKIYERVVEKPSTDLPLGTTFWLGQRNNAHGYFKGIMQDVQLLVMPQGFIAQCPDLNRTCPTCNDFHGLVQKIMELQDILAKTSAKLSRAEQRMNRLDQCYCERTCTMKGTTYREFESWIDGCKNCTCLNGTIQCETLICPNPDCPLKSALAYVDGKCCKECKSICQFQGRTYFEGERNTVYSSSGVCVLYECKDQTMKLVESSGCPALDCPESHQITLSHSCCKVCKGYDFCSERHNCMENSICRNLNDRAVCSCRDGFRALREDNAYCEDIDECAEGRHYCRENTMCVNTPGSFMCICKTGYIRIDDYSCTEHDECITNQHNCDENALCFNTVGGHNCVCKPGYTGNGTTCKAFCKDGCRNGGACIAANVCACPQGFTGPSCETDIDECSDGFVQCDSRANCINLPGWYHCECRDGYHDNGMFSPSGESCEDIDECGTGRHSCANDTICFNLDGGYDCRCPHGKNCTGDCIHDGKVKHNGQIWVLENDRCSVCSCQNGFVMCRRMVCDCENPTVDLFCCPECDPRLSSQCLHQNGETLYNSGDTWVQNCQQCRCLQGEVDCWPLPCPDVECEFSILPENECCPRCVTDPCQADTIRNDITKTCLDEMNVVRFTGSSWIKHGTECTLCQCKNGHICCSVDPQCLQEL

SEQ ID NO: 55993 - protein, 816 aa, Homo sapiens
  Payload ID: 11016
  Gene Symbol: NELL2
  Gene Name: neural EGFL like 2
  Uniprot ID: Q99435
  ENSP ID: ENSP00000390680
MESRVLLRTFCLIFGLGAVWGLGVDPSLQIDVLTELELGESTTGVRQVPGLHNGTKAFLFQDTPRSIKASTATAEQFFQKLRNKHEFTILVTLKQTHLNSGVILSIHHLDHRYLELESSGHRNEVRLHYRSGSHRPHTEVFPYILADDKWHKLSLAISASHLILHIDCNKIYERVVEKPSTDLPLGTTFWLGQRNNAHGYFKGIMQDVQLLVMPQGFIAQCPDLNRTCPTCNDFHGLVQKIMELQDILAKTSAKLSRAEQRMNRLDQCYCERTCTMKGTTYREFESWIDGCKNCTCLNGTIQCETLICPNPDCPLKSALAYVDGKCCKECKSICQFQGRTYFEGERNTVYSSSGVCVLYECKDQTMKLVESSGCPALDCPESHQITLSHSCCKVCKGYDFCSERHNCMENSICRNLNDRAVCSCRDGFRALREDNAYCEDIDECAEGRHYCRENTMCVNTPGSFMCICKTGYIRIDDYSCTEHDECITNQHNCDENALCFNTVGGHNCVCKPGYTGNGTTCKAFCKDGCRNGGACIAANVCACPQGFTGPSCETDIDECSDGFVQCDSRANCINLPGWYHCECRDGYHDNGMFSPSGESCEDIDECGTGRHSCANDTICFNLDGGYDCRCPHGKNCTGDCIHDGKVKHNGQIWVLENDRCSVCSCQNGFVMCRRMVCDCENPTVDLFCCPECDPRLSSQCLHQNGETLYNSGDTWVQNCQQCRCLQGEVDCWPLPCPDVECEFSILPENECCPRCVTDPCQADTIRNDITKTCLDEMNVVRFTGSSWIKHGTECTLCQCKNGHICCSVDPQCLQEL

SEQ ID NO: 55994 - protein, 816 aa, Homo sapiens; identical to SEQ ID NO: 55993
  Payload ID: 11016
  Gene Symbol: NELL2
  Gene Name: neural EGFL like 2
  Uniprot ID: Q99435
  ENSP ID: ENSP00000394612

SEQ ID NO: 55995 - protein, 866 aa, Homo sapiens
  Payload ID: 11016
  Gene Symbol: NELL2
  Gene Name: neural EGFL like 2
  Uniprot ID: Q99435
  ENSP ID: ENSP00000416341
MGFPPLLKGQASATRSSLASCSWVVFFLSCLSRHAPEIEGGRRWTELIRTMESRVLLRTFCLIFGLGAVWGLGVDPSLQIDVLTELELGESTTGVRQVPGLHNGTKAFLFQDTPRSIKASTATAEQFFQKLRNKHEFTILVTLKQTHLNSGVILSIHHLDHRYLELESSGHRNEVRLHYRSGSHRPHTEVFPYILADDKWHKLSLAISASHLILHIDCNKIYERVVEKPSTDLPLGTTFWLGQRNNAHGYFKGIMQDVQLLVMPQGFIAQCPDLNRTCPTCNDFHGLVQKIMELQDILAKTSAKLSRAEQRMNRLDQCYCERTCTMKGTTYREFESWIDGCKNCTCLNGTIQCETLICPNPDCPLKSALAYVDGKCCKECKSICQFQGRTYFEGERNTVYSSSGVCVLYECKDQTMKLVESSGCPALDCPESHQITLSHSCCKVCKGYDFCSERHNCMENSICRNLNDRAVCSCRDGFRALREDNAYCEDIDECAEGRHYCRENTMCVNTPGSFMCICKTGYIRIDDYSCTEHDECITNQHNCDENALCFNTVGGHNCVCKPGYTGNGTTCKAFCKDGCRNGGACIAANVCACPQGFTGPSCETDIDECSDGFVQCDSRANCINLPGWYHCECRDGYHDNGMFSPSGESCEDIDECGTGRHSCANDTICFNLDGGYDCRCPHGKNCTGDCIHDGKVKHNGQIWVLENDRCSVCSCQNGFVMCRRMVCDCENPTVDLFCCPECDPRLSSQCLHQNGETLYNSGDTWVQNCQQCRCLQGEVDCWPLPCPDVECEFSILPENECCPRCVTDPCQADTIRNDITKTCLDEMNVVRFTGSSWIKHGTECTLCQCKNGHICCSVDPQCLQEL

SEQ ID NO: 55996 - protein, 22 aa, Homo sapiens
  Payload ID: 11016
  Gene Symbol: NELL2
  Gene Name: neural EGFL like 2
  ENSP ID: ENSP00000446961
MESRVLLRTFCLIFGLGAVWGL

SEQ ID NO: 55997 - protein, 321 aa, Homo sapiens
  Payload ID: 11016
  Gene Symbol: NELL2
  Gene Name: neural EGFL like 2
  ENSP ID: ENSP00000447085
MESRVLLRTFCLIFGLGAVWGLGVDPSLQIDVLTELELGESTTGVRQVPGLHNGTKAFLFQDTPRSIKASTATAEQFFQKLRNKHEFTILVTLKQTHLNSGVILSIHHLDHRYLELESSGHRNEVRLHYRSGSHRPHTEVFPYILADDKWHKLSLAISASHLILHIDCNKIYERVVEKPSTDLPLGTTFWLGQRNNAHGYFKGIMQDVQLLVMPQGFIAQCPDLNRTCPTCNDFHGLVQKIMELQDILAKTSAKLSRAEQRMNRLDQCYCERTCTMKGTTYREFESWIDGCKNCTCLNGTIQCETLICPNPDCPLKSALAY

SEQ ID NO: 55998 - protein, 166 aa, Homo sapiens
  Payload ID: 11016
  Gene Symbol: NELL2
  Gene Name: neural EGFL like 2
  ENSP ID: ENSP00000447384
MELFLFLSPTSYPSPVWGLGVDPSLQIDVLTELELGESTTGVRQVPGLHNGTKAFLFQDTPRSIKASTATAEQFFQKLRNKHEFTILVTLKQTHLNSGVILSIHHLDHRYLELESSGHRNEVRLHYRSGSHRPHTEVFPYILADDKWHKLSLAISASHLILHIDCN

SEQ ID NO: 55999 - protein, 815 aa, Homo sapiens; identical to SEQ ID NO: 55992
  Payload ID: 11016
  Gene Symbol: NELL2
  Gene Name: neural EGFL like 2
  Uniprot ID: Q99435
  ENSP ID: ENSP00000447927

SEQ ID NO: 56000 - protein, 86 aa, Homo sapiens
  Payload ID: 11016
  Gene Symbol: NELL2
  Gene Name: neural EGFL like 2
  ENSP ID: ENSP00000448107
  MOD_RES (1)..(1): Any amino acid
XDNGMFSPSGESCEDIDECGTGRHSCANDTICFNLDGGYDCRCPHGKNCTGDCIHDGKVKHNGQIWVLENDRCSVCSCQVGINEKL

SEQ ID NO: 56001 - protein, 245 aa, Homo sapiens
  Payload ID: 11016
  Gene Symbol: NELL2
  Gene Name: neural EGFL like 2
  ENSP ID: ENSP00000448407
  MOD_RES (1)..(1): Any amino acid
XAKLSRAEQRMNRLDQCYCERTCTMKGTTYREFESWIDGCKNCTCLNGTIQCETLICPNPDCPLKSALAYVDGKCSICQFQGRTYFEGERNTVYSSSGVCVLYECKDQTMKLVESSGCPALDCPESHQITLSHSCCKVCKGYDFCSERHNCMENSICRNLNDRAVCSCRDGFRALREDNAYCEDIDECAEGRHYCRENTMCVNTPGSFMCICKTGYIRIDDYSCTEHDECITNQHNCDENALCFN

SEQ ID NO: 56002 - protein, 112 aa, Homo sapiens
  Payload ID: 11016
  Gene Symbol: NELL2
  Gene Name: neural EGFL like 2
  ENSP ID: ENSP00000448635
MESRVLLRTFCLIFGLGAVWGLGVDPSLQIDVLTELELGESTTGVRQVPGLHNGTKAFLFQDTPRSIKASTATAEQFFQKLRNKHEFTILVTLKQTHLNSGVILSIHHLDHR

SEQ ID NO: 56003 - protein, 110 aa, Homo sapiens
  Payload ID: 11016
  Gene Symbol: NELL2
  Gene Name: neural EGFL like 2
  ENSP ID: ENSP00000449068
METGLGAPLFKAWLLISVWGLGVDPSLQIDVLTELELGESTTGVRQVPGLHNGTKAFLFQDTPRSIKASTATAEQFFQKLRNKHEFTILVTLKQTHLNSGVILSIHHLDH

SEQ ID NO: 56004 - protein, 768 aa, Homo sapiens
  Payload ID: 11016
  Gene Symbol: NELL2
  Gene Name: neural EGFL like 2
  ENSP ID: ENSP00000449332
METGLGAPLFKAWLLISVWGLGVDPSLQIDVLTELELGESTTGVRQVPGLHNGTKAFLFQDTPRSIKASTATAEQFFQKLRNKHEFTILVTLKQTHLNSGVILSIHHLDHRYLELESSGHRNEVRLHYRSGSHRPHTEVFPYILADDKWHKLSLAISASHLILHIDCNKIYERVVEKPSTDLPLGTTFWLGQRNNAHGYFKGIMQDVQLLVMPQGFIAQCPDLNRTCPTCNDFHGLVQKIMELQDILAKTSAKLSRAEQRMNRLDQCYCERTCTMKGTTYREFESWIDGCKNCTCLNGTIQCETLICPNPDCPLKSALAYVDGKCCKECKSICQFQGRTYFEGERNTVYSSSGVCVLYECKDQTMKLVESSGCPALDCPESHQITLSHSCCKVCKGYDFCSERHNCMENSICRNLNDRAVCSCRDGFRALREDNAYCEDIDECAEGRHYCRENTMCVNTPGSFMCICKTGYIRIDDYSCTEHDECITNQHNCDENALCFNTVGGHNCVCKPGYTGNGTTCKAFCKDGCRNGGACIAANVCACPQGFTGPSCETDIDECGTGRHSCANDTICFNLDGGYDCRCPHGKNCTGDCIHDGKVKHNGQIWVLENDRCSVCSCQNGFVMCRRMVCDCENPTVDLFCCPECDPRLSSQCLHQNGETLYNSGDTWVQNCQQCRCLQGEVDCWPLPCPDVECEFSILPENECCPRCVTDPCQADTIRNDITKTCLDEMNVVRFTGSSWIKHGTECTLCQCKNGHICCSVDPQCLQEL

SEQ ID NO: 56005 - protein, 122 aa, Homo sapiens
  Payload ID: 11016
  Gene Symbol: NELL2
  Gene Name: neural EGFL like 2
  ENSP ID: ENSP00000450102
CPTCNDFHGLVQKIMELQDILAKTSAKLSRAEQRMNRLDQCYCERTCTMKGTTYREFESWIDGCKNCTCLNGTIQCETLICPNPDCPLKSALAYVDGKCCKECKCEHNFYDEYFLWKNKALY

SEQ ID NO: 56006 - protein, 660 aa, Homo sapiens
  Payload ID: 11017
  Gene Symbol: NEDD1
  Gene Name: neural precursor cell expressed, developmentally down-regulated 1
  Uniprot ID: Q8NHV4
  ENSP ID: ENSP00000266742
MQENLRFASSGDDIKIWDASSMTLVDKFNPHTSPHGISSICWSSNNNFLVTASSSGDKIVVSSCKCKPVPLLELAEGQKQTCVNLNSTSMYLVSGGLNNTVNIWDLKSKRVHRSLKDHKDQVTCVTYNWNDCYIASGSLSGEIILHSVTTNLSSTPFGHGSNQSVRHLKYSLFKKSLLGSVSDNGIVTLWDVNSQSPYHNFDSVHKAPASGICFSPVNELLFVTIGLDKRIILYDTSSKKLVKTLVADTPLTAVDFMPDGATLAIGSSRGKIYQYDLRMLKSPVKTISAHKTSVQCIAFQYSTVLTKSSLNKGCSNKPTTVNKRSVNVNAASGGVQNSGIVREAPATSIATVLPQPMTSAMGKGTVAVQEKAGLPRSINTDTLSKETDSGKNQDFSSFDDTGKSSLGDMFSPIRDDAVVNKGSDESIGKGDGFDFLPQLNSVFPPRKNPVTSSTSVLHSSPLNVFMGSPGKEENENRDLTAESKKIYMGKQESKDSFKQLAKLVTSGAESGNLNTSPSSNQTRNSEKFEKPENEIEAQLICEPPINGSSTPNPKIASSVTAGVASSLSEKIADSIGNNRQNAPLTSIQIRFIQNMIQETLDDFREACHRDIVNLQVEMIKQFHMQLNEMHSLLERYSVNEGLVAEIERLREENKRLRAHF

SEQ ID NO: 56007 - protein, 660 aa, Homo sapiens; identical to SEQ ID NO: 56006
  Payload ID: 11017
  Gene Symbol: NEDD1
  Gene Name: neural precursor cell expressed, developmentally down-regulated 1
  Uniprot ID: Q8NHV4
  ENSP ID: ENSP00000404978

SEQ ID NO: 56008 - protein, 571 aa, Homo sapiens
  Payload ID: 11017
  Gene Symbol: NEDD1
  Gene Name: neural precursor cell expressed, developmentally down-regulated 1
  Uniprot ID: Q8NHV4
  ENSP ID: ENSP00000407964
MYLVSGGLNNTVNIWDLKSKRVHRSLKDHKDQVTCVTYNWNDCYIASGSLSGEIILHSVTTNLSSTPFGHGSNQSVRHLKYSLFKKSLLGSVSDNGIVTLWDVNSQSPYHNFDSVHKAPASGICFSPVNELLFVTIGLDKRIILYDTSSKKLVKTLVADTPLTAVDFMPDGATLAIGSSRGKIYQYDLRMLKSPVKTISAHKTSVQCIAFQYSTVLTKSSLNKGCSNKPTTVNKRSVNVNAASGGVQNSGIVREAPATSIATVLPQPMTSAMGKGTVAVQEKAGLPRSINTDTLSKETDSGKNQDFSSFDDTGKSSLGDMFSPIRDDAVVNKGSDESIGKGDGFDFLPQLNSVFPPRKNPVTSSTSVLHSSPLNVFMGSPGKEENENRDLTAESKKIYMGKQESKDSFKQLAKLVTSGAESGNLNTSPSSNQTRNSEKFEKPENEIEAQLICEPPINGSSTPNPKIASSVTAGVASSLSEKIADSIGNNRQNAPLTSIQIRFIQNMIQETLDDFREACHRDIVNLQVEMIKQFHMQLNEMHSLLERYSVNEGLVAEIERLREENKRLRAHF

SEQ ID NO: 56009 - protein, 571 aa, Homo sapiens; identical to SEQ ID NO: 56008
  Payload ID: 11017
  Gene Symbol: NEDD1
  Gene Name: neural precursor cell expressed, developmentally down-regulated 1
  Uniprot ID: Q8NHV4
  ENSP ID: ENSP00000411307

SEQ ID NO: 56010 - protein, 100 aa, Homo sapiens
  Payload ID: 11017
  Gene Symbol: NEDD1
  Gene Name: neural precursor cell expressed, developmentally down-regulated 1
  ENSP ID: ENSP00000450757
MQENLRFASSGDDIKIWDASSMTLVDKFNPHTSPHGISSICWSSNNNFLVTASSSGDKIVVSSCKCKPVPLLELAEGQKQTCVNLNSTSMYLVSGGLNNT

SEQ ID NO: 56011 - protein, 81 aa, Homo sapiens
  Payload ID: 11017
  Gene Symbol: NEDD1
  Gene Name: neural precursor cell expressed, developmentally down-regulated 1
  ENSP ID: ENSP00000450828
MYLVSGGLNNTVNIWDLKSKRVHRSLKDHKDQVTCVTYNWNDCYIASGSLSGEIILHSVTTNLSSTPFGHGSNQALQSSVE

SEQ ID NO: 56012 - protein, 167 aa, Homo sapiens
  Payload ID: 11017
  Gene Symbol: NEDD1
  Gene Name: neural precursor cell expressed, developmentally down-regulated 1
  ENSP ID: ENSP00000450881
MHFTGAVMQENLRFASSGDDIKIWDASSMTLVDKFNPHTSPHGISSICWSSNNNFLVTASSSGDKIVVSSCKCKPVPLLELAEGQKQTCVNLNSTSMYLVSGGLNNTVNIWDLKSKRVHRSLKDHKDQVTCVTYNWNDCYIASGSLSGEIILHSVTTNLSSTPFGHG

SEQ ID NO: 56013 - protein, 667 aa, Homo sapiens
  Payload ID: 11017
  Gene Symbol: NEDD1
  Gene Name: neural precursor cell expressed, developmentally down-regulated 1
  Uniprot ID: Q8NHV4
  ENSP ID: ENSP00000451211
MHFTGAVMQENLRFASSGDDIKIWDASSMTLVDKFNPHTSPHGISSICWSSNNNFLVTASSSGDKIVVSSCKCKPVPLLELAEGQKQTCVNLNSTSMYLVSGGLNNTVNIWDLKSKRVHRSLKDHKDQVTCVTYNWNDCYIASGSLSGEIILHSVTTNLSSTPFGHGSNQSVRHLKYSLFKKSLLGSVSDNGIVTLWDVNSQSPYHNFDSVHKAPASGICFSPVNELLFVTIGLDKRIILYDTSSKKLVKTLVADTPLTAVDFMPDGATLAIGSSRGKIYQYDLRMLKSPVKTISAHKTSVQCIAFQYSTVLTKSSLNKGCSNKPTTVNKRSVNVNAASGGVQNSGIVREAPATSIATVLPQPMTSAMGKGTVAVQEKAGLPRSINTDTLSKETDSGKNQDFSSFDDTGKSSLGDMFSPIRDDAVVNKGSDESIGKGDGFDFLPQLNSVFPPRKNPVTSSTSVLHSSPLNVFMGSPGKEENENRDLTAESKKIYMGKQESKDSFKQLAKLVTSGAESGNLNTSPSSNQTRNSEKFEKPENEIEAQLICEPPINGSSTPNPKIASSVTAGVASSLSEKIADSIGNNRQNAPLTSIQIRFIQNMIQETLDDFREACHRDIVNLQVEMIKQFHMQLNEMHSLLERYSVNEGLVAEIERLREENKRLRAHF

SEQ ID NO: 56014 - protein, 160 aa, Homo sapiens
  Payload ID: 11017
  Gene Symbol: NEDD1
  Gene Name: neural precursor cell expressed, developmentally down-regulated 1
  ENSP ID: ENSP00000451830
MYLVSGGLNNTVNIWDLKSKRVHRSLKDHKDQVTCVTYNWNDCYIASGSLSGEIILHSVTTNLSSTPFGHGSNQSVRHLKYSLFKKSLLGSVSDNGIVTLWDVNSQSPYHNFDSVHKAPASGICFSPVNELLFVTIGLDKRIILYDTSSKKLVKTLVADT

SEQ ID NO: 56015 - protein, 164 aa, Homo sapiens
  Payload ID: 11017
  Gene Symbol: NEDD1
  Gene Name: neural precursor cell expressed, developmentally down-regulated 1
  ENSP ID: ENSP00000451869
MQENLRFASSGDDIKIWDASSMTLVDKFNPHTSPHGISSICWSSNNNFLVTASSSGDKIVVSSCKCKPVPLLELAEGQKQTCVNLNSTSMYLVSGGLNNTVNIWDLKSKRVHRSLKDHKDQVTCVTYNWNDCYIASGSLSGEIILHSVTTNLSSTPFGHGSNQS

SEQ ID NO: 56016 - protein, 1247 aa, Homo sapiens
  Payload ID: 11018
  Gene Symbol: NEDD4
  Gene Name: neural precursor cell expressed, developmentally down-regulated 4, E3 ubiquitin protein ligase
  Uniprot ID: P46934
  ENSP ID: ENSP00000345530
MAQSLRLHFAARRSNTYPLSETSGDDLDSHVHMCFKRPTRISTSNVVQMKLTPRQTALAPLIKENVQSQERSSVPSSENVNKKSSCLQISLQPTRYSGYLQSSNVLADSDDASFTCILKDGIYSSAVVDNELNAVNDGHLVSSPAICSGSLSNFSTSDNGSYSSNGSDFGSCASITSGGSYTNSVISDSSSYTFPPSDDTFLGGNLPSDSTSNRSVPNRNTTPCEIFSRSTSTDPFVQDDLEHGLEIMKLPVSRNTKIPLKRYSSLVIFPRSPSTTRPTSPTSLCTLLSKGSYQTSHQFIISPSEIAHNEDGTSAKGFLSTAVNGLRLSKTICTPGEVRDIRPLHRKGSLQKKIVLSNNTPRQTVCEKSSEGYSCVSVHFTQRKAATLDCETTNGDCKPEMSEIKLNSDSEYIKLMHRTSACLPSSQNVDCQININGELERPHSQMNKNHGILRRSISLGGAYPNISCLSSLKHNCSKGGPSQLLIKFASGNEGKVDNLSRDSNRDCTNELSNSCKPGWVVLDQPDAACHLQQQQEPSPLPPGWEERQDILGRTYYVNHESRRTQWKRPTPQDNLTDAENGNIQLQAQRAFTTRRQISEETESVDNRESSENWEIIREDEATMYSNQAFPSPPPSSNLDVPTHLAEELNARLTIFGNSAVSQPASSSNHSSRRGSLQAYTFEEQPTLPVLLPTSSGLPPGWEEKQDERGRSYYVDHNSRTTTWTKPTVQATVETSQLTSSQSSAGPQSQASTSDSGQQVTQPSEIEQGFLPKGWEVRHAPNGRPFFIDHNTKTTTWEDPRLKIPAHLRGKTSLDTSNDLGPLPPGWEERTHTDGRIFYINHNIKRTQWEDPRLENVAITGPAVPYSRDYKRKYEFFRRKLKKQNDIPNKFEMKLRRATVLEDSYRRIMGVKRADFLKARLWIEFDGEKGLDYGGVAREWFFLISKEMFNPYYGLFEYSATDNYTLQINPNSGLCNEDHLSYFKFIGRVAGMAVYHGKLLDGFFIRPFYKMMLHKPITLHDMESVDSEYYNSLRWILENDPTELDLRFIIDEELFGQTHQHELKNGGSEIVVTNKNKKEYIYLVIQWRFVNRIQKQMAAFKEGFFELIPQDLIKIFDENELELLMCGLGDVDVNDWREHTKYKNGYSANHQVIQWFWKAVLMMDSEKRIRLLQFVTGTSRVPMNGFAELYGSNGPQSFTVEQWGTPEKLPRAHTCFNRLDLPPYESFEELWDKLQMAIENTQGFDGVD

SEQ ID NO: 56017 - protein, 900 aa, Homo sapiens
  Payload ID: 11018
  Gene Symbol: NEDD4
  Gene Name: neural precursor cell expressed, developmentally down-regulated 4, E3 ubiquitin protein ligase
  Uniprot ID: P46934
  ENSP ID: ENSP00000410613
MATCAVEVFGLLEDEENSRIVRVRVIAGIGLAKKDILGASDPYVRVTLYDPMNGVLTSVQTKTIKKSLNPKWNEEILFRVHPQQHRLLFEVFDENRLTRDDFLGQVDVPLYPLPTENPRLERPYTFKDFVLHPRSHKSRVKGYLRLKMTYLPKTSGSEDDNAEQAEELEPGWVVLDQPDAACHLQQQQEPSPLPPGWEERQDILGRTYYVNHESRRTQWKRPTPQDNLTDAENGNIQLQAQRAFTTRRQISEETESVDNRESSENWEIIREDEATMYSNQAFPSPPPSSNLDVPTHLAEELNARLTIFGNSAVSQPASSSNHSSRRGSLQAYTFEEQPTLPVLLPTSSGLPPGWEEKQDERGRSYYVDHNSRTTTWTKPTVQATVETSQLTSSQSSAGPQSQASTSDSGQQVTQPSEIEQGFLPKGWEVRHAPNGRPFFIDHNTKTTTWEDPRLKIPAHLRGKTSLDTSNDLGPLPPGWEERTHTDGRIFYINHNIKRTQWEDPRLENVAITGPAVPYSRDYKRKYEFFRRKLKKQNDIPNKFEMKLRRATVLEDSYRRIMGVKRADFLKARLWIEFDGEKGLDYGGVAREWFFLISKEMFNPYYGLFEYSATDNYTLQINPNSGLCNEDHLSYFKFIGRVAGMAVYHGKLLDGFFIRPFYKMMLHKPITLHDMESVDSEYYNSLRWILENDPTELDLRFIIDEELFGQTHQHELKNGGSEIVVTNKNKKEYIYLVIQWRFVNRIQKQMAAFKEGFFELIPQDLIKIFDENELELLMCGLGDVDVNDWREHTKYKNGYSANHQVIQWFWKAVLMMDSEKRIRLLQFVTGTSRVPMNGFAELYGSNGPQSFTVEQWGTPEKLPRAHTCFNRLDLPPYESFEELWDKLQMAIENTQGFDGVD

SEQ ID NO: 56018 - protein, 35 aa, Homo sapiens
  Payload ID: 11018
  Gene Symbol: NEDD4
  Gene Name: neural precursor cell expressed, developmentally down-regulated 4, E3 ubiquitin protein ligase
  ENSP ID: ENSP00000421047
  MOD_RES (1)..(1): Any amino acid
XWNEEILFRVHPQQHRLLFEVFDENRLPWLVTNQE

SEQ ID NO: 56019 - protein, 910 aa, Homo sapiens
  Payload ID: 11018
  Gene Symbol: NEDD4
  Gene Name: neural precursor cell expressed, developmentally down-regulated 4, E3 ubiquitin protein ligase
  ENSP ID: ENSP00000422455
  MOD_RES (1)..(1): Any amino acid
XNGDCKPEMSEIKLNSDSEYIKLMHRTSACLPSSQNVDCQININGELERPHSQMNKNHGILRRSISLGGAYPNISCLSSLKHNCSKGGPSQLLIKFASGNEGKVDNLSRDSNRDCTNELSNSCKTENPRLERPYTFKDFVLHPRSHKSRVKGYLRLKMTYLPKTSGSEDDNAEQAEELEPGWVVLDQPDAACHLQQQQEPSPLPPGWEERQDILGRTYYVNHESRRTQWKRPTPQDNLTDAENGNIQLQAQRAFTTRRQISEETESVDNRESSENWEIIREDEATMYSNQAFPSPPPSSNLDVPTHLAEELNARLTIFGNSAVSQPASSSNHSSRRGSLQAYTFEEQPTLPVLLPTSSGLPPGWEEKQDERGRSYYVDHNSRTTTWTKPTVQATVETSQLTSSQSSAGPQSQASTSDSGQQVTQPSEIEQGFLPKGWEVRHAPNGRPFFIDHNTKTTTWEDPRLKIPAHLRGKTSLDTSNDLGPLPPGWEERTHTDGRIFYINHNIKRTQWEDPRLENVAITGPAVPYSRDYKRKYEFFRRKLKKQNDIPNKFEMKLRRATVLEDSYRRIMGVKRADFLKARLWIEFDGEKGLDYGGVAREWFFLISKEMFNPYYGLFEYSATDNYTLQINPNSGLCNEDHLSYFKFIGRVAGMAVYHGKLLDGFFIRPFYKMMLHKPITLHDMESVDSEYYNSLRWILENDPTELDLRFIIDEELFGQTHQHELKNGGSEIVVTNKNKKEYIYLVIQWRFVNRIQKQMAAFKEGFFELIPQDLIKIFDENELELLMCGLGDVDVNDWREHTKYKNGYSANHQVIQWFWKAVLMMDSEKRIRLLQFVTGTSRVPMNGFAELYGSNGPQSFTVEQWGTPEKLPRAHTCFNRLDLPPYESFEELWDKLQMAIENTQGFDGVD

SEQ ID NO: 56020 - protein, 1303 aa, Homo sapiens
  Payload ID: 11018
  Gene Symbol: NEDD4
  Gene Name: neural precursor cell expressed, developmentally down-regulated 4, E3 ubiquitin protein ligase
  Uniprot ID: P46934
  ENSP ID: ENSP00000422705
MAQSLRLHFAARRSNTYPLSETSGDDLDSHVHMCFKRPTRISTSNVVQMKLTPRQTALAPLIKENVQSQERSSVPSSENVNKKSSCLQISLQPTRYSGYLQSSNVLADSDDASFTCILKDGIYSSAVVDNELNAVNDGHLVSSPAICSGSLSNFSTSDNGSYSSNGSDFGSCASITSGGSYTNSVISDSSSYTFPPSDDTFLGGNLPSDSTSNRSVPNRNTTPCEIFSRSTSTDPFVQDDLEHGLEIMKLPVSRNTKIPLKRYSSLVIFPRSPSTTRPTSPTSLCTLLSKGSYQTSHQFIISPSEIAHNEDGTSAKGFLSTAVNGLRLSKTICTPGEVRDIRPLHRKGSLQKKIVLSNNTPRQTVCEKSSEGYSCVSVHFTQRKAATLDCETTNGDCKPEMSEIKLNSDSEYIKLMHRTSACLPSSQNVDCQININGELERPHSQMNKNHGILRRSISLGGAYPNISCLSSLKHNCSKGGPSQLLIKFASGNEGKVDNLSRDSNRDCTNELSNSCKTRDDFLGQVDVPLYPLPTENPRLERPYTFKDFVLHPRSHKSRVKGYLRLKMTYLPKTSGSEDDNAEQAEELEQQQEPSPLPPGWEERQDILGRTYYVNHESRRTQWKRPTPQDNLTDAENGNIQLQAQRAFTTRRQISEETESVDNRESSENWEIIREDEATMYSNQAFPSPPPSSNLDVPTHLAEELNARLTIFGNSAVSQPASSSNHSSRRGSLQAYTFEEQPTLPVLLPTSSGLPPGWEEKQDERGRSYYVDHNSRTTTWTKPTVQATVETSQLTSSQSSAGPQSQASTSDSGQQVTQPSEIEQGFLPKGWEVRHAPNGRPFFIDHNTKTTTWEDPRLKIPAHLRGKTSLDTSNDLGPLPPGWEERTHTDGRIFYINHNIKRTQWEDPRLENVAITGPAVPYSRDYKRKYEFFRRKLKKQNDIPNKFEMKLRRATVLEDSYRRIMGVKRADFLKARLWIEFDGEKGLDYGGVAREWFFLISKEMFNPYYGLFEYSATDNYTLQINPNSGLCNEDHLSYFKFIGRVAGMAVYHGKLLDGFFIRPFYKMMLHKPITLHDMESVDSEYYNSLRWILENDPTELDLRFIIDEELFGQTHQHELKNGGSEIVVTNKNKKEYIYLVIQWRFVNRIQKQMAAFKEGFFELIPQDLIKIFDENELELLMCGLGDVDVNDWREHTKYKNGYSANHQVIQWFWKAVLMMDSEKRIRLLQFVTGTSRVPMNGFAELYGSNGPQSFTVEQWGTPEKLPRAHTCFNRLDLPPYESFEELWDKLQMAIENTQGFDGVD

SEQ ID NO: 56021 - protein, 39 aa, Homo sapiens
  Payload ID: 11018
  Gene Symbol: NEDD4
  Gene Name: neural precursor cell expressed, developmentally down-regulated 4, E3 ubiquitin protein ligase
  ENSP ID: ENSP00000424471
  MOD_RES (1)..(1): Any amino acid
XCAVEVFGLLEDEENSRIVRVRVIAGIGLAKKDILGARV

SEQ ID NO: 56022 - protein, 1319 aa, Homo sapiens
  Payload ID: 11018
  Gene Symbol: NEDD4
  Gene Name: neural precursor cell expressed, developmentally down-regulated 4, E3 ubiquitin protein ligase
  Uniprot ID: P46934
  ENSP ID: ENSP00000424827
MAQSLRLHFAARRSNTYPLSETSGDDLDSHVHMCFKRPTRISTSNVVQMKLTPRQTALAPLIKENVQSQERSSVPSSENVNKKSSCLQISLQPTRYSGYLQSSNVLADSDDASFTCILKDGIYSSAVVDNELNAVNDGHLVSSPAICSGSLSNFSTSDNGSYSSNGSDFGSCASITSGGSYTNSVISDSSSYTFPPSDDTFLGGNLPSDSTSNRSVPNRNTTPCEIFSRSTSTDPFVQDDLEHGLEIMKLPVSRNTKIPLKRYSSLVIFPRSPSTTRPTSPTSLCTLLSKGSYQTSHQFIISPSEIAHNEDGTSAKGFLSTAVNGLRLSKTICTPGEVRDIRPLHRKGSLQKKIVLSNNTPRQTVCEKSSEGYSCVSVHFTQRKAATLDCETTNGDCKPEMSEIKLNSDSEYIKLMHRTSACLPSSQNVDCQININGELERPHSQMNKNHGILRRSISLGGAYPNISCLSSLKHNCSKGGPSQLLIKFASGNEGKVDNLSRDSNRDCTNELSNSCKTRDDFLGQVDVPLYPLPTENPRLERPYTFKDFVLHPRSHKSRVKGYLRLKMTYLPKTSGSEDDNAEQAEELEPGWVVLDQPDAACHLQQQQEPSPLPPGWEERQDILGRTYYVNHESRRTQWKRPTPQDNLTDAENGNIQLQAQRAFTTRRQISEETESVDNRESSENWEIIREDEATMYSNQAFPSPPPSSNLDVPTHLAEELNARLTIFGNSAVSQPASSSNHSSRRGSLQAYTFEEQPTLPVLLPTSSGLPPGWEEKQDERGRSYYVDHNSRTTTWTKPTVQATVETSQLTSSQSSAGPQSQASTSDSGQQVTQPSEIEQGFLPKGWEVRHAPNGRPFFIDHNTKTTTWEDPRLKIPAHLRGKTSLDTSNDLGPLPPGWEERTHTDGRIFYINHNIKRTQWEDPRLENVAITGPAVPYSRDYKRKYEFFRRKLKKQNDIPNKFEMKLRRATVLEDSYRRIMGVKRADFLKARLWIEFDGEKGLDYGGVAREWFFLISKEMFNPYYGLFEYSATDNYTLQINPNSGLCNEDHLSYFKFIGRVAGMAVYHGKLLDGFFIRPFYKMMLHKPITLHDMESVDSEYYNSLRWILENDPTELDLRFIIDEELFGQTHQHELKNGGSEIVVTNKNKKEYIYLVIQWRFVNRIQKQMAAFKEGFFELIPQDLIKIFDENELELLMCGLGDVDVNDWREHTKYKNGYSANHQVIQWFWKAVLMMDSEKRIRLLQFVTGTSRVPMNGFAELYGSNGPQSFTVEQWGTPEKLPRAHTCFNRLDLPPYESFEELWDKLQMAIENTQGFDGVD

SEQ ID NO: 56023 - protein, 401 aa, Homo sapiens
  Payload ID: 11018
  Gene Symbol: NEDD4
  Gene Name: neural precursor cell expressed, developmentally down-regulated 4, E3 ubiquitin protein ligase
  ENSP ID: ENSP00000426051
  MOD_RES (1)..(1): Any amino acid
XIYSSAVVDNELNAVNDGHLVSSPAICSGSLSNFSTSDNGSYSSNGSDFGSCASITSGGSYTNSVISDSSSYTFPPSDDTFLGGNLPSDSTSNRSVPNRNTTPCEIFSRSTSTDPFVQDDLEHGLEIMKLPVSRNTKIPLKRYSSLVIFPRSPSTTRPTSPTSLCTLLSKGSYQTSHQFIISPSEIAHNEDGTSAKGFLSTAVNGLRLSKTICTPGEVRDIRPLHRKGSLQKKIVLSNNTPRQTVCEKSSEGYSCVSVHFTQRKAATLDCETTNGDCKPEMSEIKLNSDSEYIKLMHRTSACLPSSQNVDCQININGELERPHSQMNKNHGILRRSISLGGAYPNISCLSSLKHNCSKGGPSQLLIKFASGNEGKVDNLSRDSNRDCTNELSNSCKSQIKS

SEQ ID NO: 56024 - protein, 871 aa, Homo sapiens
  Payload ID: 11019
  Gene Symbol: NEDD4L
  Gene Name: neural precursor cell expressed, developmentally down-regulated 4-like, E3 ubiquitin protein ligase
  Uniprot ID: Q96PU5
  ENSP ID: ENSP00000256830
MATGLGEPVYGLSEDEGESRILRVKVVSGIDLAKKDIFGASDPYVKLSLYVADENRELALVQTKTIKKTLNPKWNEEFYFRVNPSNHRLLFEVFDENRLTRDDFLGQVDVPLSHLPTEDPTMERPYTFKDFLLRPRSHKSRVKGFLRLKMAYMPKNGGQDEENSDQRDDMEHGWEVVDSNDSASQHQEELPPPPLPPGWEEKVDNLGRTYYVNHNNRTTQWHRPSLMDVSSESDNNIRQINQEAAHRRFRSRRHISEDLEPEPSEGGDVPEPWETISEEVNIAGDSLGLALPPPPASPGSRTSPQELSEELSRRLQITPDSNGEQFSSLIQREPSSRLRSCSVTDAVAEQGHLPPGAKDSPVRRAVKDTLSNPQSPQPSPYNSPKPQHKVTQSFLPPGWEMRIAPNGRPFFIDHNTKTTTWEDPRLKFPVHMRSKTSLNPNDLGPLPPGWEERIHLDGRTFYIDHNSKITQWEDPRLQNPAITGPAVPYSREFKQKYDYFRKKLKKPADIPNRFEMKLHRNNIFEESYRRIMSVKRPDVLKARLWIEFESEKGLDYGGVAREWFFLLSKEMFNPYYGLFEYSATDNYTLQINPNSGLCNEDHLSYFTFIGRVAGLAVFHGKLLDGFFIRPFYKMMLGKQITLNDMESVDSEYYNSLKWILENDPTELDLMFCIDEENFGQTYQVDLKPNGSEIMVTNENKREYIDLVIQWRFVNRVQKQMNAFLEGFTELLPIDLIKIFDENELELLMCGLGDVDVNDWRQHSIYKNGYCPNHPVIQWFWKAVLLMDAEKRIRLLQFVTGTSRVPMNGFAELYGSNGPQLFTIEQWGSPEKLPRAHTCFNRLDLPPYETFEDLREKLLMAVENAQGFEGVD

SEQ ID NO: 56025 - protein, 911 aa, Homo sapiens
  Payload ID: 11019
  Gene Symbol: NEDD4L
  Gene Name: neural precursor cell expressed, developmentally down-regulated 4-like, E3 ubiquitin protein ligase
  Uniprot ID: Q96PU5
  ENSP ID: ENSP00000348847
MATGLGEPVYGLSEDEGESRILRVKVVSGIDLAKKDIFGASDPYVKLSLYVADENRELALVQTKTIKKTLNPKWNEEFYFRVNPSNHRLLFEVFDENRLTRDDFLGQVDVPLSHLPTEDPTMERPYTFKDFLLRPRSHKSRVKGFLRLKMAYMPKNGGQDEENSDQRDDMEHGWEVVDSNDSASQHQEELPPPPLPPGWEEKVDNLGRTYYVNHNNRTTQWHRPSLMDVSSESDNNIRQINQEAAHRRFRSRRHISEDLEPEPSEGGDVPEPWETISEEVNIAGDSLGLALPPPPASPGSRTSPQELSEELSRRLQITPDSNGEQFSSLIQREPSSRLRSCSVTDAVAEQGHLPPLAEDGASGSATNSNNHLIEPQIRRPRSLSSPTVTLSAPLEGAKDSPVRRAVKDTLSNPQSPQPSPYNSPKPQHKVTQSFLPPGWEMRIAPNGRPFFIDHNTKTTTWEDPRLKFPVHMRSKTSLNPNDLGPLPPGWEERIHLDGRTFYIDHNSKITQWEDPRLQNPAITGPAVPYSREFKQKYDYFRKKLKKPADIPNRFEMKLHRNNIFEESYRRIMSVKRPDVLKARLWIEFESEKGLDYGGVAREWFFLLSKEMFNPYYGLFEYSATDNYTLQINPNSGLCNEDHLSYFTFIGRVAGLAVFHGKLLDGFFIRPFYKMMLGKQITLNDMESVDSEYYNSLKWILENDPTELDLMFCIDEENFGQTYQVDLKPNGSEIMVTNENKREYIDLVIQWRFVNRVQKQMNAFLEGFTELLPIDLIKIFDENELELLMCGLGDVDVNDWRQHSIYKNGYCPNHPVIQWFWKAVLLMDAEKRIRLLQFVTGTSRVPMNGFAELYGSNGPQLFTIEQWGSPEKLPRAHTCFNRLDLPPYETFEDLREKLLMAVENAQGFEGVD

SEQ ID NO: 56026 - protein, 967 aa, Homo sapiens
  Payload ID: 11019
  Gene Symbol: NEDD4L
  Gene Name: neural precursor cell expressed, developmentally down-regulated 4-like, E3 ubiquitin protein ligase
  Uniprot ID: Q96PU5
  ENSP ID: ENSP00000350569
MRRLAFEQGESRILRVKVVSGIDLAKKDIFGASDPYVKLSLYVADENRELALVQTKTIKKTLNPKWNEEFYFRVNPSNHRLLFEVFDENRLTRDDFLGQVDVPLSHLPTEDPTMERPYTFKDFLLRPRSHKSRVKGFLRLKMAYMPKNGGQDEENSDQRDDMEHGWEVVDSNDSASQHQEELPPPPLPPGWEEKVDNLGRTYYVNHNNRTTQWHRPSLMDVSSESDNNIRQINQEAAHRRFRSRRHISEDLEPEPSEGGDVPEPWETISEEVNIAGDSLGLALPPPPASPGSRTSPQELSEELSRRLQITPDSNGEQFSSLIQREPSSRLRSCSVTDAVAEQGHLPPPSAPAGRARSSTVTGGEEPTPSVAYVHTTPGLPSGWEERKDAKGRTYYVNHNNRTTTWTRPIMQLAEDGASGSATNSNNHLIEPQIRRPRSLSSPTVTLSAPLEGAKDSPVRRAVKDTLSNPQSPQPSPYNSPKPQHKVTQSFLPPGWEMRIAPNGRPFFIDHNTKTTTWEDPRLKFPVHMRSKTSLNPNDLGPLPPGWEERIHLDGRTFYIDHNSKITQWEDPRLQNPAITGPAVPYSREFKQKYDYFRKKLKKPADIPNRFEMKLHRNNIFEESYRRIMSVKRPDVLKARLWIEFESEKGLDYGGVAREWFFLLSKEMFNPYYGLFEYSATDNYTLQINPNSGLCNEDHLSYFTFIGRVAGLAVFHGKLLDGFFIRPFYKMMLGKQITLNDMESVDSEYYNSLKWILENDPTELDLMFCIDEENFGQTYQVDLKPNGSEIMVTNENKREYIDLVIQWRFVNRVQKQMNAFLEGFTELLPIDLIKIFDENELELLMCGLGDVDVNDWRQHSIYKNGYCPNHPVIQWFWKAVLLMDAEKRIRLLQFVTGTSRVPMNGFAELYGSNGPQLFTIEQWGSPEKLPRAHTCFNRLDLPPYETFEDLREKLLMAVENAQGFEGVD

SEQ ID NO: 56027 - protein, 955 aa, Homo sapiens
  Payload ID: 11019
  Gene Symbol: NEDD4L
  Gene Name: neural precursor cell expressed, developmentally down-regulated 4-like, E3 ubiquitin protein ligase
  Uniprot ID: Q96PU5
  ENSP ID: ENSP00000372301
MATGLGEPVYGLSEDEGESRILRVKVVSGIDLAKKDIFGASDPYVKLSLYVADENRELALVQTKTIKKTLNPKWNEEFYFRVNPSNHRLLFEVFDENRLTRDDFLGQVDVPLSHLPTEDPTMERPYTFKDFLLRPRSHKSRVKGFLRLKMAYMPKNGGQDEENSDQRDDMEHGWEVVDSNDSASQHQEELPPPPLPPGWEEKVDNLGRTYYVNHNNRTTQWHRPSLMDVSSESDNNIRQINQEAAHRRFRSRRHISEDLEPEPSEGGDVPEPWETISEEVNIAGDSLGLALPPPPASPGSRTSPQELSEELSRRLQITPDSNGEQFSSLIQREPSSRLRSCSVTDAVAEQGHLPPPSVAYVHTTPGLPSGWEERKDAKGRTYYVNHNNRTTTWTRPIMQLAEDGASGSATNSNNHLIEPQIRRPRSLSSPTVTLSAPLEGAKDSPVRRAVKDTLSNPQSPQPSPYNSPKPQHKVTQSFLPPGWEMRIAPNGRPFFIDHNTKTTTWEDPRLKFPVHMRSKTSLNPNDLGPLPPGWEERIHLDGRTFYIDHNSKITQWEDPRLQNPAITGPAVPYSREFKQKYDYFRKKLKKPADIPNRFEMKLHRNNIFEESYRRIMSVKRPDVLKARLWIEFESEKGLDYGGVAREWFFLLSKEMFNPYYGLFEYSATDNYTLQINPNSGLCNEDHLSYFTFIGRVAGLAVFHGKLLDGFFIRPFYKMMLGKQITLNDMESVDSEYYNSLKWILENDPTELDLMFCIDEENFGQTYQVDLKPNGSEIMVTNENKREYIDLVIQWRFVNRVQKQMNAFLEGFTELLPIDLIKIFDENELELLMCGLGDVDVNDWRQHSIYKNGYCPNHPVIQWFWKAVLLMDAEKRIRLLQFVTGTSRVPMNGFAELYGSNGPQLFTIEQWGSPEKLPRAHTCFNRLDLPPYETFEDLREKLLMAVENAQGFEGVD

SEQ ID NO: 56028 - protein, 975 aa, Homo sapiens
  Payload ID: 11019
  Gene Symbol: NEDD4L
  Gene Name: neural precursor cell expressed, developmentally down-regulated 4-like, E3 ubiquitin protein ligase
  Uniprot ID: Q96PU5
  ENSP ID: ENSP00000383199
MATGLGEPVYGLSEDEGESRILRVKVVSGIDLAKKDIFGASDPYVKLSLYVADENRELALVQTKTIKKTLNPKWNEEFYFRVNPSNHRLLFEVFDENRLTRDDFLGQVDVPLSHLPTEDPTMERPYTFKDFLLRPRSHKSRVKGFLRLKMAYMPKNGGQDEENSDQRDDMEHGWEVVDSNDSASQHQEELPPPPLPPGWEEKVDNLGRTYYVNHNNRTTQWHRPSLMDVSSESDNNIRQINQEAAHRRFRSRRHISEDLEPEPSEGGDVPEPWETISEEVNIAGDSLGLALPPPPASPGSRTSPQELSEELSRRLQITPDSNGEQFSSLIQREPSSRLRSCSVTDAVAEQGHLPPPSAPAGRARSSTVTGGEEPTPSVAYVHTTPGLPSGWEERKDAKGRTYYVNHNNRTTTWTRPIMQLAEDGASGSATNSNNHLIEPQIRRPRSLSSPTVTLSAPLEGAKDSPVRRAVKDTLSNPQSPQPSPYNSPKPQHKVTQSFLPPGWEMRIAPNGRPFFIDHNTKTTTWEDPRLKFPVHMRSKTSLNPNDLGPLPPGWEERIHLDGRTFYIDHNSKITQWEDPRLQNPAITGPAVPYSREFKQKYDYFRKKLKKPADIPNRFEMKLHRNNIFEESYRRIMSVKRPDVLKARLWIEFESEKGLDYGGVAREWFFLLSKEMFNPYYGLFEYSATDNYTLQINPNSGLCNEDHLSYFTFIGRVAGLAVFHGKLLDGFFIRPFYKMMLGKQITLNDMESVDSEYYNSLKWILENDPTELDLMFCIDEENFGQTYQVDLKPNGSEIMVTNENKREYIDLVIQWRFVNRVQKQMNAFLEGFTELLPIDLIKIFDENELELLMCGLGDVDVNDWRQHSIYKNGYCPNHPVIQWFWKAVLLMDAEKRIRLLQFVTGTSRVPMNGFAELYGSNGPQLFTIEQWGSPEKLPRAHTCFNRLDLPPYETFEDLREKLLMAVENAQGFEGVD

SEQ ID NO: 56029 - protein, 854 aa, Homo sapiens
  Payload ID: 11019
  Gene Symbol: NEDD4L
  Gene Name: neural precursor cell expressed, developmentally down-regulated 4-like, E3 ubiquitin protein ligase
  Uniprot ID: Q96PU5
  ENSP ID: ENSP00000389406
MERPYTFKDFLLRPRSHKSRVKGFLRLKMAYMPKNGGQDEENSDQRDDMEHGWEVVDSNDSASQHQEELPPPPLPPGWEEKVDNLGRTYYVNHNNRTTQWHRPSLMDVSSESDNNIRQINQEAAHRRFRSRRHISEDLEPEPSEGGDVPEPWETISEEVNIAGDSLGLALPPPPASPGSRTSPQELSEELSRRLQITPDSNGEQFSSLIQREPSSRLRSCSVTDAVAEQGHLPPPSAPAGRARSSTVTGGEEPTPSVAYVHTTPGLPSGWEERKDAKGRTYYVNHNNRTTTWTRPIMQLAEDGASGSATNSNNHLIEPQIRRPRSLSSPTVTLSAPLEGAKDSPVRRAVKDTLSNPQSPQPSPYNSPKPQHKVTQSFLPPGWEMRIAPNGRPFFIDHNTKTTTWEDPRLKFPVHMRSKTSLNPNDLGPLPPGWEERIHLDGRTFYIDHNSKITQWEDPRLQNPAITGPAVPYSREFKQKYDYFRKKLKKPADIPNRFEMKLHRNNIFEESYRRIMSVKRPDVLKARLWIEFESEKGLDYGGVAREWFFLLSKEMFNPYYGLFEYSATDNYTLQINPNSGLCNEDHLSYFTFIGRVAGLAVFHGKLLDGFFIRPFYKMMLGKQITLNDMESVDSEYYNSLKWILENDPTELDLMFCIDEENFGQTYQVDLKPNGSEIMVTNENKREYIDLVIQWRFVNRVQKQMNAFLEGFTELLPIDLIKIFDENELELLMCGLGDVDVNDWRQHSIYKNGYCPNHPVIQWFWKAVLLMDAEKRIRLLQFVTGTSRVPMNGFAELYGSNGPQLFTIEQWGSPEKLPRAHTCFNRLDLPPYETFEDLREKLLMAVENAQGFEGVD

SEQ ID NO: 56030 - protein, 834 aa, Homo sapiens
  Payload ID: 11019
  Gene Symbol: NEDD4L
  Gene Name: neural precursor cell expressed, developmentally down-regulated 4-like, E3 ubiquitin protein ligase
  Uniprot ID: Q96PU5
  ENSP ID: ENSP00000393395
MERPYTFKDFLLRPRSHKSRVKGFLRLKMAYMPKNGGQDEENSDQRDDMEHGWEVVDSNDSASQHQEELPPPPLPPGWEEKVDNLGRTYYVNHNNRTTQWHRPSLMDVSSESDNNIRQINQEAAHRRFRSRRHISEDLEPEPSEGGDVPEPWETISEEVNIAGDSLGLALPPPPASPGSRTSPQELSEELSRRLQITPDSNGEQFSSLIQREPSSRLRSCSVTDAVAEQGHLPPPSVAYVHTTPGLPSGWEERKDAKGRTYYVNHNNRTTTWTRPIMQLAEDGASGSATNSNNHLIEPQIRRPRSLSSPTVTLSAPLEGAKDSPVRRAVKDTLSNPQSPQPSPYNSPKPQHKVTQSFLPPGWEMRIAPNGRPFFIDHNTKTTTWEDPRLKFPVHMRSKTSLNPNDLGPLPPGWEERIHLDGRTFYIDHNSKITQWEDPRLQNPAITGPAVPYSREFKQKYDYFRKKLKKPADIPNRFEMKLHRNNIFEESYRRIMSVKRPDVLKARLWIEFESEKGLDYGGVAREWFFLLSKEMFNPYYGLFEYSATDNYTLQINPNSGLCNEDHLSYFTFIGRVAGLAVFHGKLLDGFFIRPFYKMMLGKQITLNDMESVDSEYYNSLKWILENDPTELDLMFCIDEENFGQTYQVDLKPNGSEIMVTNENKREYIDLVIQWRFVNRVQKQMNAFLEGFTELLPIDLIKIFDENELELLMCGLGDVDVNDWRQHSIYKNGYCPNHPVIQWFWKAVLLMDAEKRIRLLQFVTGTSRVPMNGFAELYGSNGPQLFTIEQWGSPEKLPRAHTCFNRLDLPPYETFEDLREKLLMAVENAQGFEGVD

SEQ ID NO: 56031 - protein, 834 aa, Homo sapiens; identical to SEQ ID NO: 56030
  Payload ID: 11019
  Gene Symbol: NEDD4L
  Gene Name: neural precursor cell expressed, developmentally down-regulated 4-like, E3 ubiquitin protein ligase
  Uniprot ID: Q96PU5
  ENSP ID: ENSP00000405440

SEQ ID NO: 56032 - protein, 854 aa, Homo sapiens; identical to SEQ ID NO: 56029
  Payload ID: 11019
  Gene Symbol: NEDD4L
  Gene Name: neural precursor cell expressed, developmentally down-regulated 4-like, E3 ubiquitin protein ligase
  Uniprot ID: Q96PU5
  ENSP ID: ENSP00000411947

SEQ ID NO: 56033 - protein, 106 aa, Homo sapiens
  Payload ID: 11019
  Gene Symbol: NEDD4L
  Gene Name: neural precursor cell expressed, developmentally down-regulated 4-like, E3 ubiquitin protein ligase
  ENSP ID: ENSP00000465669
MATGLGEPVYGLSEDEAVLLMDAEKRIRLLQFVTGTSRVPMNGFAELYGSNGPQLFTIEQWGSPEKLPRAHTCFNRLDLPPYETFEDLREKLLMAVENAQGFEGVD

SEQ ID NO: 56034 - protein, 10 aa, Homo sapiens
  Payload ID: 11019
  Gene Symbol: NEDD4L
  Gene Name: neural precursor cell expressed, developmentally down-regulated 4-like, E3 ubiquitin protein ligase
  ENSP ID: ENSP00000466776
MERPYTFKDF

SEQ ID NO: 56035 - protein, 35 aa, Homo sapiens
  Payload ID: 11019
  Gene Symbol: NEDD4L
  Gene Name: neural precursor cell expressed, developmentally down-regulated 4-like, E3 ubiquitin protein ligase
  ENSP ID: ENSP00000466789
MERPYTFKDFLLRPRSHKSRVKGFLRLKMAYMPKN

SEQ ID NO: 56036 - protein, 150 aa, Homo sapiens
  Payload ID: 11019
  Gene Symbol: NEDD4L
  Gene Name: neural precursor cell expressed, developmentally down-regulated 4-like, E3 ubiquitin protein ligase
  ENSP ID: ENSP00000467072
MERPYTFKDFLLRPRSHKSRVKGFLRLKMAYMPKNGGQDEENSDQRDDMEHGWEVVDSNDSASQHQEELPPPPLPPGWEEKVDNLGRTYYVNHNNRTTQWHRPSLMDVSSESDNNIRQINQEAAHRRFRSRRHISEDLEPEPSEGGDVPE

SEQ ID NO: 56037 - protein, 15 aa, Homo sapiens
  Payload ID: 11019
  Gene Symbol: NEDD4L
  Gene Name: neural precursor cell expressed, developmentally down-regulated 4-like, E3 ubiquitin protein ligase
  ENSP ID: ENSP00000467768
MERPYTFKDFLLRPR

SEQ ID NO: 56038 - protein, 639 aa, Homo sapiens
  Payload ID: 11019
  Gene Symbol: NEDD4L
  Gene Name: neural precursor cell expressed, developmentally down-regulated 4-like, E3 ubiquitin protein ligase
  ENSP ID: ENSP00000468332
RDDMEHGWEVVDSNDSASQHQEELPPPPLPPGWEEKVDNLGRTYYVNHNNRTTQWHRPSLMDVSSESDNNIRQINQEAAHRRFRSRRHISEDLEPEPSEGGDVPEPWETISEEVNIAGDSLGLALPPPPASPGSRTSPQELSEELSRRLQITPDSNGEQFSSLIQREPSSRLRSCSVTDAVAEQGHLPPEDPRLKFPVHMRSKTSLNPNDLGPLPPGWEERIHLDGRTFYIDHNSKITQWEDPRLQNPAITGPAVPYSREFKQKYDYFRKKLKKPADIPNRFEMKLHRNNIFEESYRRIMSVKRPDVLKARLWIEFESEKGLDYGGVAREWFFLLSKEMFNPYYGLFEYSATDNYTLQINPNSGLCNEDHLSYFTFIGRVAGLAVFHGKLLDGFFIRPFYKMMLGKQITLNDMESVDSEYYNSLKWILENDPTELDLMFCIDEENFGQTYQVDLKPNGSEIMVTNENKREYIDLVIQWRFVNRVQKQMNAFLEGFTELLPIDLIKIFDENELELLMCGLGDVDVNDWRQHSIYKNGYCPNHPVIQWFWKAVLLMDAEKRIRLLQFVTGTSRVPMNGFAELYGSNGPQLFTIEQWGSPEKLPRAHTCFNRLDLPPYETFEDLREKLLMAVENAQGFEGVD

SEQ ID NO: 56039 - protein, 947 aa, Homo sapiens
  Payload ID: 11019
  Gene Symbol: NEDD4L
  Gene Name: neural precursor cell expressed, developmentally down-regulated 4-like, E3 ubiquitin protein ligase
  Uniprot ID: Q96PU5
  ENSP ID: ENSP00000468546
MRRLAFEQGESRILRVKVVSGIDLAKKDIFGASDPYVKLSLYVADENRELALVQTKTIKKTLNPKWNEEFYFRVNPSNHRLLFEVFDENRLTRDDFLGQVDVPLSHLPTEDPTMERPYTFKDFLLRPRSHKSRVKGFLRLKMAYMPKNGGQDEENSDQRDDMEHGWEVVDSNDSASQHQEELPPPPLPPGWEEKVDNLGRTYYVNHNNRTTQWHRPSLMDVSSESDNNIRQINQEAAHRRFRSRRHISEDLEPEPSEGGDVPEPWETISEEVNIAGDSLGLALPPPPASPGSRTSPQELSEELSRRLQITPDSNGEQFSSLIQREPSSRLRSCSVTDAVAEQGHLPPPSVAYVHTTPGLPSGWEERKDAKGRTYYVNHNNRTTTWTRPIMQLAEDGASGSATNSNNHLIEPQIRRPRSLSSPTVTLSAPLEGAKDSPVRRAVKDTLSNPQSPQPSPYNSPKPQHKVTQSFLPPGWEMRIAPNGRPFFIDHNTKTTTWEDPRLKFPVHMRSKTSLNPNDLGPLPPGWEERIHLDGRTFYIDHNSKITQWEDPRLQNPAITGPAVPYSREFKQKYDYFRKKLKKPADIPNRFEMKLHRNNIFEESYRRIMSVKRPDVLKARLWIEFESEKGLDYGGVAREWFFLLSKEMFNPYYGLFEYSATDNYTLQINPNSGLCNEDHLSYFTFIGRVAGLAVFHGKLLDGFFIRPFYKMMLGKQITLNDMESVDSEYYNSLKWILENDPTELDLMFCIDEENFGQTYQVDLKPNGSEIMVTNENKREYIDLVIQWRFVNRVQKQMNAFLEGFTELLPIDLIKIFDENELELLMCGLGDVDVNDWRQHSIYKNGYCPNHPVIQWFWKAVLLMDAEKRIRLLQFVTGTSRVPMNGFAELYGSNGPQLFTIEQWGSPEKLPRAHTCFNRLDLPPYETFEDLREKLLMAVENAQGFEGVD

SEQ ID NO: 56040 - protein, 20 aa, Homo sapiens
  Payload ID: 11019
  Gene Symbol: NEDD4L
  Gene Name: neural precursor cell expressed, developmentally down-regulated 4-like, E3 ubiquitin protein ligase
  ENSP ID: ENSP00000479462
MATGLGEPVYGLSEDEPGSP

SEQ ID NO: 56041 - protein, 81 aa, Homo sapiens
  Payload ID: 11020
  Gene Symbol: NEDD8
  Gene Name: neural precursor cell expressed, developmentally down-regulated 8
  Uniprot ID: Q15843
  ENSP ID: ENSP00000250495
MLIKVKTLTGKEIEIDIEPTDKVERIKERVEEKEGIPPQQQRLIYSGKQMNDEKTAADYKILGGSVLHLVLALRGGGGLRQ

SEQ ID NO: 56042 - protein, 50 aa, Homo sapiens
  Payload ID: 11020
  Gene Symbol: NEDD8
  Gene Name: neural precursor cell expressed, developmentally down-regulated 8
  ENSP ID: ENSP00000380040
MLIKVKTLTGKEIEIDIEPTDKVERIKERVEEKEGIPPQQQRLIYSGKQM

SEQ ID NO: 56043 - protein, 50 aa, Homo sapiens; identical to SEQ ID NO: 56042
  Payload ID: 11020
  Gene Symbol: NEDD8
  Gene Name: neural precursor cell expressed, developmentally down-regulated 8
  ENSP ID: ENSP00000448192

SEQ ID NO: 56044 - protein, 174 aa, Homo sapiens
  Payload ID: 11021
  Gene Symbol: NEDD9
  Gene Name: neural precursor cell expressed, developmentally down-regulated 9
  Uniprot ID: Q14511
  ENSP ID: ENSP00000368745
MKYKNLMARALYDNVPECAEELAFRKGDILTVIEQNTGGLEGWWLCSLHGRQGIVPGNRVKLLIGPMQETASSHEQPASGLMQQTFGQQKLYQVPNPQAAPRDTIYQVPPSYQNQGIYQVPTGHGTQEQEVYQVPPSVQRSIGGTSGPHVGKKVFQRDGQVSYFLVRASKQTSL

SEQ ID NO: 56045 - protein, 834 aa, Homo sapiens
  Payload ID: 11021
  Gene Symbol: NEDD9
  Gene Name: neural precursor cell expressed, developmentally down-regulated 9
  Uniprot ID: Q14511
  ENSP ID: ENSP00000368759
MKYKNLMARALYDNVPECAEELAFRKGDILTVIEQNTGGLEGWWLCSLHGRQGIVPGNRVKLLIGPMQETASSHEQPASGLMQQTFGQQKLYQVPNPQAAPRDTIYQVPPSYQNQGIYQVPTGHGTQEQEVYQVPPSVQRSIGGTSGPHVGKKVITPVRTGHGYVYEYPSRYQKDVYDIPPSHTTQGVYDIPPSSAKGPVFSVPVGEIKPQGVYDIPPTKGVYAIPPSACRDEAGLREKDYDFPPPMRQAGRPDLRPEGVYDIPPTCTKPAGKDLHVKYNCDIPGAAEPVARRHQSLSPNHPPPQLGQSVGSQNDAYDVPRGVQFLEPPAETSEKANPQERDGVYDVPLHNPPDAKGSRDLVDGINRLSFSSTGSTRSNMSTSSTSSKESSLSASPAQDKRLFLDPDTAIERLQRLQQALEMGVSSLMALVTTDWRCYGYMERHINEIRTAVDKVELFLKEYLHFVKGAVANAACLPELILHNKMKRELQRVEDSHQILSQTSHDLNECSWSLNILAINKPQNKCDDLDRFVMVAKTVPDDAKQLTTTINTNAEALFRPGPGSLHLKNGPESIMNSTEYPHGGSQGQLLHPGDHKAQAHNKALPPGLSKEQAPDCSSSDGSERSWMDDYDYVHLQGKEEFERQQKELLEKENIMKQNKMQLEHHQLSQFQLLEQEITKPVENDISKWKPSQSLPTTNSGVSAQDRQLLCFYYDQCETHFISLLNAIDALFSCVSSAQPPRIFVAHSKFVILSAHKLVFIGDTLTRQVTAQDIRNKVMNSSNQLCEQLKTIVMATKMAALHYPSTTALQEMVHQVTDLSRNAQLFKRSLLEMATF

SEQ ID NO: 56046 - protein, 32 aa, Homo sapiens
  Payload ID: 11021
  Gene Symbol: NEDD9
  Gene Name: neural precursor cell expressed, developmentally down-regulated 9
  ENSP ID: ENSP00000380534
MWTRNLMARALYDNVPECAEELAFRKGDILTV

SEQ ID NO: 56047 - protein, 43 aa, Homo sapiens
  Payload ID: 11021
  Gene Symbol: NEDD9
  Gene Name: neural precursor cell expressed, developmentally down-regulated 9
  ENSP ID: ENSP00000395237
MWTRRINHQLHTNKKALGTVSSQEQPNLLSGQTFQESYGKGLI

SEQ ID NO: 56048 - protein, 29 aa, Homo sapiens
  Payload ID: 11021
  Gene Symbol: NEDD9
  Gene Name: neural precursor cell expressed, developmentally down-regulated 9
  ENSP ID: ENSP00000421282
MARALYDNVPECAEELAFRKGDILTVIEQ

SEQ ID NO: 56049 - protein, 834 aa, Homo sapiens
  Payload ID: 11021
  Gene Symbol: NEDD9
  Gene Name: neural precursor cell expressed, developmentally down-regulated 9
  Uniprot ID: Q14511
  ENSP ID: ENSP00000422871
MWTRNLMARALYDNVPECAEELAFRKGDILTVIEQNTGGLEGWWLCSLHGRQGIVPGNRVKLLIGPMQETASSHEQPASGLMQQTFGQQKLYQVPNPQAAPRDTIYQVPPSYQNQGIYQVPTGHGTQEQEVYQVPPSVQRSIGGTSGPHVGKKVITPVRTGHGYVYEYPSRYQKDVYDIPPSHTTQGVYDIPPSSAKGPVFSVPVGEIKPQGVYDIPPTKGVYAIPPSACRDEAGLREKDYDFPPPMRQAGRPDLRPEGVYDIPPTCTKPAGKDLHVKYNCDIPGAAEPVARRHQSLSPNHPPPQLGQSVGSQNDAYDVPRGVQFLEPPAETSEKANPQERDGVYDVPLHNPPDAKGSRDLVDGINRLSFSSTGSTRSNMSTSSTSSKESSLSASPAQDKRLFLDPDTAIERLQRLQQALEMGVSSLMALVTTDWRCYGYMERHINEIRTAVDKVELFLKEYLHFVKGAVANAACLPELILHNKMKRELQRVEDSHQILSQTSHDLNECSWSLNILAINKPQNKCDDLDRFVMVAKTVPDDAKQLTTTINTNAEALFRPGPGSLHLKNGPESIMNSTEYPHGGSQGQLLHPGDHKAQAHNKALPPGLSKEQAPDCSSSDGSERSWMDDYDYVHLQGKEEFERQQKELLEKENIMKQNKMQLEHHQLSQFQLLEQEITKPVENDISKWKPSQSLPTTNSGVSAQDRQLLCFYYDQCETHFISLLNAIDALFSCVSSAQPPRIFVAHSKFVILSAHKLVFIGDTLTRQVTAQDIRNKVMNSSNQLCEQLKTIVMATKMAALHYPSTTALQEMVHQVTDLSRNAQLFKRSLLEMATF

SEQ ID NO: 56050 - protein, 22 aa, Homo sapiens
  Payload ID: 11021
  Gene Symbol: NEDD9
  Gene Name: neural precursor cell expressed, developmentally down-regulated 9
  ENSP ID: ENSP00000424975
MRPTNIMKGNLLYSKSIGLNNL

SEQ ID NO: 56051 - protein, 685 aa, Homo sapiens
  Payload ID: 11021
  Gene Symbol: NEDD9
  Gene Name: neural precursor cell expressed, developmentally down-regulated 9
  ENSP ID: ENSP00000478563
MKYKVITPVRTGHGYVYEYPSRYQKDVYDIPPSHTTQGVYDIPPSSAKGPVFSVPVGEIKPQGVYDIPPTKGVYAIPPSACRDEAGLREKDYDFPPPMRQAGRPDLRPEGVYDIPPTCTKPAGKDLHVKYNCDIPGAAEPVARRHQSLSPNHPPPQLGQSVGSQNDAYDVPRGVQFLEPPAETSEKANPQERDGVYDVPLHNPPDAKGSRDLVDGINRLSFSSTGSTRSNMSTSSTSSKESSLSASPAQDKRLFLDPDTAIERLQRLQQALEMGVSSLMALVTTDWRCYGYMERHINEIRTAVDKVELFLKEYLHFVKGAVANAACLPELILHNKMKRELQRVEDSHQILSQTSHDLNECSWSLNILAINKPQNKCDDLDRFVMVAKTVPDDAKQLTTTINTNAEALFRPGPGSLHLKNGPESIMNSTEYPHGGSQGQLLHPGDHKAQAHNKALPPGLSKEQAPDCSSSDGSERSWMDDYDYVHLQGKEEFERQQKELLEKENIMKQNKMQLEHHQLSQFQLLEQEITKPVENDISKWKPSQSLPTTNSGVSAQDRQLLCFYYDQCETHFISLLNAIDALFSCVSSAQPPRIFVAHSKFVILSAHKLVFIGDTLTRQVTAQDIRNKVMNSSNQLCEQLKTIVMATKMAALHYPSTTALQEMVHQVTDLSRNAQLFKRSLLEMATF

SEQ ID NO: 56052 - protein, 403 aa, Homo sapiens
  Payload ID: 11022
  Gene Symbol: NPDC1
  Gene Name: neural proliferation, differentiation and control, 1
  ENSP ID: ENSP00000360659
MLRPEAGLVGLHGPAQENSALPGRRDSASELRALSGLEVDPGEGWGRVVLISPRTVRFRVLSPGVREEGHVQNNGQNQARPARGVTGAGGWGSAAVCRGRALRGREPALPSASFPDVAACPGSLDCALKRRARCPPGAHACGPCLQPFQEDQQGLCVPRMRRPPGGGRPQPRLEDEIDFLAQELARKESGHSTPPLPKDRQRLPEPATLGFSARGQGLELGLPSTPGTPTPTPHTSLGSPVSSDPVHMSPLEPRGGQGDGLALVLILAFCVAGAAALSVASLCWCRLQREIRLTQKADYATAKAPGSPAAPRISPGDQRLAQSAEMYHYQHQRQQMLCLERHKEPPKELDTASSDEENEDGDFTVYECPGLAPTGEMEVRNPLFDHAALSAPLPAPSSPPALP

SEQ ID NO: 56053 - protein, 325 aa, Homo sapiens
  Payload ID: 11022
  Gene Symbol: NPDC1
  Gene Name: neural proliferation, differentiation and control, 1
  Uniprot ID: Q9NQX5
  ENSP ID: ENSP00000360660
MATPLPPPSPRHLRLLRLLLSGLVLGAALRGAAAGHPDVAACPGSLDCALKRRARCPPGAHACGPCLQPFQEDQQGLCVPRMRRPPGGGRPQPRLEDEIDFLAQELARKESGHSTPPLPKDRQRLPEPATLGFSARGQGLELGLPSTPGTPTPTPHTSLGSPVSSDPVHMSPLEPRGGQGDGLALVLILAFCVAGAAALSVASLCWCRLQREIRLTQKADYATAKAPGSPAAPRISPGDQRLAQSAEMYHYQHQRQQMLCLERHKEPPKELDTASSDEENEDGDFTVYECPGLAPTGEMEVRNPLFDHAALSAPLPAPSSPPALP

SEQ ID NO: 56054 - protein, 28 aa, Homo sapiens
  Payload ID: 11022
  Gene Symbol: NPDC1
  Gene Name: neural proliferation, differentiation and control, 1
  ENSP ID: ENSP00000481901
  MOD_RES (1)..(1): Any amino acid
XQMLCLERLGHWHLEGMGRTQRSPPTQA

SEQ ID NO: 56055 - protein, 98 aa, Homo sapiens
  Payload ID: 11023
  Gene Symbol: NRL
  Gene Name: neural retina leucine zipper
  Uniprot ID: P54845
  ENSP ID: ENSP00000380191
MSVRELNRQLRGCGRDEALRLKQRRRTLKNRGYAQACRSKRLQQRRGLEAERARLAAQLDALRAEVARLARERDLYKARCDRLTSSGPGSGDPSHLFL

SEQ ID NO: 56056 - protein, 237 aa, Homo sapiens
  Payload ID: 11023
  Gene Symbol: NRL
  Gene Name: neural retina leucine zipper
  Uniprot ID: P54845
  ENSP ID: ENSP00000380193
MALPPSPLAMEYVNDFDLMKFEVKREPSEGRPGPPTASLGSTPYSSVPPSPTFSEPGMVGATEGTRPGLEELYWLATLQQQLGAGEALGLSPEEAMELLQGQGPVPVDGPHGYYPGSPEETGAQHVQLAERFSDAALVSMSVRELNRQLRGCGRDEALRLKQRRRTLKNRGYAQACRSKRLQQRRGLEAERARLAAQLDALRAEVARLARERDLYKARCDRLTSSGPGSGDPSHLFL

SEQ ID NO: 56057 - protein, 237 aa, Homo sapiens; identical to SEQ ID NO: 56056
  Payload ID: 11023
  Gene Symbol: NRL
  Gene Name: neural retina leucine zipper
  Uniprot ID: P54845
  ENSP ID: ENSP00000380197

SEQ ID NO: 56058 - protein, 98 aa, Homo sapiens; identical to SEQ ID NO: 56055
  Payload ID: 11023
  Gene Symbol: NRL
  Gene Name: neural retina leucine zipper
  Uniprot ID: P54845
  ENSP ID: ENSP00000452966

SEQ ID NO: 56059 - protein, 237 aa, Homo sapiens; identical to SEQ ID NO: 56056
  Payload ID: 11023
  Gene Symbol: NRL
  Gene Name: neural retina leucine zipper
  Uniprot ID: P54845
  ENSP ID: ENSP00000454062

SEQ ID NO: 56060 - protein, 65 aa, Homo sapiens
  Payload ID: 11023
  Gene Symbol: NRL
  Gene Name: neural retina leucine zipper
  ENSP ID: ENSP00000454180
MALPPSPLAMEYVNDFDLMKFEVKREPSEGRPGPPTASLGSTPYSSVPPSPTFSEPGMVGATEGT

SEQ ID NO: 56061 - protein, 574 aa, Homo sapiens
  Payload ID: 11024
  Gene Symbol: NEURL1
  Gene Name: neuralized E3 ubiquitin protein ligase 1
  Uniprot ID: O76050
  ENSP ID: ENSP00000358795
MGNNFSSIPSLPRGNPSRAPRGHPQNLKDSIGGPFPVTSHRCHHKQKHCPAVLPSGGLPATPLLFHPHTKGSQILMDLSHKAVKRQASFCNAITFSNRPVLIYEQVRLKITKKQCCWSGALRLGFTSKDPSRIHPDSLPKYACPDLVSQSGFWAKALPEEFANEGNIIAFWVDKKGRVFHRINDSAVMLFFSGVRTADPLWALVDVYGLTRGVQLLDSELVLPDCLRPRSFTALRRPSLRREADDARLSVSLCDLNVPGADGDEAAPAAGCPIPQNSLNSQHSRALPAQLDGDLRFHALRAGAHVRILDEQTVARVEHGRDERALVFTSRPVRVAETIFVKVTRSGGARPGALSFGVTTCDPGTLRPADLPFSPEALVDRKEFWAVCRVPGPLHSGDILGLVVNADGELHLSHNGAAAGMQLCVDASQPLWMLFGLHGTITQIRILGSTILAERGIPSLPCSPASTPTSPSALGSRLSDPLLSTCSSGPLGSSAGGTAPNSPVSLPESPVTPGLGQWSDECTICYEHAVDTVIYTCGHMCLCYACGLRLKKALHACCPICRRPIKDIIKTYRSS

SEQ ID NO: 56062 - protein, 108 aa, Homo sapiens
  Payload ID: 11024
  Gene Symbol: NEURL1
  Gene Name: neuralized E3 ubiquitin protein ligase 1
  ENSP ID: ENSP00000387714
MDLSHKAVKRQASFCNAITFSNRPVLIYEQVRLKITKKQCCWSGALRLGFTSKDPSRIHPDSLPKYACPDLVSQSGFWAKALPEEFANEGNIIAFWVDKKGRVFHRIN

SEQ ID NO: 56063 - protein, 199 aa, Homo sapiens
  Payload ID: 11024
  Gene Symbol: NEURL1
  Gene Name: neuralized E3 ubiquitin protein ligase 1
  ENSP ID: ENSP00000416709
MGGQITRSTLHDSIGGPFPVTSHRCHHKQKHCPAVLPSGGLPATPLLFHPHTKGSQILMDLSHKAVKRQASFCNAITFSNRPVLIYEQVRLKITKKQCCWSGALRLGFTSKDPSRIHPDSLPKYACPDLVSQSGFWAKALPEEFANEGNIIAFWVDKKGRVFHRINDSAVMLFFSGVRTADPLWALVDVYGLTRGVQLL

SEQ ID NO: 56064 - protein, 555 aa, Homo sapiens
  Payload ID: 11025
  Gene Symbol: NEURL1B
  Gene Name: neuralized E3 ubiquitin protein ligase 1B
  Uniprot ID: A8MQ27
  ENSP ID: ENSP00000358815
MGNTVHRTLPDPSPPARLLATRPCCGPGPERRPVLGEAPRFHAQAKGKNVRLDGHSRRATRRNSFCNGVTFTQRPIRLYEQVRLRLVAVRPGWSGALRFGFTAHDPSLMSAQDIPKYACPDLVTRPGYWAKALPENLALRDTVLAYWADRHGRVFYSVNDGEPVLFHCGVAVGGPLWALIDVYGITDEVQLLESAFADTLTPARLSQARFSACLPPSSHDAANFDNNELENNQVVAKLGHLALGRAPGPPPADAAAAAIPCGPRERPRPASSPALLEADLRFHATRGPDVSLSADRKVACAPRPDGGRTLVFSERPLRPGESLFVEVGRPGLAAPGALAFGITSCDPGVLRPNELPADPDALLDRKEYWVVARAGPVPSGGDALSFTLRPGGDVLLGINGRPRGRLLCVDTTQALWAFFAVRGGVAGQLRLLGTLQSSPATTTPSGSLSGSQDDSDSDMTFSVNQSSSASESSLVTAPSSPLSPPVSPVFSPPEPAGIKNGECTVCFDGEVDTVIYTCGHMCLCHSCGLRLKRQARACCPICRRPIKDVIKIYRP

SEQ ID NO: 56065 - protein, 315 aa, Homo sapiens
  Payload ID: 11025
  Gene Symbol: NEURL1B
  Gene Name: neuralized E3 ubiquitin protein ligase 1B
  Uniprot ID: A8MQ27
  ENSP ID: ENSP00000429797
MGNTVHRTLPDPSPPARLLATRPCCGPGPERRPVLGEAPRFHAQAKGKNVRLDGHSRRATRRNSFCNGVTFTQRPIRLYEQVRLRLVAVRPGWSGALRFGFTAHDPSLMSAQDIPKYACPDLVTRPGYWAKALPENLALRDTVLAYWADRHGRVFYSVNDGEPVLFHCGVAVGGPLWALIDVYGITDEVQLLGTLQSSPATTTPSGSLSGSQDDSDSDMTFSVNQSSSASESSLVTAPSSPLSPPVSPVFSPPEPAGIKNGECTVCFDGEVDTVIYTCGHMCLCHSCGLRLKRQARACCPICRRPIKDVIKIYRP

SEQ ID NO: 56066 - protein, 373 aa, Homo sapiens
  Payload ID: 11025
  Gene Symbol: NEURL1B
  Gene Name: neuralized E3 ubiquitin protein ligase 1B
  Uniprot ID: A8MQ27
  ENSP ID: ENSP00000430001
MGNTVHRTLPESAFADTLTPARLSQARFSACLPPSSHDAANFDNNELENNQVVAKLGHLALGRAPGPPPADAAAAAIPCGPRERPRPASSPALLEADLRFHATRGPDVSLSADRKVACAPRPDGGRTLVFSERPLRPGESLFVEVGRPGLAAPGALAFGITSCDPGVLRPNELPADPDALLDRKEYWVVARAGPVPSGGDALSFTLRPGGDVLLGINGRPRGRLLCVDTTQALWAFFAVRGGVAGQLRLLGTLQSSPATTTPSGSLSGSQDDSDSDMTFSVNQSSSASESSLVTAPSSPLSPPVSPVFSPPEPAGIKNGECTVCFDGEVDTVIYTCGHMCLCHSCGLRLKRQARACCPICRRPIKDVIKIYRP

SEQ ID NO: 56067 - protein, 285 aa, Homo sapiens
  Payload ID: 11026
  Gene Symbol: NEURL2
  Gene Name: neuralized E3 ubiquitin protein ligase 2
  Uniprot ID: Q9BR09
  ENSP ID: ENSP00000361596
MAAASEPVDSGALWGLERPEPPPTRFHRVHGANIRVDPSGTRATRVESFAHGVCFSREPLAPGQVFLVEIEEKELGWCGHLRLGLTALDPASLAPVPEFSLPDLVNLGHTWVFAITRHHNRVPREGRPEAEAAAPSRPPTLLVEPYLRIEQFRIPRDRLVGRSRPGLYSHLLDQLYELNVLPPTARRSRLGVLFCPRPDGTADMHIIINGEDMGPSARGLPAAQPLYAVVDVFASTKSVRLVQLEYGLPSLQTLCRLVIQRSMVHRLAIDGLHLPKELKDFCKYE

SEQ ID NO: 56068 - protein, 90 aa, Homo sapiens
  Payload ID: 11026
  Gene Symbol: NEURL2
  Gene Name: neuralized E3 ubiquitin protein ligase 2
  ENSP ID: ENSP00000442383
  MOD_RES (1)..(1): Any amino acid
XDQLYELNVLPPTARRSRLGVLFCPRPDGTADMHIIINGEDMGPSARGLPAAQPLYAVVDVFASTKSVRLVQLEYGFFFPQCHPCRLCAA

SEQ ID NO: 56069 - protein, 262 aa, Homo sapiens
  Payload ID: 11027
  Gene Symbol: NEURL3
  Gene Name: neuralized E3 ubiquitin protein ligase 3
  Uniprot ID: Q96EH8
  ENSP ID: ENSP00000478591
MGAQLCFEANAKAPREALRFHAEAKGAQVRLDTRGCIAHRRTTFHDGIVFSQRPVRLGERVALRVLREESGWCGGLRVGFTRLDPACVSVPSLPPFLCPDLEEQSPTWAAVLPEGCALTGDLVRFWVDRRGCLFAKVNAGCRLLLREGVPVGAPLWAVMDVYGTTKAIELLDPTASRLPTPMPWDLSNKAVPEPKATPGEECAICFYHAANTRLVPCGHTYFCRYCAWRVFSDTAKCPVCRWQIEAVAPAQGPPALRVEEGS

SEQ ID NO: 56070 - protein, 128 aa, Homo sapiens
  Payload ID: 11027
  Gene Symbol: NEURL3
  Gene Name: neuralized E3 ubiquitin protein ligase 3
  ENSP ID: ENSP00000479456
MDVYGTTKAIELLDPTASRLPTPMPWDLSNKAVPEPKGFGPKDLALPTGNLKATWHLCLREHLPTLHTRRGVCHLLLSRCQHPPCALRPHILLQILCLAGLQRYGQVPCVPLADRGGSPCAGPSCSEG

SEQ ID NO: 56071 - protein, 104 aa, Homo sapiens
  Payload ID: 11027
  Gene Symbol: NEURL3
  Gene Name: neuralized E3 ubiquitin protein ligase 3
  ENSP ID: ENSP00000480933
MDVYGTTKAIELLDPTASRLPTPMPWDLSNKAVPEPKATPGEECAICFYHAANTRLVPCGHTYFCRYCAWRVFSDTAKCPVCRWQIEAVAPAQGPPALRVEEGS

SEQ ID NO: 56072 - protein, 1560 aa, Homo sapiens
  Payload ID: 11028
  Gene Symbol: NEURL4
  Gene Name: neuralized E3 ubiquitin protein ligase 4
  Uniprot ID: Q96JN8
  ENSP ID: ENSP00000319826
MAAGSGGSGGSGGGPGPGPGGGGGPSGSGSGPGSNGGLGSGGELHPRTGRLVSLSACGRTARRQQPGQEFNHGLVLSREPLRDGRVFTVRIDRKVNSWSGSIEIGVTALDPSVLDFPSSATGLKGGSWVVSGCSVLRDGRSVLEEYGQDLDQLGEGDRVGVERTVAGELRLWVNGRDCGVAATGLPPRVWAVVDLYGKCTQITVLPPEPGFSPPTPIPTPPLEPLAPTEDSALAEQGTSADEAFMVSPAQARPETFPNSLESHNDFANMELSEVVSNTILSAYNGGLLNVNLSSPPAGEGLGSSGAATSPILTSNDALLFHEKCGTLIKLSNNNKTAERRRPLDEFNNGVVMTNRPLRDNEMFEIRIDKLVDKWSGSIEIGVTTHNPNSLEYPATMTNLQSGTIMMSGCGILTNGKGTRREYCEFSLDELQEGDHIGLTRKSNSALHFFINGIDQGVATPLTPPVVYGVVDLYGMAVKVTIVHNNNHSDRLRRNNAILRALSPEGALRRAAPAAQAEPERLLFHPNCGQKAAITHEGRTALRPHATDDFNHGVVLSSRALRDGEVFQVRIDKMVDKWAGSIEIGVTTHNPAYLQLPSTMTNLRSGTWMMTGNGVMHNGTTILDEYGHNLDRLKAGDTVGVVRREDGTLHFFVNGMTQGPAAWNVPPGVYAVVDLYGQAAQATIVDDVEVAPVPEPLPEGNNQVSPSSPSSGAGGSDLRFHQLHGSNAVITNGGRTALRHNCRSEFNDAIVISNRALRDGELFEIVIQKMVDRWSGSIEAGVTAIRPEDLEFPNTMTDIDYDTWMLSGTAIMQDGNTMRNNYGCDLDALGTGARIGMMRTAKGDLHYFINGQDQGAACSGLPPEVYAVVDLYGQCVQVSITNATGPMDNSLATSNTATEKSFPLHSPVAGVAHRFHSTCGKNVTLEEDGTRAVRAAGYAHGLVFSTKELRAEEVFEVKVEELDEKWAGSLRLGLTTLAPGEMGPGAGGGGPGLPPSLPELRTKTTWMVSSCEVRRDGQLQRMNYGRNLERLGVGSRVGVRRGADDTMHILVDGEDMGPAATGIAKNVWAVLDLYGPVRGVSIVSSTRLEESEGTQPPSPSSDTGSEGEEDDEGEEHGLGGQNEVGIIPTTLEFLENHGKNILLSNGNRTATRVASYNQGIVVINQPLVPQLLVQVRIDFLNRQWTSSLVLGVITCAPERLNFPASACALKRAAWLLRGRGVFHNGLKICEKFGPNLDTCPEGTILGLRLDSSGGLHLHVNGVDQGVAVPDVPQPCHALVDLYGQCEQVTIVNPEPGAASGKSAGTQGDMEKADMVDGIKESVCWGPPPAASPLKSCEYHALCSRFQELLLLPEDYFMPPPKRSLCYCESCRKLRGDEAHRRRGEPPREYALPFGWCRFNLRVNPRLEAGTLTKKWHMAYHGSNVAAVRRVLDRGELGAGTASILSCRPLKGEPGVGFEEPGENCAPPREEQPPPVLLSPSLQYAGAETLASKVQFRDPKSQRTHQAQVAFQVCVRPGSYTPGPPSAALGEPPDPHFSPAELEWVTKEKGATLLCALLVRVE

SEQ ID NO: 56073 - protein, 1562 aa, Homo sapiens
  Payload ID: 11028
  Gene Symbol: NEURL4
  Gene Name: neuralized E3 ubiquitin protein ligase 4
  Uniprot ID: Q96JN8
  ENSP ID: ENSP00000382390
MAAGSGGSGGSGGGPGPGPGGGGGPSGSGSGPGSNGGLGSGGELHPRTGRLVSLSACGRTARRQQPGQEFNHGLVLSREPLRDGRVFTVRIDRKVNSWSGSIEIGVTALDPSVLDFPSSATGLKGGSWVVSGCSVLRDGRSVLEEYGQDLDQLGEGDRVGVERTVAGELRLWVNGRDCGVAATGLPPRVWAVVDLYGKCTQITVLPPEPGFSPPTPIPTPPLEPLAPTEDSALAEQGTSADEAFMVSPAQARPETFPNSLESHNDFANMELSEVVSNTILSAYNGGLLNVNLSSPPAGEGLGSSGAATSPILTSNDALLFHEKCGTLIKLSNNNKTAERRRPLDEFNNGVVMTNRPLRDNEMFEIRIDKLVDKWSGSIEIGVTTHNPNSLEYPATMTNLQSGTIMMSGCGILTNGKGTRREYCEFSLDELQEGDHIGLTRKSNSALHFFINGIDQGVATPLTPPVVYGVVDLYGMAVKVTIVHNNNHSDRLRRNNAILRALSPEGALRRAAPAAQAEPERLLFHPNCGQKAAITHEGRTALRPHATDDFNHGVVLSSRALRDGEVFQVRIDKMVDKWAGSIEIGVTTHNPAYLQLPSTMTNLRSGTWMMTGNGVMHNGTTILDEYGHNLDRLKAGDTVGVVRREDGTLHFFVNGMTQGPAAWNVPPGVYAVVDLYGQAAQATIVDDVEVAPVPEPLPEGNNQVSPSSPSSGAGGSDLRFHQLHGSNAVITNGGRTALRHNCRSEFNDAIVISNRALRDGELFEIVIQKMVDRWSGSIEAGVTAIRPEDLEFPNTMTDIDYDTWMLSGTAIMQDGNTMRNNYGCDLDALGTGARIGMMRTAKGDLHYFINGQDQGAACSGLPPGKEVYAVVDLYGQCVQVSITNATGPMDNSLATSNTATEKSFPLHSPVAGVAHRFHSTCGKNVTLEEDGTRAVRAAGYAHGLVFSTKELRAEEVFEVKVEELDEKWAGSLRLGLTTLAPGEMGPGAGGGGPGLPPSLPELRTKTTWMVSSCEVRRDGQLQRMNYGRNLERLGVGSRVGVRRGADDTMHILVDGEDMGPAATGIAKNVWAVLDLYGPVRGVSIVSSTRLEESEGTQPPSPSSDTGSEGEEDDEGEEHGLGGQNEVGIIPTTLEFLENHGKNILLSNGNRTATRVASYNQGIVVINQPLVPQLLVQVRIDFLNRQWTSSLVLGVITCAPERLNFPASACALKRAAWLLRGRGVFHNGLKICEKFGPNLDTCPEGTILGLRLDSSGGLHLHVNGVDQGVAVPDVPQPCHALVDLYGQCEQVTIVNPEPGAASGKSAGTQGDMEKADMVDGIKESVCWGPPPAASPLKSCEYHALCSRFQELLLLPEDYFMPPPKRSLCYCESCRKLRGDEAHRRRGEPPREYALPFGWCRFNLRVNPRLEAGTLTKKWHMAYHGSNVAAVRRVLDRGELGAGTASILSCRPLKGEPGVGFEEPGENCAPPREEQPPPVLLSPSLQYAGAETLASKVQFRDPKSQRTHQAQVAFQVCVRPGSYTPGPPSAALGEPPDPHFSPAELEWVTKEKGATLLCALLVRVE

SEQ ID NO: 56074 - protein, 1430 aa, Homo sapiens
  Payload ID: 11028
  Gene Symbol: NEURL4
  Gene Name: neuralized E3 ubiquitin protein ligase 4
  ENSP ID: ENSP00000458469
  MOD_RES (1)..(1): Any amino acid
XPGPGGGGGPSGSGSGPGSNGGLGSGGELHPRTGRLVSLSACGRTARRQQPGQEFNHGLVLSREPLRDGRVFTVRIDRKVNSWSGSIEIGVTALDPSVLDFPSSATGLKGGSWVVSGCSVLRDGRSVLEEYGQDLDQLGEGDRVGVERTVAGELRLWVNGRDCGVAATGLPPRVWAVVDLYGKCTQITVLPPEPGFSPPTPIPTPPLEPLAPTEDSALAEQGTSADEDFANMELSEVVSNTILSAYNGGLLNVNLSSPPAGEGLGSSGAATSPILTSNDALLFHEKCGTLIKLSNNNKTAERRRPLDEFNNGVVMTNRPLRDNEMFEIRIDKLVDKWSGSIEIGVTTHNPNSLEYPATMTNLQSGTIMMSGCGILTNGKGTRREYCEFSLDELQEGDHIGLTRKSNSALHFFINGIDQGVATPLTPPVVYGVVDLYGMAVKVTIVHNNNHSDRLRRNNAILRALSPEGALRRAAPAAQAEPERLLFHPNCGQKAAITHEGRTALRPHATDDFNHGVVLSSRALRDGEVFQVRIDKMVDKWAGSIEIGVTTHNPAYLQLPSTMTNLRSGTWMMTGNGVMHNGTTILDEYGHNLDRLKAGDTVGVVRREDGTLHFFVNGMTQGPAAWNVPPGVYAVVDLYGQAAQATIVDDVEVAPVPEPLPEGNNQVSPSSPSSGAGGSDLRFHQLHGSNAVITNGGRTALRHNCRSEFNDAIVISNRALRDGELFEIVIQKMVDRWSGSIEAGVTAIRPEDLEFPNTMTDIDYDTWMLSGTAIMQDGNTMRNNYGCDLDALGTGARIGMMRTAKGDLHYFINGQDQGAACSGLPPGKEVYAVVDLYGQCVQVSITNATGPMDNSLATSNTATEKSFPLHSPVAGVAHRFHSTCGKNVTLEEDGTRAVRAAGYAHGLVFSTKELRAEEVFEVKVEELDEKWAGSLRLGLTTLAPGEMGPGAGGGGPGLPPSLPELRTKTTWMVSSCEVRRDGQLQRMNYGRNLERLGVGSRVGVRRGADDTMHILVDGEDMGPAATGIAKNVWAVLDLYGPVRGVSIVSSTRLEESEGTQPPSPSSDTGSEGEEDDEGEEHGLGGQNEVGIIPTTLEFLENHGKNILLSNGNRTATRVASYNQGIVVINQPLVPQLLVQVRIDFLNRQWTSSLVLGVITCAPERLNFPASACALKRAAWLLRGRGVFHNGLKICEKFGPNLDTCPEGTILGLRLDSSGGLHLHVNGVDQGVAVPDVPQPCHALVDLYGQCEQVTIVNPEPGAASGKSAGTQGDMEKADMVDGIKESVCWGPPPAASPLKSCEYHALCSRFQELLLLPEDYFMPPPKRSLCYCESCRKLRGDEAHRRRGEPPREYALPFGWCRFNLRVNPRLEAGTLTKKWHMAYHGSNVAAVRRVLDRGELGAGTASILSCRPLKGEPGVGFEEPGENCAP

SEQ ID NO: 56075 - protein, 1538 aa, Homo sapiens
  Payload ID: 11028
  Gene Symbol: NEURL4
  Gene Name: neuralized E3 ubiquitin protein ligase 4
  ENSP ID: ENSP00000459978
MAAGSGGSGGSGGGPGPGPGGGGGPSGSGSGPGSNGGLGSGGELHPRTGRLVSLSACGRTARRQQPGQEFNHGLVLSREPLRDGRVFTVRIDRKVNSWSGSIEIGVTALDPSVLDFPSSATGLKGGSWVVSGCSVLRDGRSVLEEYGQDLDQLGEGDRVGVERTVAGELRLWVNGRDCGVAATGLPPRVWAVVDLYGKCTQITVLPPEPGFSPPTPIPTPPLEPLAPTEDSALAEQGTSADEDFANMELSEVVSNTILSAYNGGLLNVNLSSPPAGEGLGSSGAATSPILTSNDALLFHEKCGTLIKLSNNNKTAERRRPLDEFNNGVVMTNRPLRDNEMFEIRIDKLVDKWSGSIEIGVTTHNPNSLEYPATMTNLQSGTIMMSGCGILTNGKGTRREYCEFSLDELQEGDHIGLTRKSNSALHFFINGIDQGVATPLTPPVVYGVVDLYGMAVKVTIVHNNNHSDRLRRNNAILRALSPEGALRRAAPAAQAEPERLLFHPNCGQKAAITHEGRTALRPHATDDFNHGVVLSSRALRDGEVFQVRIDKMVDKWAGSIEIGVTTHNPAYLQLPSTMTNLRSGTWMMTGNGVMHNGTTILDEYGHNLDRLKAGDTVGVVRREDGTLHFFVNGMTQGPAAWNVPPGVYAVVDLYGQAAQATIVDDVEVAPVPEPLPEGNNQVSPSSPSSGAGGSDLRFHQLHGSNAVITNGGRTALRHNCRSEFNDAIVISNRALRDGELFEIVIQKMVDRWSGSIEAGVTAIRPEDLEFPNTMTDIDYDTWMLSGTAIMQDGNTMRNNYGCDLDALGTGARIGMMRTAKGDLHYFINGQDQGAACSGLPPEVYAVVDLYGQCVQVSITNATGPMDNSLATSNTATEKSFPLHSPVAGVAHRFHSTCGKNVTLEEDGTRAVRAAGYAHGLVFSTKELRAEEVFEVKVEELDEKWAGSLRLGLTTLAPGEMGPGAGGGGPGLPPSLPELRTKTTWMVSSCEVRRDGQLQRMNYGRNLERLGVGSRVGVRRGADDTMHILVDGEDMGPAATGIAKNVWAVLDLYGPVRGVSIVSSTRLEESEGTQPPSPSSDTGSEGEEDDEGEEHGLGGQNEVGIIPTTLEFLENHGKNILLSNGNRTATRVASYNQGIVVINQPLVPQLLVQVRIDFLNRQWTSSLVLGVITCAPERLNFPASACALKRAAWLLRGRGVFHNGLKICEKFGPNLDTCPEGTILGLRLDSSGGLHLHVNGVDQGVAVPDVPQPCHALVDLYGQCEQVTIVNPEPGAASGKSAGTQGDMEKADMVDGIKESVCWGPPPAASPLKSCEYHALCSRFQELLLLPEDYFMPPPKRSLCYCESCRKLRGDEAHRRRGEPPREYALPFGWCRFNLRVNPRLEAGTLTKKWHMAYHGSNVAAVRRVLDRGELGAGTASILSCRPLKGEPGVGFEEPGENCAPPREEQPPPVLLSPSLQYAGAETLASKVQFRDPKSQRTHQAQVAFQVCVRPGSYTPGPPSAALGEPPDPHFSPAELEWVTKEKGATLLCALLVRVE

SEQ ID NO: 56076 - protein, 1017 aa, Homo sapiens
  Payload ID: 11028
  Gene Symbol: NEURL4
  Gene Name: neuralized E3 ubiquitin protein ligase 4
  ENSP ID: ENSP00000460062
EPLAPTEDSALAEQGTSADEAFMVSPAQARPETFPNSLESHNGEGLGSSGAATSPILTSNDALLFHEKCGTLIKLSNNNKTAERRRPLDEFNNGVVMTNRPLRDNEMFEIRIDKLVDKWSGSIEIGVTTHNPNSLEYPATMTNLQSGTIMMSGCGILTNGKGTRREYCEFSLDELQEGDHIGLTRKSNSALHFFINGIDQGVATPLTPPVVYGVVDLYGMAVKVTIVHNNNHSDRLRRNNAILRALSPEGALRRAAPAAQAEPERLLFHPNCGQKAAITHEGRTALRPHATDDFNHGVVLSSRALRDGEVFQVRIDKMVDKWAGSIEIGVTTHNPAYLQLPSTMTNLRSGTWMMTGNGVMHNGTTILDEYGHNLDRLKAGDTVGVVRREDGTLHFFVNGMTQGPAAWNVPPGVYAVVDLYGQAAQATIVDDVEVAPVPEPLPEGNNQVSPSSPSSGAGGSDLRFHQLHGSNAVITNGGRTALRHNCRSEFNDAIVISNRALRDGELFEIVIQKMVDRWSGSIEAGVTAIRPEDLEFPNTMTDIDYDTWMLSGTAIMQDGNTMRNNYGCDLDALGTGARIGMMRTAKGDLHYFINGQDQGAACSGLPPGKEVYAVVDLYGQCVQVSITNATGPMDNSLATSNTATEKSFPLHSPVAGVAHRFHSTCGKNVTLEEDGTRAVRAAGYAHGLVFSTKELRAEEVFEVKVEELDEKWAGSLRLGLTTLAPGEMGPGAGGGGPGLPPSLPELRTKTTWMVSSCEVRRDGQLQRMNYGRNLERLGVGSRVGVRRGADDTMHILVDGEDMGPAATGIAKNVWAVLDLYGPVRGVSIVSSTRLEESEGTQPPSPSSDTGSEGEEDDEGEEHGLGGQNEVGIIPTTLEFLENHGKNILLSNGNRTATRVASYNQGIVVINQPLVPQLLVQVRIDFLNRQWTSSLVLGVITCAPERLNFPASACALKRAAWLLRGRGVFHNGLKPVSPPRSARSLGPIWTRALKAPSWDCGWTALGGCIFMLMGWTRG

SEQ ID NO: 56077 - protein, 249 aa, Homo sapiens
  Payload ID: 11028
  Gene Symbol: NEURL4
  Gene Name: neuralized E3 ubiquitin protein ligase 4
  ENSP ID: ENSP00000467514
EKCGTLIKLSNNNKTAERRRPLDEFNNGVVMTNRPLRDNEMFEIRIDKLVDKWSGSIEIGVTTHNPNSLEYPATMTNLQSGTIMMSGCGILTNGKGTRREYCEFSLDELQEGDHIGLTRKSNSALHFFINGIDQGVATPLTPPVVYGVVDLYGMAVKVTIVHNNNHSDRLRRNNAILRALSPEGALRRAAPAAQAEPERLLFHPNCGQKAAITHEGRTALRPHATDDFNHGVVLSSRALRDGEVFQGPG

SEQ ID NO: 56078 - protein, 645 aa, Homo sapiens
  Payload ID: 11029
  Gene Symbol: NRG1
  Gene Name: neuregulin 1
  Uniprot ID: Q02297
  ENSP ID: ENSP00000287842
MSERKEGRGKGKGKKKERGSGKKPESAAGSQSPALPPRLKEMKSQESAAGSKLVLRCETSSEYSSLRFKWFKNGNELNRKNKPQNIKIQKKPGKSELRINKASLADSGEYMCKVISKLGNDSASANITIVESNEIITGMPASTEGAYVSSESPIRISVSTEGANTSSSTSTSTTGTSHLVKCAEKEKTFCVNGGECFMVKDLSNPSRYLCKCPNEFTGDRCQNYVMASFYKHLGIEFMEAEELYQKRVLTITGICIALLVVGIMCVVAYCKTKKQRKKLHDRLRQSLRSERNNMMNIANGPHHPNPPPENVQLVNQYVSKNVISSEHIVEREAETSFSTSHYTSTAHHSTTVTQTPSHSWSNGHTESILSESHSVIVMSSVENSRHSSPTGGPRGRLNGTGGPRECNSFLRHARETPDSYRDSPHSERYVSAMTTPARMSPVDFHTPSSPKSPPSEMSPPVSSMTVSMPSMAVSPFMEEERPLLLVTPPRLREKKFDHHPQQFSSFHHNPAHDSNSLPASPLRIVEDEEYETTQEYEPAQEPVKKLANSRRAKRTKPNGHIANRLEVDSNTSSQSSNSESETEDERVGEDTPFLGIQNPLAASLEATPAFRLADSRTNPAGRFSTQEEIQARLSSVIANQDPIAV

SEQ ID NO: 56079 - protein, 637 aa, Homo sapiens
  Payload ID: 11029
  Gene Symbol: NRG1
  Gene Name: neuregulin 1
  Uniprot ID: Q02297
  ENSP ID: ENSP00000349275
MSERKEGRGKGKGKKKERGSGKKPESAAGSQSPALPPRLKEMKSQESAAGSKLVLRCETSSEYSSLRFKWFKNGNELNRKNKPQNIKIQKKPGKSELRINKASLADSGEYMCKVISKLGNDSASANITIVESNEIITGMPASTEGAYVSSESPIRISVSTEGANTSSSTSTSTTGTSHLVKCAEKEKTFCVNGGECFMVKDLSNPSRYLCKCPNEFTGDRCQNYVMASFYKAEELYQKRVLTITGICIALLVVGIMCVVAYCKTKKQRKKLHDRLRQSLRSERNNMMNIANGPHHPNPPPENVQLVNQYVSKNVISSEHIVEREAETSFSTSHYTSTAHHSTTVTQTPSHSWSNGHTESILSESHSVIVMSSVENSRHSSPTGGPRGRLNGTGGPRECNSFLRHARETPDSYRDSPHSERYVSAMTTPARMSPVDFHTPSSPKSPPSEMSPPVSSMTVSMPSMAVSPFMEEERPLLLVTPPRLREKKFDHHPQQFSSFHHNPAHDSNSLPASPLRIVEDEEYETTQEYEPAQEPVKKLANSRRAKRTKPNGHIANRLEVDSNTSSQSSNSESETEDERVGEDTPFLGIQNPLAASLEATPAFRLADSRTNPAGRFSTQEEIQARLSSVIANQDPIAV

SEQ ID NO: 56080 - protein, 640 aa, Homo sapiens
  Payload ID: 11029
  Gene Symbol: NRG1
  Gene Name: neuregulin 1
  Uniprot ID: Q02297
  ENSP ID: ENSP00000384620
MSERKEGRGKGKGKKKERGSGKKPESAAGSQSPALPPRLKEMKSQESAAGSKLVLRCETSSEYSSLRFKWFKNGNELNRKNKPQNIKIQKKPGKSELRINKASLADSGEYMCKVISKLGNDSASANITIVESNEIITGMPASTEGAYVSSESPIRISVSTEGANTSSSTSTSTTGTSHLVKCAEKEKTFCVNGGECFMVKDLSNPSRYLCKCQPGFTGARCTENVPMKVQNQEKAEELYQKRVLTITGICIALLVVGIMCVVAYCKTKKQRKKLHDRLRQSLRSERNNMMNIANGPHHPNPPPENVQLVNQYVSKNVISSEHIVEREAETSFSTSHYTSTAHHSTTVTQTPSHSWSNGHTESILSESHSVIVMSSVENSRHSSPTGGPRGRLNGTGGPRECNSFLRHARETPDSYRDSPHSERYVSAMTTPARMSPVDFHTPSSPKSPPSEMSPPVSSMTVSMPSMAVSPFMEEERPLLLVTPPRLREKKFDHHPQQFSSFHHNPAHDSNSLPASPLRIVEDEEYETTQEYEPAQEPVKKLANSRRAKRTKPNGHIANRLEVDSNTSSQSSNSESETEDERVGEDTPFLGIQNPLAASLEATPAFRLADSRTNPAGRFSTQEEIQARLSSVIANQDPIAV

SEQ ID NO: 56081 - protein, 135 aa, Homo sapiens
  Payload ID: 11029
  Gene Symbol: NRG1
  Gene Name: neuregulin 1
  ENSP ID: ENSP00000428411
MQIPKHISIEDITATSTSTTGTSHLVKCAEKEKTFCVNGGECFMVKDLSNPSRYLCKCPNEFTGDRCQNYVMASFYKAEELYQKRVLTITGICIALLVVGIMCVVAYCKTKKQRKKLHDRLRQSLRSERNNMMNI

SEQ ID NO: 56082 - protein, 101 aa, Homo sapiens
  Payload ID: 11029
  Gene Symbol: NRG1
  Gene Name: neuregulin 1
  ENSP ID: ENSP00000428546
MQIPKHISIEDITATSTSTTGTSHLVKCAEKEKTFCVNGGECFMVKDLSNPSRYLCKCPNEFTGDRCQNYVMASFYKHLGIEFMEAEELYQKRVLTITGIC

SEQ ID NO: 56083 - protein, 462 aa, Homo sapiens
  Payload ID: 11029
  Gene Symbol: NRG1
  Gene Name: neuregulin 1
  Uniprot ID: Q02297
  ENSP ID: ENSP00000428828
MSERKEGRGKGKGKKKERGSGKKPESAAGSQSPALPPRLKEMKSQESAAGSKLVLRCETSSEYSSLRFKWFKNGNELNRKNKPQNIKIQKKPGKSELRINKASLADSGEYMCKVISKLGNDSASANITIVESNEIITGMPASTEGAYVSSESPIRISVSTEGANTSSSTSTSTTGTSHLVKCAEKEKTFCVNGGECFMVKDLSNPSRYLCKCQPGFTGARCTENVPMKVQNQEKAEELYQKRVLTITGICIALLVVGIMCVVAYCKTKKQRKKLHDRLRQSLRSERNNMMNIANGPHHPNPPPENVQLVNQYVSKNVISSEHIVEREAETSFSTSHYTSTAHHSTTVTQTPSHSWSNGHTESILSESHSVIVMSSVENSRHSSPTGGPRGRLNGTGGPRECNSFLRHARETPDSYRDSPHSERHNLIAELRRNKAHRSKCMQIQLSATHLRSSSIPHLGFIL

SEQ ID NO: 56084 - protein, 713 aa, Homo sapiens
  Payload ID: 11029
  Gene Symbol: NRG1
  Gene Name: neuregulin 1
  ENSP ID: ENSP00000429067
VPSAGEPGEEAPYLVKVHQVWAVKAGGLKKDSLLTVRLGTWGHPAFPSCGRLKEDSRYIFFMEPDANSTSRAPAAFRASFPPLETGRNLKKEVSRVLCKRCALPPRLKEMKSQESAAGSKLVLRCETSSEYSSLRFKWFKNGNELNRKNKPQNIKIQKKPGKSELRINKASLADSGEYMCKVISKLGNDSASANITIVESNEIITGMPASTEGAYVSSESPIRISVSTEGANTSSSTSTSTTGTSHLVKCAEKEKTFCVNGGECFMVKDLSNPSRYLCKCPNEFTGDRCQNYVMASFYKHLGIEFMEAEELYQKRVLTITGICIALLVVGIMCVVAYCKTKKQRKKLHDRLRQSLRSERNNMMNIANGPHHPNPPPENVQLVNQYVSKNVISSEHIVEREAETSFSTSHYTSTAHHSTTVTQTPSHSWSNGHTESILSESHSVIVMSSVENSRHSSPTGGPRGRLNGTGGPRECNSFLRHARETPDSYRDSPHSERYVSAMTTPARMSPVDFHTPSSPKSPPSEMSPPVSSMTVSMPSMAVSPFMEEERPLLLVTPPRLREKKFDHHPQQFSSFHHNPAHDSNSLPASPLRIVEDEEYETTQEYEPAQEPVKKLANSRRAKRTKPNGHIANRLEVDSNTSSQSSNSESETEDERVGEDTPFLGIQNPLAASLEATPAFRLADSRTNPAGRFSTQEEIQARLSSVIANQDPIAV

SEQ ID NO: 56085 - protein, 590 aa, Homo sapiens
  Payload ID: 11029
  Gene Symbol: NRG1
  Gene Name: neuregulin 1
  Uniprot ID: Q02297
  ENSP ID: ENSP00000429582
MGKGRAGRVGTTALPPRLKEMKSQESAAGSKLVLRCETSSEYSSLRFKWFKNGNELNRKNKPQNIKIQKKPGKSELRINKASLADSGEYMCKVISKLGNDSASANITIVESNATSTSTTGTSHLVKCAEKEKTFCVNGGECFMVKDLSNPSRYLCKCPNEFTGDRCQNYVMASFYKHLGIEFMEAEELYQKRVLTITGICIALLVVGIMCVVAYCKTKKQRKKLHDRLRQSLRSERNNMMNIANGPHHPNPPPENVQLVNQYVSKNVISSEHIVEREAETSFSTSHYTSTAHHSTTVTQTPSHSWSNGHTESILSESHSVIVMSSVENSRHSSPTGGPRGRLNGTGGPRECNSFLRHARETPDSYRDSPHSERYVSAMTTPARMSPVDFHTPSSPKSPPSEMSPPVSSMTVSMPSMAVSPFMEEERPLLLVTPPRLREKKFDHHPQQFSSFHHNPAHDSNSLPASPLRIVEDEEYETTQEYEPAQEPVKKLANSRRAKRTKPNGHIANRLEVDSNTSSQSSNSESETEDERVGEDTPFLGIQNPLAASLEATPAFRLADSRTNPAGRFSTQEEIQARLSSVIANQDPIAV

SEQ ID NO: 56086 - protein, 481 aa, Homo sapiens
  Payload ID: 11029
  Gene Symbol: NRG1
  Gene Name: neuregulin 1
  ENSP ID: ENSP00000430053
MGKGRAGRVGTTALPPRLKEMKSQESAAGSKLVLRCETSSEYSSLRFKWFKNGNELNRKNKPQNIKIQKKPGKSELRINKASLADSGEYMCKVISKLGNDSASANITIVESNEIITGMPASTEGAYVSSATSTSTTGTSHLVKCAEKEKTFCVNGGECFMVKDLSNPSRYLCKCPNEFTGDRCQNYVMASFYKHLGIEFMEAEELYQKRVLTITGICIALLVVGIMCVVAYCKTKKQRKKLHDRLRQSLRSERNNMMNIANGPHHPNPPPENVQLVNQYVSKNVISSEHIVEREAETSFSTSHYTSTAHHSTTVTQTPSHSWSNGHTESILSESHSVIVMSSVENSRHSSPTGGPRGRLNGTGGPRECNSFLRHARETPDSYRDSPHSERYVSAMTTPARMSPVDFHTPSSPKSPPSEMSPPVSSMTVSMPSMAVSPFMEEERPLLLVTPPRLREKKFDHHPQQFSSFHHNPAHDSNSLPA

SEQ ID NO: 56087 - protein, 420 aa, Homo sapiens
  Payload ID: 11029
  Gene Symbol: NRG1
  Gene Name: neuregulin 1
  Uniprot ID: Q02297
  ENSP ID: ENSP00000430120
MSERKEGRGKGKGKKKERGSGKKPESAAGSQSPALPPRLKEMKSQESAAGSKLVLRCETSSEYSSLRFKWFKNGNELNRKNKPQNIKIQKKPGKSELRINKASLADSGEYMCKVISKLGNDSASANITIVESNEIITGMPASTEGAYVSSESPIRISVSTEGANTSSSTSTSTTGTSHLVKCAEKEKTFCVNGGECFMVKDLSNPSRYLCKCPNEFTGDRCQNYVMASFYKAEELYQKRVLTITGICIALLVVGIMCVVAYCKTKKQRKKLHDRLRQSLRSERNNMMNIANGPHHPNPPPENVQLVNQYVSKNVISSEHIVEREAETSFSTSHYTSTAHHSTTVTQTPSHSWSNGHTESILSESHSVIVMSSVENSRHSSPTGGPRGRLNGTGGPRECNSFLRHARETPDSYRDSPHSER

SEQ ID NO: 56088 - protein, 128 aa, Homo sapiens
  Payload ID: 11029
  Gene Symbol: NRG1
  Gene Name: neuregulin 1
  ENSP ID: ENSP00000430862
MQIPKHISIEDITATSTSTTGTSHLVKCAEKEKTFCVNGGECFMVKDLSNPSRYLCKCQPGFTGARCTENVPMKVQNQEKAEELYQKRVLTITGICIALLVVGIMCVVAYCKTKKQRKKLHDRLRQSL

SEQ ID NO: 56089 - protein, 126 aa, Homo sapiens
  Payload ID: 11029
  Gene Symbol: NRG1
  Gene Name: neuregulin 1
  ENSP ID: ENSP00000432052
  MOD_RES (1)..(1): Any amino acid
XASANITIVESNEIITGMPASTEGAYVSSESPIRISVSTEGANTSSSTSTSTTGTSHLVKCAEKEKTFCVNGGECFMVKDLSNPSRYLCKCQPGFTGARCTENVPMKVQNQESAQMSLLVIAAKTT

SEQ ID NO: 56090 - protein, 296 aa, Homo sapiens
  Payload ID: 11029
  Gene Symbol: NRG1
  Gene Name: neuregulin 1
  Uniprot ID: Q02297
  ENSP ID: ENSP00000433289
MEIYSPDMSEVAAERSSSPSTQLSADPSLDGLPAAEDMPEPQTEDGRTPGLVGLAVPCCACLEAERLRGCLNSEKICIVPILACLVSLCLCIAGLKWVFVDKIFEYDSPTHLDPGGLGQDPIISLDATAASAVWVSSEAYTSPVSRAQSESEVQVTVQGDKAVVSFEPSAAPTPKNRIFAFSFLPSTAPSFPSPTRNPEVRTPKSATQPQTTETNLQTAPKLSTSTSTTGTSHLVKCAEKEKTFCVNGGECFMVKDLSNPSRYLCKCPNEFTGDRCQNYVMASFYSTSTPFLSLPE

SEQ ID NO: 56091 - protein, 196 aa, Homo sapiens
  Payload ID: 11029
  Gene Symbol: NRG1
  Gene Name: neuregulin 1
  ENSP ID: ENSP00000433350
PQTEDGRTPGLVGLAVPCCACLEAERLRGCLNSEKICIVPILACLVSLCLCIAGLKWVFVDKIFEYDSPTHLDPGGLGQDPIISLDATAASAVWVSSEAYTSPVSRAQSESEVQVTVQGDKAVVSFEPSAAPTPKNRIFAFSFLPSTAPSFPSPTRNPEVRTPKSATQPQTTETNLQTAPKLCAQMSLLVIAAKTT

SEQ ID NO: 56092 - protein, 422 aa, Homo sapiens
  Payload ID: 11029
  Gene Symbol: NRG1
  Gene Name: neuregulin 1
  Uniprot ID: Q02297
  ENSP ID: ENSP00000434640
MRWRRAPRRSGRPGPRAQRPGSAARSSPPLPLLPLLLLLGTAALAPGAAAGNEAAPAGASVCYSSPPSVGSVQELAQRAAVVIEGKVHPQRRQQGALDRKAAAAAGEAGAWGGDREPPAAGPRALGPPAEEPLLAANGTVPSWPTAPVPSAGEPGEEAPYLVKVHQVWAVKAGGLKKDSLLTVRLGTWGHPAFPSCGRLKEDSRYIFFMEPDANSTSRAPAAFRASFPPLETGRNLKKEVSRVLCKRCALPPRLKEMKSQESAAGSKLVLRCETSSEYSSLRFKWFKNGNELNRKNKPQNIKIQKKPGKSELRINKASLADSGEYMCKVISKLGNDSASANITIVESNATSTSTTGTSHLVKCAEKEKTFCVNGGECFMVKDLSNPSRYLCKCPNEFTGDRCQNYVMASFYSTSTPFLSLPE

SEQ ID NO: 56093 - protein, 308 aa, Homo sapiens
  Payload ID: 11029
  Gene Symbol: NRG1
  Gene Name: neuregulin 1
  ENSP ID: ENSP00000439276
MQIPKHISIEDITATSTSTTGTSHLVKCAEKEKTFCVNGGECFMVKDLSNPSRYLCKCQPGFTGARCTENVPMKVQNQEKAEELYQKRVLTITGICIALLVVGIMCVVAYCKTKKQRKKLHDRLRQSLRSERNNMMNIANGPHHPNPPPENVQLVNQYVSKNVISSEHIVEREAETSFSTSHYTSTAHHSTTVTQTPSHSWSNGHTESILSESHSVIVMSSVENSRHSSPTGGPRGRLNGTGGPRECNSFLRHARETPDSYRDSPHSERHNLIAELRRNKAHRSKCMQIQLSATHLRSSSIPHLGFIL

SEQ ID NO: 56094 - protein, 254 aa, Homo sapiens [sequence omitted]

SEQ ID NO: 56095 - protein, 193 aa, Homo sapiens
  Payload ID: 11029
  Gene Symbol: NRG1
  Gene Name: neuregulin 1
  ENSP ID: ENSP00000486375
MKKRNEMIFLATLKNKALPPRLKEMKSQESAAGSKLVLRCETSSEYSSLRFKWFKNGNELNRKNKPQNIKIQKKPGKSELRINKASLADSGEYMCKVISKLGNDSASANITIVESNEIITGMPASTEGAYVSSESPIRISVSTEGANTSSSTSTSTTGTSHLVKCAEKEKTFCVNGGECFMVKDLSNPSRYLC

SEQ ID NO: 56096 - protein, 844 aa, Homo sapiens
  Payload ID: 11030
  Gene Symbol: NRG2
  Gene Name: neuregulin 2
  Uniprot ID: O14511
  ENSP ID: ENSP00000289409
MRQVCCSALPPPPLEKGRCSSYSDSSSSSSERSSSSSSSSSESGSSSRSSSNNSSISRPAAPPEPRPQQQPQPRSPAARRAAARSRAAAAGGMRRDPAPGFSMLLFGVSLACYSPSLKSVQDQAYKAPVVVEGKVQGLVPAGGSSSNSTREPPASGRVALVKVLDKWPLRSGGLQREQVISVGSCVPLERNQRYIFFLEPTEQPLVFKTAFAPLDTNGKNLKKEVGKILCTDCATRPKLKKMKSQTGQVGEKQSLKCEAAAGNPQPSYRWFKDGKELNRSRDIRIKYGNGRKNSRLQFNKVKVEDAGEYVCEAENILGKDTVRGRLYVNSVSTTLSSWSGHARKCNETAKSYCVNGGVCYYIEGINQLSCKCPVGYTGDRCQQFAMVNFSKAEELYQKRVLTITGICVALLVVGIVCVVAYCKTKKQRKQMHNHLRQNMCPAHQNRSLANGPSHPRLDPEEIQMADYISKNVPATDHVIRRETETTFSGSHSCSPSHHCSTATPTSSHRHESHTWSLERSESLTSDSQSGIMLSSVGTSKCNSPACVEARARRAAAYNLEERRRATAPPYHDSVDSLRDSPHSERYVSALTTPARLSPVDFHYSLATQVPTFEITSPNSAHAVSLPPAAPISYRLAEQQPLLRHPAPPGPGPGPGPGPGPGADMQRSYDSYYYPAAGPGPRRGTCALGGSLGSLPASPFRIPEDDEYETTQECAPPPPPRPRARGASRRTSAGPRRWRRSRLNGLAAQRARAARDSLSLSSGSGGGSASASDDDADDADGALAAESTPFLGLRGAHDALRSDSPPLCPAADSRTYYSLDSHSTRASSRHSRGPPPRAKQDSAPL

SEQ ID NO: 56097 - protein, 858 aa, Homo sapiens
  Payload ID: 11030
  Gene Symbol: NRG2
  Gene Name: neuregulin 2
  Uniprot ID: O14511
  ENSP ID: ENSP00000289422
MRQVCCSALPPPPLEKGRCSSYSDSSSSSSERSSSSSSSSSESGSSSRSSSNNSSISRPAAPPEPRPQQQPQPRSPAARRAAARSRAAAAGGMRRDPAPGFSMLLFGVSLACYSPSLKSVQDQAYKAPVVVEGKVQGLVPAGGSSSNSTREPPASGRVALVKVLDKWPLRSGGLQREQVISVGSCVPLERNQRYIFFLEPTEQPLVFKTAFAPLDTNGKNLKKEVGKILCTDCATRPKLKKMKSQTGQVGEKQSLKCEAAAGNPQPSYRWFKDGKELNRSRDIRIKYGNGRKNSRLQFNKVKVEDAGEYVCEAENILGKDTVRGRLYVNSVSTTLSSWSGHARKCNETAKSYCVNGGVCYYIEGINQLSCKCPNGFFGQRCLEKLPLRLYMPDPKQKHLGFELKEAEELYQKRVLTITGICVALLVVGIVCVVAYCKTKKQRKQMHNHLRQNMCPAHQNRSLANGPSHPRLDPEEIQMADYISKNVPATDHVIRRETETTFSGSHSCSPSHHCSTATPTSSHRHESHTWSLERSESLTSDSQSGIMLSSVGTSKCNSPACVEARARRAAAYNLEERRRATAPPYHDSVDSLRDSPHSERYVSALTTPARLSPVDFHYSLATQVPTFEITSPNSAHAVSLPPAAPISYRLAEQQPLLRHPAPPGPGPGPGPGPGPGADMQRSYDSYYYPAAGPGPRRGTCALGGSLGSLPASPFRIPEDDEYETTQECAPPPPPRPRARGASRRTSAGPRRWRRSRLNGLAAQRARAARDSLSLSSGSGGGSASASDDDADDADGALAAESTPFLGLRGAHDALRSDSPPLCPAADSRTYYSLDSHSTRASSRHSRGPPPRAKQDSAPL

SEQ ID NO: 56098 - protein, 647 aa, Homo sapiens
  Payload ID: 11030
  Gene Symbol: NRG2
  Gene Name: neuregulin 2
  Uniprot ID: O14511
  ENSP ID: ENSP00000342660
MSESRRRGRGRGKKHPEGRKREREPDPGEKATRPKLKKMKSQTGQVGEKQSLKCEAAAGNPQPSYRWFKDGKELNRSRDIRIKYGNGRKNSRLQFNKVKVEDAGEYVCEAENILGKDTVRGRLYVNSVSTTLSSWSGHARKCNETAKSYCVNGGVCYYIEGINQLSCKCPNGFFGQRCLEKLPLRLYMPDPKQKAEELYQKRVLTITGICVALLVVGIVCVVAYCKTKKQRKQMHNHLRQNMCPAHQNRSLANGPSHPRLDPEEIQMADYISKNVPATDHVIRRETETTFSGSHSCSPSHHCSTATPTSSHRHESHTWSLERSESLTSDSQSGIMLSSVGTSKCNSPACVEARARRAAAYNLEERRRATAPPYHDSVDSLRDSPHSERYVSALTTPARLSPVDFHYSLATQVPTFEITSPNSAHAVSLPPAAPISYRLAEQQPLLRHPAPPGPGPGPGPGPGPGADMQRSYDSYYYPAAGPGPRRGTCALGGSLGSLPASPFRIPEDDEYETTQECAPPPPPRPRARGASRRTSAGPRRWRRSRLNGLAAQRARAARDSLSLSSGSGGGSASASDDDADDADGALAAESTPFLGLRGAHDALRSDSPPLCPAADSRTYYSLDSHSTRASSRHSRGPPPRAKQDSAPL

SEQ ID NO: 56099 - protein, 852 aa, Homo sapiens
  Payload ID: 11030
  Gene Symbol: NRG2
  Gene Name: neuregulin 2
  Uniprot ID: O14511
  ENSP ID: ENSP00000351323
MRQVCCSALPPPPLEKGRCSSYSDSSSSSSERSSSSSSSSSESGSSSRSSSNNSSISRPAAPPEPRPQQQPQPRSPAARRAAARSRAAAAGGMRRDPAPGFSMLLFGVSLACYSPSLKSVQDQAYKAPVVVEGKVQGLVPAGGSSSNSTREPPASGRVALVKVLDKWPLRSGGLQREQVISVGSCVPLERNQRYIFFLEPTEQPLVFKTAFAPLDTNGKNLKKEVGKILCTDCATRPKLKKMKSQTGQVGEKQSLKCEAAAGNPQPSYRWFKDGKELNRSRDIRIKYGNGRKNSRLQFNKVKVEDAGEYVCEAENILGKDTVRGRLYVNSVSTTLSSWSGHARKCNETAKSYCVNGGVCYYIEGINQLSCKCPVGYTGDRCQQFAMVNFSKHLGFELKEAEELYQKRVLTITGICVALLVVGIVCVVAYCKTKKQRKQMHNHLRQNMCPAHQNRSLANGPSHPRLDPEEIQMADYISKNVPATDHVIRRETETTFSGSHSCSPSHHCSTATPTSSHRHESHTWSLERSESLTSDSQSGIMLSSVGTSKCNSPACVEARARRAAAYNLEERRRATAPPYHDSVDSLRDSPHSERYVSALTTPARLSPVDFHYSLATQVPTFEITSPNSAHAVSLPPAAPISYRLAEQQPLLRHPAPPGPGPGPGPGPGPGADMQRSYDSYYYPAAGPGPRRGTCALGGSLGSLPASPFRIPEDDEYETTQECAPPPPPRPRARGASRRTSAGPRRWRRSRLNGLAAQRARAARDSLSLSSGSGGGSASASDDDADDADGALAAESTPFLGLRGAHDALRSDSPPLCPAADSRTYYSLDSHSTRASSRHSRGPPPRAKQDSAPL

SEQ ID NO: 56100 - protein, 850 aa, Homo sapiens
  Payload ID: 11030
  Gene Symbol: NRG2
  Gene Name: neuregulin 2
  Uniprot ID: O14511
  ENSP ID: ENSP00000354910
MRQVCCSALPPPPLEKGRCSSYSDSSSSSSERSSSSSSSSSESGSSSRSSSNNSSISRPAAPPEPRPQQQPQPRSPAARRAAARSRAAAAGGMRRDPAPGFSMLLFGVSLACYSPSLKSVQDQAYKAPVVVEGKVQGLVPAGGSSSNSTREPPASGRVALVKVLDKWPLRSGGLQREQVISVGSCVPLERNQRYIFFLEPTEQPLVFKTAFAPLDTNGKNLKKEVGKILCTDCATRPKLKKMKSQTGQVGEKQSLKCEAAAGNPQPSYRWFKDGKELNRSRDIRIKYGNGRKNSRLQFNKVKVEDAGEYVCEAENILGKDTVRGRLYVNSVSTTLSSWSGHARKCNETAKSYCVNGGVCYYIEGINQLSCKCPNGFFGQRCLEKLPLRLYMPDPKQKAEELYQKRVLTITGICVALLVVGIVCVVAYCKTKKQRKQMHNHLRQNMCPAHQNRSLANGPSHPRLDPEEIQMADYISKNVPATDHVIRRETETTFSGSHSCSPSHHCSTATPTSSHRHESHTWSLERSESLTSDSQSGIMLSSVGTSKCNSPACVEARARRAAAYNLEERRRATAPPYHDSVDSLRDSPHSERYVSALTTPARLSPVDFHYSLATQVPTFEITSPNSAHAVSLPPAAPISYRLAEQQPLLRHPAPPGPGPGPGPGPGPGADMQRSYDSYYYPAAGPGPRRGTCALGGSLGSLPASPFRIPEDDEYETTQECAPPPPPRPRARGASRRTSAGPRRWRRSRLNGLAAQRARAARDSLSLSSGSGGGSASASDDDADDADGALAAESTPFLGLRGAHDALRSDSPPLCPAADSRTYYSLDSHSTRASSRHSRGPPPRAKQDSAPL

SEQ ID NO: 56101 - protein, 426 aa, Homo sapiens
  Payload ID: 11030
  Gene Symbol: NRG2
  Gene Name: neuregulin 2
  Uniprot ID: O14511
  ENSP ID: ENSP00000367483
MRQVCCSALPPPPLEKGRCSSYSDSSSSSSERSSSSSSSSSESGSSSRSSSNNSSISRPAAPPEPRPQQQPQPRSPAARRAAARSRAAAAGGMRRDPAPGFSMLLFGVSLACYSPSLKSVQDQAYKAPVVVEGKVQGLVPAGGSSSNSTREPPASGRVALVKVLDKWPLRSGGLQREQVISVGSCVPLERNQRYIFFLEPTEQPLVFKTAFAPLDTNGKNLKKEVGKILCTDCATRPKLKKMKSQTGQVGEKQSLKCEAAAGNPQPSYRWFKDGKELNRSRDIRIKYGNGRKNSRLQFNKVKVEDAGEYVCEAENILGKDTVRGRLYVNSVSTTLSSWSGHARKCNETAKSYCVNGGVCYYIEGINQLSCKCPNGFFGQRCLEKLPLRLYMPDPKQSVLWDTPGTGVSSSQWSTSPKPRSCTRRGS

SEQ ID NO: 56102 - protein, 784 aa, Homo sapiens
  Payload ID: 11030
  Gene Symbol: NRG2
  Gene Name: neuregulin 2
  ENSP ID: ENSP00000444235
MRQVCCSALPPPPLEKGRCSSYSDSSSSSSERSSSSSSSSSESGSSSRSSSNNSSISRPAAPPEPRPQQQPQPRSPAARRAAARSRAAAAGGMRRDPAPGFSMLLFGVSLACYSPSLKSVQDQAYKAPVVVEGKVQGLVPAGGSSSNSTREPPASGRVALVKVLDKWPLRSGGLQREQVISVGSCVPLERNQRYIFFLEPTEQPLVFKTAFAPLDTNGKNLKKEVGKILCTDCATRPKLKKMKSQTGQVGEKQSLKCEAAAGNPQPSYRWFKDGKELNRSRDIRIKYGNGRKNSRLQFNKVKVEDAGEYVCEAENILGKDTVRGRLYVNSEAEELYQKRVLTITGICVALLVVGIVCVVAYCKTKKQRKQMHNHLRQNMCPAHQNRSLANGPSHPRLDPEEIQMADYISKNVPATDHVIRRETETTFSGSHSCSPSHHCSTATPTSSHRHESHTWSLERSESLTSDSQSGIMLSSVGTSKCNSPACVEARARRAAAYNLEERRRATAPPYHDSVDSLRDSPHSERYVSALTTPARLSPVDFHYSLATQVPTFEITSPNSAHAVSLPPAAPISYRLAEQQPLLRHPAPPGPGPGPGPGPGPGADMQRSYDSYYYPAAGPGPRRGTCALGGSLGSLPASPFRIPEDDEYETTQECAPPPPPRPRARGASRRTSAGPRRWRRSRLNGLAAQRARAARDSLSLSSGSGGGSASASDDDADDADGALAAESTPFLGLRGAHDALRSDSPPLCPAADSRTYYSLDSHSTRASSRHSRGPPPRAKQDSAPL

SEQ ID NO: 56103 - protein, 696 aa, Homo sapiens
  Payload ID: 11031
  Gene Symbol: NRG3
  Gene Name: neuregulin 3
  Uniprot ID: P56975
  ENSP ID: ENSP00000361214
MSEGAAAASPPGAASAAAASAEEGTAAAAAAAAAGGGPDGGGEGAAEPPRELRCSDCIVWNRQQTWLCVVPLFIGFIGLGLSLMLLKWIVVGSVKEYVPTDLVDSKGMGQDPFFLSKPSSFPKAMETTTTTTSTTSPATPSAGGAASSRTPNRISTRLTTITRAPTRFPGHRVPIRASPRSTTARNTAAPATVPSTTAPFFSSSTLGSRPPVPGTPSTQAMPSWPTAAYATSSYLHDSTPSWTLSPFQDAASSSSSSSSSATTTTPETSTSPKFHTTTYSTERSEHFKPCRDKDLAYCLNDGECFVIETLTGSHKHCRCKEGYQGVRCDQFLPKTDSILSDPTDHLGIEFMESEEVYQRQVLSISCIIFGIVIVGMFCAAFYFKSKKQAKQIQEQLKVPQNGKSYSLKASSTMAKSENLVKSHVQLQNYSKVERHPVTALEKMMESSFVGPQSFPEVPSPDRGSQSVKHHRSLSSCCSPGQRSGMLHRNAFRRTPPSPRSRLGGIVGPAYQQLEESRIPDQDTIPCQGYSSSGLKTQRNTSINMQLPSRETNPYFNSLEQKDLVGYSSTRASSVPIIPSVGLEETCLQMPGISEVKSIKWCKNSYSADVVNVSIPVSDCLIAEQQEVKILLETVQEQIRILTDARRSEDYELASVETEDSASENTAFLPLSPTAKSEREAQFVLRNEIQRDSALTK

SEQ ID NO: 56104 - protein, 499 aa, Homo sapiens
  Payload ID: 11031
  Gene Symbol: NRG3
  Gene Name: neuregulin 3
  Uniprot ID: P56975
  ENSP ID: ENSP00000361215
MECGIPPTLVCVGRGGGLHTINIIIWYYFPSAWRTCFNISSSVGLLLTNSYKFYTTTYSTERSEHFKPCRDKDLAYCLNDGECFVIETLTGSHKHCRCKEGYQGVRCDQFLPKTDSILSDPTDHLGIEFMESEEVYQRQVLSISCIIFGIVIVGMFCAAFYFKSKKQAKQIQEQLKVPQNGKSYSLKASSTMAKSENLVKSHVQLQNYSKVERHPVTALEKMMESSFVGPQSFPEVPSPDRGSQSVKHHRSLSSCCSPGQRSGMLHRNAFRRTPPSPRSRLGGIVGPAYQQLEESRIPDQDTIPCQGIEVRKTISHLPIQLWCVERPLDLKYSSSGLKTQRNTSINMQLPSRETNPYFNSLEQKDLVGYSSTRASSVPIIPSVGLEETCLQMPGISEVKSIKWCKNSYSADVVNVSIPVSDCLIAEQQEVKILLETVQEQIRILTDARRSEDYELASVETEDSASENTAFLPLSPTAKSEREAQFVLRNEIQRDSALTK

SEQ ID NO: 56105 - protein, 720 aa, Homo sapiens
  Payload ID: 11031
  Gene Symbol: NRG3
  Gene Name: neuregulin 3
  Uniprot ID: P56975
  ENSP ID: ENSP00000384796
MSEGAAAASPPGAASAAAASAEEGTAAAAAAAAAGGGPDGGGEGAAEPPRELRCSDCIVWNRQQTWLCVVPLFIGFIGLGLSLMLLKWIVVGSVKEYVPTDLVDSKGMGQDPFFLSKPSSFPKAMETTTTTTSTTSPATPSAGGAASSRTPNRISTRLTTITRAPTRFPGHRVPIRASPRSTTARNTAAPATVPSTTAPFFSSSTLGSRPPVPGTPSTQAMPSWPTAAYATSSYLHDSTPSWTLSPFQDAASSSSSSSSSATTTTPETSTSPKFHTTTYSTERSEHFKPCRDKDLAYCLNDGECFVIETLTGSHKHCRCKEGYQGVRCDQFLPKTDSILSDPTDHLGIEFMESEEVYQRQVLSISCIIFGIVIVGMFCAAFYFKSKKQAKQIQEQLKVPQNGKSYSLKASSTMAKSENLVKSHVQLQNYSKVERHPVTALEKMMESSFVGPQSFPEVPSPDRGSQSVKHHRSLSSCCSPGQRSGMLHRNAFRRTPPSPRSRLGGIVGPAYQQLEESRIPDQDTIPCQGIEVRKTISHLPIQLWCVERPLDLKYSSSGLKTQRNTSINMQLPSRETNPYFNSLEQKDLVGYSSTRASSVPIIPSVGLEETCLQMPGISEVKSIKWCKNSYSADVVNVSIPVSDCLIAEQQEVKILLETVQEQIRILTDARRSEDYELASVETEDSASENTAFLPLSPTAKSEREAQFVLRNEIQRDSALTK

SEQ ID NO: 56106 - protein, 500 aa, Homo sapiens
  Payload ID: 11031
  Gene Symbol: NRG3
  Gene Name: neuregulin 3
  ENSP ID: ENSP00000385804
MECGIPPTLVCVGRGGGLHTVGVFHVLSQLISLCTIPEVFKEKPKINIIIWYYFPSAWRTCFNISSSVGLLLTNSYKFYTTTYSTERSEHFKPCRDKDLAYCLNDGECFVIETLTGSHKHCRCKEGYQGVRCDQFLPKTDSILSDPTDHLGIEFMESEEVYQRQVLSISCIIFGIVIVGMFCAAFYFKSKKQAKQIQEQLKVPQNGKSYSLKASSTMAKSENLVKSHVQLQNYSKVERHPVTALEKMMESSFVGPQSFPEVPSPDRGSQSVKHHRSLSSCCSPGQRSGMLHRNAFRRTPPSPRSRLGGIVGPAYQQLEESRIPDQDTIPCQGYSSSGLKTQRNTSINMQLPSRETNPYFNSLEQKDLVGYSSTRASSVPIIPSVGLEETCLQMPGISEVKSIKWCKNSYSADVVNVSIPVSDCLIAEQQEVKILLETVQEQIRILTDARRSEDYELASVETEDSASENTAFLPLSPTAKSEREAQFVLRNEIQRDSALTK

SEQ ID NO: 56107 - protein, 346 aa, Homo sapiens
  Payload ID: 11031
  Gene Symbol: NRG3
  Gene Name: neuregulin 3
  ENSP ID: ENSP00000440377
MESEEVYQRQVLSISCIIFGIVIVGMFCAAFYFKSKKQAKQIQEQLKVPQNGKSYSLKASSTMAKSENLVKSHVQLQNYSKVERHPVTALEKMMESSFVGPQSFPEVPSPDRGSQSVKHHRSLSSCCSPGQRSGMLHRNAFRRTPPSPRSRLGGIVGPAYQQLEESRIPDQDTIPCQGYSSSGLKTQRNTSINMQLPSRETNPYFNSLEQKDLVGYSSTRASSVPIIPSVGLEETCLQMPGISEVKSIKWCKNSYSADVVNVSIPVSDCLIAEQQEVKILLETVQEQIRILTDARRSEDYELASVETEDSASENTAFLPLSPTAKSEREAQFVLRNEIQRDSALTK

SEQ ID NO: 56108 - protein, 346 aa, Homo sapiens; identical to SEQ ID NO: 56107
  Payload ID: 11031
  Gene Symbol: NRG3
  Gene Name: neuregulin 3
  ENSP ID: ENSP00000441201

SEQ ID NO: 56109 - protein, 526 aa, Homo sapiens
  Payload ID: 11031
  Gene Symbol: NRG3
  Gene Name: neuregulin 3
  ENSP ID: ENSP00000451376
MECGIPPTLVCVGRGGGLHTVGVFHVLSQLISLCTIPEVFKEKPKINIIIWYYFPSAWRTCFNISSSVGLLLTNSYKFCPRDRRHAIHGNMGKTRVVRRQKQEQDTTTYSTERSEHFKPCRDKDLAYCLNDGECFVIETLTGSHKHCRCKEGYQGVRCDQFLPKTDSILSDPTDHLGIEFMESEEVYQRQVLSISCIIFGIVIVGMFCAAFYFKSKKQAKQIQEQLKVPQNGKSYSLKASSTMAKSENLVKSHVQLQNYSKVERHPVTALEKMMESSFVGPQSFPEVPSPDRGSQSVKHHRSLSSCCSPGQRSGMLHRNAFRRTPPSPRSRLGGIVGPAYQQLEESRIPDQDTIPCQGYSSSGLKTQRNTSINMQLPSRETNPYFNSLEQKDLVGYSSTRASSVPIIPSVGLEETCLQMPGISEVKSIKWCKNSYSADVVNVSIPVSDCLIAEQQEVKILLETVQEQIRILTDARRSEDYELASVETEDSASENTAFLPLSPTAKSEREAQFVLRNEIQRDSALTK

SEQ ID NO: 56110 - protein, 76 aa, Homo sapiens
  Payload ID: 11031
  Gene Symbol: NRG3
  Gene Name: neuregulin 3
  ENSP ID: ENSP00000451858
MECGIPPTLVCVGRGGGLHTVGVFHVLSQLISLCTIPEVFKEKPKIRRHIPQSDPSTSNPAETRTLHTVSMMASAL

SEQ ID NO: 56111 - protein, 54 aa, Homo sapiens
  Payload ID: 11031
  Gene Symbol: NRG3
  Gene Name: neuregulin 3
  ENSP ID: ENSP00000473669
MECGIPPTLVCVGRGGGLHTVFQRQKLLYELIATSPFWFHLRSSLQKPLSTFWN

SEQ ID NO: 56112 - protein, 115 aa, Homo sapiens
  Payload ID: 11032
  Gene Symbol: NRG4
  Gene Name: neuregulin 4
  Uniprot ID: Q8WWG1
  ENSP ID: ENSP00000378367
MPTDHEEPCGPSHKSFCLNGGLCYVIPTIPSPFCRCVENYTGARCEEVFLPGSSIQTKSNLFEAFVALAVLVTLIIGAFYFLCRKGHFQRASSVQYDINLVETSSTSAHHSHEQH

SEQ ID NO: 56113 - protein, 35 aa, Homo sapiens
  Payload ID: 11032
  Gene Symbol: NRG4
  Gene Name: neuregulin 4
  ENSP ID: ENSP00000431810
MPTDHEEPCGPSHKSFCLNGGLCYVIPTIPSPFCS

SEQ ID NO: 56114 - protein, 36 aa, Homo sapiens
  Payload ID: 11032
  Gene Symbol: NRG4
  Gene Name: neuregulin 4
  ENSP ID: ENSP00000432751
MPTDHEEPCGPSHKSFCLNGGLCYVIPTIPSPFCRK

SEQ ID NO: 56115 - protein, 36 aa, Homo sapiens; identical to SEQ ID NO: 56114
  Payload ID: 11032
  Gene Symbol: NRG4
  Gene Name: neuregulin 4
  ENSP ID: ENSP00000436832

SEQ ID NO: 56116 - protein, 36 aa, Homo sapiens; identical to SEQ ID NO: 56114
  Payload ID: 11032
  Gene Symbol: NRG4
  Gene Name: neuregulin 4
  ENSP ID: ENSP00000454895

SEQ ID NO: 56117 - protein, 110 aa, Homo sapiens
  Payload ID: 11032
  Gene Symbol: NRG4
  Gene Name: neuregulin 4
  ENSP ID: ENSP00000455167
MPTDHEEPCGPSHKSFCLNGGLCYVIPTIPSPFCRCVENYTGARCEEVFLPGSSIQTKSNLFEAFVALAVLVTLIIGAFYFLCRKGHFQRASSVQYDINLVETSSTSAHH

SEQ ID NO: 56118 - protein, 90 aa, Homo sapiens
  Payload ID: 11032
  Gene Symbol: NRG4
  Gene Name: neuregulin 4
  ENSP ID: ENSP00000455314
MPTDHEEPCGPSHKSFCLNGGLCYVIPTIPSPFCRCVENYTGARCEEVFLPGSSIQTKSNLFEAFVALAVLVTLIIGAFYFLCRCGNTCM

SEQ ID NO: 56119 - protein, 36 aa, Homo sapiens; identical to SEQ ID NO: 56114
  Payload ID: 11032
  Gene Symbol: NRG4
  Gene Name: neuregulin 4
  ENSP ID: ENSP00000456029

SEQ ID NO: 56120 - protein, 36 aa, Homo sapiens; identical to SEQ ID NO: 56114
  Payload ID: 11032
  Gene Symbol: NRG4
  Gene Name: neuregulin 4
  ENSP ID: ENSP00000456778

SEQ ID NO: 56121 - protein, 115 aa, Homo sapiens; identical to SEQ ID NO: 56112
  Payload ID: 11032
  Gene Symbol: NRG4
  Gene Name: neuregulin 4
  Uniprot ID: Q8WWG1
  ENSP ID: ENSP00000457335

SEQ ID NO: 56122 - protein, 36 aa, Homo sapiens; identical to SEQ ID NO: 56114
  Payload ID: 11032
  Gene Symbol: NRG4
  Gene Name: neuregulin 4
  ENSP ID: ENSP00000457626

SEQ ID NO: 56123 - protein, 35 aa, Homo sapiens; identical to SEQ ID NO: 56113
  Payload ID: 11032
  Gene Symbol: NRG4
  Gene Name: neuregulin 4
  ENSP ID: ENSP00000457838

SEQ ID NO: 56124 - protein, 146 aa, Homo sapiens
  Payload ID: 11033
  Gene Symbol: NRSN1
  Gene Name: neurensin 1
  ENSP ID: ENSP00000367736
MSSCSNVCGSRQAQAAAEGGYQRYGVRSYLHQFYEDCTASIWEYEDDFQIQRSPNRWSSVFWKQELGFHTSSHSQEWNRKLQHKNCPRCCFGSLSPPGEALLCRHWDWPYHPKAPGCSAEPGGGPFQSIPTLLCGPKRGCFASSEL

SEQ ID NO: 56125 - protein, 172 aa, Homo sapiens
  Payload ID: 11033
  Gene Symbol: NRSN1
  Gene Name: neurensin 1
  ENSP ID: ENSP00000367738
MSSCSNVCGSRQAQAAAEGGYQRYGVRSYLHQFYEDCTASIWEYEDDFQIQRSPNRWSSVFWKVGLISGTVFVILGLTVLAVGFLVPPKIEAFGEADFVVVDTHAVQFNSALDMYKLAGAVLFCIGGTSMAGCLLMSVFVKSYSKEEKFLQQKFKERIADIKAHTQPVTKAP

SEQ ID NO: 56126 - protein, 195 aa, Homo sapiens
  Payload ID: 11033
  Gene Symbol: NRSN1
  Gene Name: neurensin 1
  Uniprot ID: Q8IZ57
  ENSP ID: ENSP00000367739
MSSCSNVCGSRQAQAAAEGGYQRYGVRSYLHQFYEDCTASIWEYEDDFQIQRSPNRWSSVFWKVGLISGTVFVILGLTVLAVGFLVPPKIEAFGEADFVVVDTHAVQFNSALDMYKLAGAVLFCIGGTSMAGCLLMSVFVKSYSKEEKFLQQKFKERIADIKAHTQPVTKAPGPGETKIPVTLSRVQNVQPLLAT

SEQ ID NO: 56127 - protein, 195 aa, Homo sapiens; identical to SEQ ID NO: 56126
  Payload ID: 11033
  Gene Symbol: NRSN1
  Gene Name: neurensin 1
  Uniprot ID: Q8IZ57
  ENSP ID: ENSP00000367752

SEQ ID NO: 56128 - protein, 204 aa, Homo sapiens
  Payload ID: 11034
  Gene Symbol: NRSN2
  Gene Name: neurensin 2
  Uniprot ID: Q9GZP1
  ENSP ID: ENSP00000371722
MMPSCNRSCSCSRGPSVEDGKWYGVRSYLHLFYEDCAGTALSDDPEGPPVLCPRRPWPSLCWKISLSSGTLLLLLGVAALTTGYAVPPKLEGIGEGEFLVLDQRAADYNQALGTCRLAGTALCVAAGVLLAICLFWAMIGWLSQDTKAEPLDPEADSHVEVFGDEPEQQLSPIFRNASGQSWFSPPASPFGQSSVQTIQPKRDS

SEQ ID NO: 56129 - protein, 204 aa, Homo sapiens; identical to SEQ ID NO: 56128
  Payload ID: 11034
  Gene Symbol: NRSN2
  Gene Name: neurensin 2
  Uniprot ID: Q9GZP1
  ENSP ID: ENSP00000371728

SEQ ID NO: 56130 - protein, 69 aa, Homo sapiens
  Payload ID: 11034
  Gene Symbol: NRSN2
  Gene Name: neurensin 2
  ENSP ID: ENSP00000476543
  MOD_RES (1)..(1): Any amino acid
XLHLFYEDCAGTALSDDPEGPPVLCPRRPWPSLCWKISLSSGTLLLLLGVAALTTGYAVPPKLEGIGEG

SEQ ID NO: 56131 - protein, 161 aa, Homo sapiens
  Payload ID: 11034
  Gene Symbol: NRSN2
  Gene Name: neurensin 2
  ENSP ID: ENSP00000476925
MMPSCNRSCSCSRGPSVEDGKWYGVRSYLHLFYEDCAGTALSDDPEGPPVLCPRRPWPSLCWKISLSSGTLLLLLGVAALTTGYAVPPKLEGIGEGEFLVLDQRAADYNQALGTCRLAGTALCVAAGVLLAICLFWAMIGWLSQDTKAEPLDPEADSHVEV

SEQ ID NO: 56132 - protein, 113 aa, Homo sapiens
  Payload ID: 11034
  Gene Symbol: NRSN2
  Gene Name: neurensin 2
  ENSP ID: ENSP00000477135
MMPSCNRSCSCSRGPSVEDGKWYGVRSYLHLFYEDCAGTALSDDPEGPPVLCPRRPWPSLCWKISLSSGTLLLLLGVAALTTGYAVPPKLEGIGEGWLSQDTKAEPLDPEADS

SEQ ID NO: 56133 - protein, 82 aa, Homo sapiens
  Payload ID: 11034
  Gene Symbol: NRSN2
  Gene Name: neurensin 2
  ENSP ID: ENSP00000477183
MMPSCNRSCSCSRGPSVEDGKWYGVRSYLHLFYEDCAGTALSDDPEGPPVLCPRRPWPSLCWKEMELNFSPLECGLDSATCF

SEQ ID NO: 56134 - protein, 116 aa, Homo sapiens
  Payload ID: 11034
  Gene Symbol: NRSN2
  Gene Name: neurensin 2
  ENSP ID: ENSP00000477349
MMPSCNRSCSCSRGPSVEDGKWYGVRSYLHLFYEDCAGTALSDDPEGPPVLCPRRPWPSLCWKISLSSGTLLLLLGVAALTTGYAVPPKLEGIGEGWLSQDTKAEPLDPEADSHVE

SEQ ID NO: 56135 - protein, 65 aa, Homo sapiens
  Payload ID: 11034
  Gene Symbol: NRSN2
  Gene Name: neurensin 2
  ENSP ID: ENSP00000479642
MMPSCNRSCSCSRGPSVEDGKWYGVRSYLHLFYEDCAGTALSDDPEGPPVLCPRRPWPSLCWKMR

SEQ ID NO: 56136 - protein, 204 aa, Homo sapiens; identical to SEQ ID NO: 56128
  Payload ID: 11034
  Gene Symbol: NRSN2
  Gene Name: neurensin 2
  Uniprot ID: Q9GZP1
  ENSP ID: ENSP00000482706

SEQ ID NO: 56137 - protein, 442 aa, Homo sapiens
  Payload ID: 11035
  Gene Symbol: NRXN1
  Gene Name: neurexin 1
  Uniprot ID: P58400
  ENSP ID: ENSP00000341184
MYQRMLRCGAELGSPGGGGGGGGGGGAGGRLALLWIVPLTLSGLLGVAWGASSLGAHHIHHFHGSSKHHSVPIAIYRSPASLRGGHAGTTYIFSKGGGQITYKWPPNDRPSTRADRLAIGFSTVQKEAVLVRVDSSSGLGDYLELHIHQGKIGVKFNVGTDDIAIEESNAIINDGKYHVVRFTRSGGNATLQVDSWPVIERYPAGRQLTIFNSQATIIIGGKEQGQPFQGQLSGLYYNGLKVLNMAAENDANIAIVGNVRLVGEVPSSMTTESTATAMQSEMSTSIMETTTTLATSTARRGKPPTKEPISQTTDDILVASAECPSDDEDIDPCEPSSGGLANPTRAGGREPYPGSAEVIRESSSTTGMVVGIVAAAALCILILLYAMYKYRNRDEGSYHVDESRNYISNSAQSNGAVVKEKQPSSAKSSNKNKKNKDKEYYV

SEQ ID NO: 56138 - protein, 142 aa, Homo sapiens
  Payload ID: 11035
  Gene Symbol: NRXN1
  Gene Name: neurexin 1
  ENSP ID: ENSP00000367510
MDMRWHCENLQTTDDILVASAECPSDDEDIDPCEPSSGGLANPTRAGGREPYPGSAEVIRESSSTTGMVVGIVAAAALCILILLYAMYKYRNRDEGSYHVDESRNYISNSAQSNGAVVKEKQPSSAKSSNKNKKNKDKEYYV

SEQ ID NO: 56139 - protein, 1477 aa, Homo sapiens
  Payload ID: 11035
  Gene Symbol: NRXN1
  Gene Name: neurexin 1
  Uniprot ID: Q9ULB1
  ENSP ID: ENSP00000384311
MGTALLQRGGCFLLCLSLLLLGCWAELGSGLEFPGAEGQWTRFPKWNACCESEMSFQLKTRSARGLVLYFDDEGFCDFLELILTRGGRLQLSFSIFCAEPATLLADTPVNDGAWHSVRIRRQFRNTTLFIDQVEAKWVEVKSKRRDMTVFSGLFVGGLPPELRAAALKLTLASVREREPFKGWIRDVRVNSSQVLPVDSGEVKLDDEPPNSGGGSPCEAGEEGEGGVCLNGGVCSVVDDQAVCDCSRTGFRGKDCSQEDNNVEGLAHLMMGDQGKSKGKEEYIATFKGSEYFCYDLSQNPIQSSSDEITLSFKTLQRNGLMLHTGKSADYVNLALKNGAVSLVINLGSGAFEALVEPVNGKFNDNAWHDVKVTRNLRQHSGIGHAMVTISVDGILTTTGYTQEDYTMLGSDDFFYVGGSPSTADLPGSPVSNNFMGCLKEVVYKNNDVRLELSRLAKQGDPKMKIHGVVAFKCENVATLDPITFETPESFISLPKWNAKKTGSISFDFRTTEPNGLILFSHGKPRHQKDAKHPQMIKVDFFAIEMLDGHLYLLLDMGSGTIKIKALLKKVNDGEWYHVDFQRDGRSGTISVNTLRTPYTAPGESEILDLDDELYLGGLPENKAGLVFPTEVWTALLNYGYVGCIRDLFIDGQSKDIRQMAEVQSTAGVKPSCSKETAKPCLSNPCKNNGMCRDGWNRYVCDCSGTGYLGRSCEREATVLSYDGSMFMKIQLPVVMHTEAEDVSLRFRSQRAYGILMATTSRDSADTLRLELDAGRVKLTVNLDCIRINCNSSKGPETLFAGYNLNDNEWHTVRVVRRGKSLKLTVDDQQAMTGQMAGDHTRLEFHNIETGIITERRYLSSVPSNFIGHLQSLTFNGMAYIDLCKNGDIDYCELNARFGFRNIIADPVTFKTKSSYVALATLQAYTSMHLFFQFKTTSLDGLILYNSGDGNDFIVVELVKGYLHYVFDLGNGANLIKGSSNKPLNDNQWHNVMISRDTSNLHTVKIDTKITTQITAGARNLDLKSDLYIGGVAKETYKSLPKLVHAKEGFQGCLASVDLNGRLPDLISDALFCNGQIERGCEGPSTTCQEDSCSNQGVCLQQWDGFSCDCSMTSFSGPLCNDPGTTYIFSKGGGQITYKWPPNDRPSTRADRLAIGFSTVQKEAVLVRVDSSSGLGDYLELHIHQGKIGVKFNVGTDDIAIEESNAIINDGKYHVVRFTRSGGNATLQVDSWPVIERYPAGRQLTIFNSQATIIIGGKEQGQPFQGQLSGLYYNGLKVLNMAAENDANIAIVGNVRLVGEVPSSMTTESTATAMQSEMSTSIMETTTTLATSTARRGKPPTKEPISQTTDDILVASAECPSDDEDIDPCEPSSGGLANPTRAGGREPYPGSAEVIRESSSTTGMVVGIVAAAALCILILLYAMYKYRNRDEGSYHVDESRNYISNSAQSNGAVVKEKQPSSAKSSNKNKKNKDKEYYV

SEQ ID NO: 56140 - protein, 1507 aa, Homo sapiens
  Payload ID: 11035
  Gene Symbol: NRXN1
  Gene Name: neurexin 1
  ENSP ID: ENSP00000385017
MGTALLQRGGCFLLCLSLLLLGCWAELGSGLEFPGAEGQWTRFPKWNACCESEMSFQLKTRSARGLVLYFDDEGFCDFLELILTRGGRLQLSFSIFCAEPATLLADTPVNDGAWHSVRIRRQFRNTTLFIDQVEAKWVEVKSKRRDMTVFSGLFVGGLPPELRAAALKLTLASVREREPFKGWIRDVRVNSSQVLPVDSGEVKLDDEPPNSGGGSPCEAGEEGEGGVCLNGGVCSVVDDQAVCDCSRTGFRGKDCSQEDNNVEGLAHLMMGDQGKSKGKEEYIATFKGSEYFCYDLSQNPIQSSSDEITLSFKTLQRNGLMLHTGKSADYVNLALKNGAVSLVINLGSGAFEALVEPVNGKFNDNAWHDVKVTRNLRQHSGIGHAMVTISVDGILTTTGYTQEDYTMLGSDDFFYVGGSPSTADLPGSPVSNNFMGCLKEVVYKNNDVRLELSRLAKQGDPKMKIHGVVAFKCENVATLDPITFETPESFISLPKWNAKKTGSISFDFRTTEPNGLILFSHGKPRHQKDAKHPQMIKVDFFAIEMLDGHLYLLLDMGSGTIKIKALLKKVNDGEWYHVDFQRDGRSGTISVNTLRTPYTAPGESEILDLDDELYLGGLPENKAGLVFPTEVWTALLNYGYVGCIRDLFIDGQSKDIRQMAEVQSTAGVKPSCSKETAKPCLSNPCKNNGMCRDGWNRYVCDCSGTGYLGRSCEREATVLSYDGSMFMKIQLPVVMHTEAEDVSLRFRSQRAYGILMATTSRDSADTLRLELDAGRVKLTVNLDCIRINCNSSKGPETLFAGYNLNDNEWHTVRVVRRGKSLKLTVDDQQAMTGQMAGDHTRLEFHNIETGIITERRYLSSVPSNFIGHLQSLTFNGMAYIDLCKNGDIDYCELNARFGFRNIIADPVTFKTKSSYVALATLQAYTSMHLFFQFKTTSLDGLILYNSGDGNDFIVVELVKGYLHYVFDLGNGANLIKGSSNKPLNDNQWHNVMISRDTSNLHTVKIDTKITTQITAGARNLDLKSDLYIGGVAKETYKSLPKLVHAKEGFQGCLASVDLNGRLPDLISDALFCNGQIERGCEGPSTTCQEDSCSNQGVCLQQWDGFSCDCSMTSFSGPLCNDPGTTYIFSKGGGQITYKWPPNDRPSTRADRLAIGFSTVQKEAVLVRVDSSSGLGDYLELHIHQGKIGVKFNVGTDDIAIEESNAIINDGKYHVVRFTRSGGNATLQVDSWPVIERYPAGNNDNERLAIARQRIPYRLGRVVDEWLLDKGRQLTIFNSQATIIIGGKEQGQPFQGQLSGLYYNGLKVLNMAAENDANIAIVGNVRLVGEVPSSMTTESTATAMQSEMSTSIMETTTTLATSTARRGKPPTKEPISQTTDDILVASAECPSDDEDIDPCEPSSGGLANPTRAGGREPYPGSAEVIRESSSTTGMVVGIVAAAALCILILLYAMYKYRNRDEGSYHVDESRNYISNSAQSNGAVVKEKQPSSAKSSNKNKKNKDKEYYV

SEQ ID NO: 56141 - protein, 1547 aa, Homo sapiens
  Payload ID: 11035
  Gene Symbol: NRXN1
  Gene Name: neurexin 1
  Uniprot ID: Q9ULB1
  ENSP ID: ENSP00000385142
MGTALLQRGGCFLLCLSLLLLGCWAELGSGLEFPGAEGQWTRFPKWNACCESEMSFQLKTRSARGLVLYFDDEGFCDFLELILTRGGRLQLSFSIFCAEPATLLADTPVNDGAWHSVRIRRQFRNTTLFIDQVEAKWVEVKSKRRDMTVFSGLFVGGLPPELRAAALKLTLASVREREPFKGWIRDVRVNSSQVLPVDSGEVKLDDEPPNSGGGSPCEAGEEGEGGVCLNGGVCSVVDDQAVCDCSRTGFRGKDCSQEIKFGLQCVLPVLLHDNDQGKYCCINTAKPLTEKDNNVEGLAHLMMGDQGKSKGKEEYIATFKGSEYFCYDLSQNPIQSSSDEITLSFKTLQRNGLMLHTGKSADYVNLALKNGAVSLVINLGSGAFEALVEPVNGKFNDNAWHDVKVTRNLRQHSGIGHAMVNKLHCSVTISVDGILTTTGYTQEDYTMLGSDDFFYVGGSPSTADLPGSPVSNNFMGCLKEVVYKNNDVRLELSRLAKQGDPKMKIHGVVAFKCENVATLDPITFETPESFISLPKWNAKKTGSISFDFRTTEPNGLILFSHGKPRHQKDAKHPQMIKVDFFAIEMLDGHLYLLLDMGSGTIKIKALLKKVNDGEWYHVDFQRDGRSGTISVNTLRTPYTAPGESEILDLDDELYLGGLPENKAGLVFPTEVWTALLNYGYVGCIRDLFIDGQSKDIRQMAEVQSTAGVKPSCSKETAKPCLSNPCKNNGMCRDGWNRYVCDCSGTGYLGRSCEREATVLSYDGSMFMKIQLPVVMHTEAEDVSLRFRSQRAYGILMATTSRDSADTLRLELDAGRVKLTVNLDCIRINCNSSKGPETLFAGYNLNDNEWHTVRVVRRGKSLKLTVDDQQAMTGQMAGDHTRLEFHNIETGIITERRYLSSVPSNFIGHLQSLTFNGMAYIDLCKNGDIDYCELNARFGFRNIIADPVTFKTKSSYVALATLQAYTSMHLFFQFKTTSLDGLILYNSGDGNDFIVVELVKGYLHYVFDLGNGANLIKGSSNKPLNDNQWHNVMISRDTSNLHTVKIDTKITTQITAGARNLDLKSDLYIGGVAKETYKSLPKLVHAKEGFQGCLASVDLNGRLPDLISDALFCNGQIERGCEGPSTTCQEDSCSNQGVCLQQWDGFSCDCSMTSFSGPLCNDPGTTYIFSKGGGQITYKWPPNDRPSTRADRLAIGFSTVQKEAVLVRVDSSSGLGDYLELHIHQGKIGVKFNVGTDDIAIEESNAIINDGKYHVVRFTRSGGNATLQVDSWPVIERYPAGNNDNERLAIARQRIPYRLGRVVDEWLLDKGRQLTIFNSQATIIIGGKEQGQPFQGQLSGLYYNGLKVLNMAAENDANIAIVGNVRLVGEVPSSMTTESTATAMQSEMSTSIMETTTTLATSTARRGKPPTKEPISQTTDDILVASAECPSDDEDIDPCEPSSGGLANPTRAGGREPYPGSAEVIRESSSTTGMVVGIVAAAALCILILLYAMYKYRNRDEGSYHVDESRNYISNSAQSNGAVVKEKQPSSAKSSNKNKKNKDKEYYV

SEQ ID NO: 56142 - protein, 278 aa, Homo sapiens
  Payload ID: 11035
  Gene Symbol: NRXN1
  Gene Name: neurexin 1
  ENSP ID: ENSP00000385310
MGTALLQRGGCFLLCLSLLLLGCWAELGSGLEFPGAEGQWTRFPKWNACCESEMSFQLKTRSARGLVLYFDDEGFCDFLELILTRGGRLQLSFSIFCAEPATLLADTPVNDGAWHSVRIRRQFRNTTLFIDQVEAKWVEVKSKRRDMTVFSGLFVGGLPPELRAAALKLTLASVREREPFKGWIRDVRVNSSQVLPVDSGEVKLDDEPPNSGGGSPCEAGEEGEGGVCLNGGVCSVVDDQAVCDCSRTGFRGKDCSQEDNNVEGLAHLMMGDQGKSKD

SEQ ID NO: 56143 - protein, 836 aa, Homo sapiens
  Payload ID: 11035
  Gene Symbol: NRXN1
  Gene Name: neurexin 1
  ENSP ID: ENSP00000385434
GKEEYIATFKGSEYFCYDLSQNPIQSSSDEITLSFKTLQRNGLMLHTGKSADYVNLALKNGAVSLVINLGSGAFEALVEPVNGKFNDNAWHDVKVTRNLRQVTISVDGILTTTGYTQEDYTMLGSDDFFYVGGSPSTADLPGSPVSNNFMGCLKEVVYKNNDVRLELSRLAKQGDPKMKIHGVVAFKCENVATLDPITFETPESFISLPKWNAKKTGSISFDFRTTEPNGLILFSHGKPRHQKDAKHPQMIKVDFFAIEMLDGHLYLLLDMGSGTIKIKALLKKVNDGEWYHVDFQRDGRSGTISVNTLRTPYTAPGESEILDLDDELYLGGLPENKAGLVFPTEVWTALLNYGYVGCIRDLFIDGQSKDIRQMAEVQSTAGVKPSCSKETAKPCLSNPCKNNGMCRDGWNRYVCDCSGTGYLGRSCEREATVLSYDGSMFMKIQLPVVMHTEAEDVSLRFRSQRAYGILMATTSRDSADTLRLELDAGRVKLTVNLDCIRINCNSSKGPETLFAGYNLNDNEWHTVRVVRRGKSLKLTVDDQQAMTGQMAGDHTRLEFHNIETGIITERRYLSSVPSNFIGHLQSLTFNGMAYIDLCKNGDIDYCELNARFGFRNIIADPVTFKTKSSYVALATLQAYTSMHLFFQFKTTSLDGLILYNSGDGNDFIVVELVKGYLHYVFDLGNGANLIKGSSNKPLNDNQWHNVMISRDTSNLHTVKIDTKITTQITAGARNLDLKSDLYIGGVAKETYKSLPKLVHAKEGFQGCLASVDLNGRLPDLISDALFCNGQIERGCEGPSTTCQEDSCSNQGVCLQQWDGFSCDCSMTSFSGPLCND

SEQ ID NO: 56144 - protein, 472 aa, Homo sapiens
  Payload ID: 11035
  Gene Symbol: NRXN1
  Gene Name: neurexin 1
  ENSP ID: ENSP00000385580
MYQRMLRCGAELGSPGGGGGGGGGGGAGGRLALLWIVPLTLSGLLGVAWGASSLGAHHIHHFHGSSKHHSVPIAIYRSPASLRGGHAGTTYIFSKGGGQITYKWPPNDRPSTRADRLAIGFSTVQKEAVLVRVDSSSGLGDYLELHIHQGKIGVKFNVGTDDIAIEESNAIINDGKYHVVRFTRSGGNATLQVDSWPVIERYPAGNNDNERLAIARQRIPYRLGRVVDEWLLDKGRQLTIFNSQATIIIGGKEQGQPFQGQLSGLYYNGLKVLNMAAENDANIAIVGNVRLVGEVPSSMTTESTATAMQSEMSTSIMETTTTLATSTARRGKPPTKEPISQTTDDILVASAECPSDDEDIDPCEPSSGGLANPTRAGGREPYPGSAEVIRESSSTTGMVVGIVAAAALCILILLYAMYKYRNRDEGSYHVDESRNYISNSAQSNGAVVKEKQPSSAKSSNKNKKNKDKEYYV

SEQ ID NO: 56145 - protein, 851 aa, Homo sapiens
  Payload ID: 11035
  Gene Symbol: NRXN1
  Gene Name: neurexin 1
  ENSP ID: ENSP00000385681
GKEEYIATFKGSEYFCYDLSQNPIQSSSDEITLSFKTLQRNGLMLHTGKSADYVNLALKNGAVSLVINLGSGAFEALVEPVNGKFNDNAWHDVKVTRNLRQHSGIGHAMVNKLHCSVTISVDGILTTTGYTQEDYTMLGSDDFFYVGGSPSTADLPGSPVSNNFMGCLKEVVYKNNDVRLELSRLAKQGDPKMKIHGVVAFKCENVATLDPITFETPESFISLPKWNAKKTGSISFDFRTTEPNGLILFSHGKPRHQKDAKHPQMIKVDFFAIEMLDGHLYLLLDMGSGTIKIKALLKKVNDGEWYHVDFQRDGRSGTISVNTLRTPYTAPGESEILDLDDELYLGGLPENKAGLVFPTEVWTALLNYGYVGCIRDLFIDGQSKDIRQMAEVQSTAGVKPSCSKETAKPCLSNPCKNNGMCRDGWNRYVCDCSGTGYLGRSCEREATVLSYDGSMFMKIQLPVVMHTEAEDVSLRFRSQRAYGILMATTSRDSADTLRLELDAGRVKLTVNLDCIRINCNSSKGPETLFAGYNLNDNEWHTVRVVRRGKSLKLTVDDQQAMTGQMAGDHTRLEFHNIETGIITERRYLSSVPSNFIGHLQSLTFNGMAYIDLCKNGDIDYCELNARFGFRNIIADPVTFKTKSSYVALATLQAYTSMHLFFQFKTTSLDGLILYNSGDGNDFIVVELVKGYLHYVFDLGNGANLIKGSSNKPLNDNQWHNVMISRDTSNLHTVKIDTKITTQITAGARNLDLKSDLYIGGVAKETYKSLPKLVHAKEGFQGCLASVDLNGRLPDLISDALFCNGQIERGCEGPSTTCQEDSCSNQGVCLQQWDGFSCDCSMTSFSGPLCND

SEQ ID NO: 56146 - protein, 139 aa, Homo sapiens
  Payload ID: 11035
  Gene Symbol: NRXN1
  Gene Name: neurexin 1
  ENSP ID: ENSP00000396738
MDMRWHCENLQTTDDILVASAECPSDDEDIDPCEPSSANPTRAGGREPYPGSAEVIRESSSTTGMVVGIVAAAALCILILLYAMYKYRNRDEGSYHVDESRNYISNSAQSNGAVVKEKQPSSAKSSNKNKKNKDKEYYV

SEQ ID NO: 56147 - protein, 1495 aa, Homo sapiens
  Payload ID: 11035
  Gene Symbol: NRXN1
  Gene Name: neurexin 1
  ENSP ID: ENSP00000434015
MGTALLQRGGCFLLCLSLLLLGCWAELGSGLEFPGAEGQWTRFPKWNACCESEMSFQLKTRSARGLVLYFDDEGFCDFLELILTRGGRLQLSFSIFCAEPATLLADTPVNDGAWHSVRIRRQFRNTTLFIDQVEAKWVEVKSKRRDMTVFSGLFVGGLPPELRAAALKLTLASVREREPFKGWIRDVRVNSSQVLPVDSGEVKLDDEPPNSGGGSPCEAGEEGEGGVCLNGGVCSVVDDQAVCDCSRTGFRGKDCSQEDNNVEGLAHLMMGDQGKEEYIATFKGSEYFCYDLSQNPIQSSSDEITLSFKTLQRNGLMLHTGKSADYVNLALKNGAVSLVINLGSGAFEALVEPVNGKFNDNAWHDVKVTRNLRQVTISVDGILTTTGYTQEDYTMLGSDDFFYVGGSPSTADLPGSPVSNNFMGCLKEVVYKNNDVRLELSRLAKQGDPKMKIHGVVAFKCENVATLDPITFETPESFISLPKWNAKKTGSISFDFRTTEPNGLILFSHGKPRHQKDAKHPQMIKVDFFAIEMLDGHLYLLLDMGSGTIKIKALLKKVNDGEWYHVDFQRDGRSGTISVNTLRTPYTAPGESEILDLDDELYLGGLPENKAGLVFPTEVWTALLNYGYVGCIRDLFIDGQSKDIRQMAEVQSTAGVKPSCSKETAKPCLSNPCKNNGMCRDGWNRYVCDCSGTGYLGRSCEREATVLSYDGSMFMKIQLPVVMHTEAEDVSLRFRSQRAYGILMATTSRDSADTLRLELDAGRVKLTVNLDCIRINCNSSKGPETLFAGYNLNDNEWHTVRVVRRGKSLKLTVDDQQAMTGQMAGDHTRLEFHNIETGIITERRYLSSVPSNFIGHLQSLTFNGMAYIDLCKNGDIDYCELNARFGFRNIIADPVTFKTKSSYVALATLQAYTSMHLFFQFKTTSLDGLILYNSGDGNDFIVVELVKGYLHYVFDLGNGANLIKGSSNKPLNDNQWHNVMISRDTSNLHTVKIDTKITTQITAGARNLDLKSDLYIGGVAKETYKSLPKLVHAKEGFQGCLASVDLNGRLPDLISDALFCNGQIERGCEGPSTTCQEDSCSNQGVCLQQWDGFSCDCSMTSFSGPLCNDPGTTYIFSKGGGQITYKWPPNDRPSTRADRLAIGFSTVQKEAVLVRVDSSSGLGDYLELHIHQGKIGVKFNVGTDDIAIEESNAIINDGKYHVVRFTRSGGNATLQVDSWPVIERYPAGNNDNERLAIARQRIPYRLGRVVDEWLLDKGRQLTIFNSQATIIIGGKEQGQPFQGQLSGLYYNGLKVLNMAAENDANIAIVGNVRLVGEVPSSMTTESTATAMQSEMSTSIMETTTTLATSTARRGKPPTKEPISQTTDDILVASAECPSDDEDIDPCEPSSGGLANPTRAGGREPYPGSAEVIRESSSTTGMVVGIVAAAALCILILLYAMYKYRNRDEGSYHVDESRNYISNSAQSNGAVVKEKQPSSAKSSNKNKKNKDKEYYV

SEQ ID NO: 56148 - protein, 198 aa, Homo sapiens
  Payload ID: 11035
  Gene Symbol: NRXN1
  Gene Name: neurexin 1
  ENSP ID: ENSP00000483634
MAAENDANIAIVGNVRLVGEVPSSMTTESTATAMQSEMSTSIMETTTTLATSTARRGKPPTKEPISQTTDDILVASAECPSDDEDIDPCEPSSGGLANPTRAGGREPYPGSAEVIRESSSTTGMVVGIVAAAALCILILLYAMYKYRNRDEGSYHVDESRNYISNSAQSNGAVVKEKQPSSAKSSNKNKKNKDKEYYV

SEQ ID NO: 56149 - protein, 87 aa, Homo sapiens
  Payload ID: 11035
  Gene Symbol: NRXN1
  Gene Name: neurexin 1
  ENSP ID: ENSP00000485723
PVNGKFNDNAWHDVKVTRNLRQVTISVDGILTTTGYTQEDYTMLGSDDFFYVGGSPSTADLPGSPVSNNFMGCLKEIKEKKGNHSTY

SEQ ID NO: 56150 - protein, 469 aa, Homo sapiens
  Payload ID: 11035
  Gene Symbol: NRXN1
  Gene Name: neurexin 1
  ENSP ID: ENSP00000485815
MYQRMLRCGAELGSPGGGGGGGGGGGAGGRLALLWIVPLTLSGLLGVAWGASSLGAHHIHHFHGSSKHHSVPIAIYRSPASLRGGHAGTTYIFSKGGGQITYKWPPNDRPSTRADRLAIGFSTVQKEAVLVRVDSSSGLGDYLELHIHQGKIGVKFNVGTDDIAIEESNAIINDGKYHVVRFTRSGGNATLQVDSWPVIERYPAGNNDNERLAIARQRIPYRLGRVVDEWLLDKGRQLTIFNSQATIIIGGKEQGQPFQGQLSGLYYNGLKVLNMAAENDANIAIVGNVRLVGEVPSSMTTESTATAMQSEMSTSIMETTTTLATSTARRGKPPTKEPISQTTDDILVASAECPSDDEDIDPCEPSSANPTRAGGREPYPGSAEVIRESSSTTGMVVGIVAAAALCILILLYAMYKYRNRDEGSYHVDESRNYISNSAQSNGAVVKEKQPSSAKSSNKNKKNKDKEYYV

SEQ ID NO: 56151 - protein, 1496 aa, Homo sapiens
  Payload ID: 11035
  Gene Symbol: NRXN1
  Gene Name: neurexin 1
  ENSP ID: ENSP00000485887
MGTALLQRGGCFLLCLSLLLLGCWAELGSGLEFPGAEGQWTRFPKWNACCESEMSFQLKTRSARGLVLYFDDEGFCDFLELILTRGGRLQLSFSIFCAEPATLLADTPVNDGAWHSVRIRRQFRNTTLFIDQVEAKWVEVKSKRRDMTVFSGLFVGGLPPELRAAALKLTLASVREREPFKGWIRDVRVNSSQVLPVDSGEVKLDDEPPNSGGGSPCEAGEEGEGGVCLNGGVCSVVDDQAVCDCSRTGFRGKDCSQEDNNVEGLAHLMMGDQGKSKGKEEYIATFKGSEYFCYDLSQNPIQSSSDEITLSFKTLQRNGLMLHTGKSADYVNLALKNGAVSLVINLGSGAFEALVEPVNGKFNDNAWHDVKVTRNLRQVTISVDGILTTTGYTQEDYTMLGSDDFFYVGGSPSTADLPGSPVSNNFMGCLKEVVYKNNDVRLELSRLAKQGDPKMKIHGVVAFKCENVATLDPITFETPESFISLPKWNAKKTGSISFDFRTTEPNGLILFSHGKPRHQKDAKHPQMIKVDFFAIEMLDGHLYLLLDMGSGTIKIKALLKKVNDGEWYHVDFQRDGRSGTISVNTLRTPYTAPGESEILDLDDELYLGGLPENKAGLVFPTEVWTALLNYGYVGCIRDLFIDGQSKDIRQMAEVQSTAGVKPSCSKETAKPCLSNPCKNNGMCRDGWNRYVCDCSGTGYLGRSCEREATVLSYDGSMFMKIQLPVVMHTEAEDVSLRFRSQRAYGILMATTSRDSADTLRLELDAGRVKLTVNLDCIRINCNSSKGPETLFAGYNLNDNEWHTVRVVRRGKSLKLTVDDQQAMTGQMAGDHTRLEFHNIETGIITERRYLSSVPSNFIGHLQSLTFNGMAYIDLCKNGDIDYCELNARFGFRNIIADPVTFKTKSSYVALATLQAYTSMHLFFQFKTTSLDGLILYNSGDGNDFIVVELVKGYLHYVFDLGNGANLIKGSSNKPLNDNQWHNVMISRDTSNLHTVKIDTKITTQITAGARNLDLKSDLYIGGVAKETYKSLPKLVHAKEGFQGCLASVDLNGRLPDLISDALFCNGQIERGCEGPSTTCQEDSCSNQGVCLQQWDGFSCDCSMTSFSGPLCNDPGTTYIFSKGGGQITYKWPPNDRPSTRADRLAIGFSTVQKEAVLVRVDSSSGLGDYLELHIHQGKIGVKFNVGTDDIAIEESNAIINDGKYHVVRFTRSGGNATLQVDSWPVIERYPAGNNDNERLAIARQRIPYRLGRVVDEWLLDKGRQLTIFNSQATIIIGGKEQGQPFQGQLSGLYYNGLKVLNMAAENDANIAIVGNVRLVGEVPSSMTTESTATAMQSEMSTSIMETTTTLATSTARRGKPPTKEPISQTTDDILVASAECPSDDEDIDPCEPSSANPTRAGGREPYPGSAEVIRESSSTTGMVVGIVAAAALCILILLYAMYKYRNRDEGSYHVDESRNYISNSAQSNGAVVKEKQPSSAKSSNKNKKNKDKEYYV

SEQ ID NO: 56152 - protein, 277 aa, Homo sapiens
  Payload ID: 11035
  Gene Symbol: NRXN1
  Gene Name: neurexin 1
  ENSP ID: ENSP00000485912
MGTALLQRGGCFLLCLSLLLLGCWAELGSGLEFPGAEGQWTRFPKWNACCESEMSFQLKTRSARGLVLYFDDEGFCDFLELILTRGGRLQLSFSIFCAEPATLLADTPVNDGAWHSVRIRRQFRNTTLFIDQVEAKWVEVKSKRRDMTVFSGLFVGGLPPELRAAALKLTLASVREREPFKGWIRDVRVNSSQVLPVDSGEVKLDDEPPNSGGGSPCEAGEEGEGGVCLNGGVCSVVDDQAVCDCSRTGFRGKDCSQDNNVEGLAHLMMGDQGKSKD

SEQ ID NO: 56153 - protein, 169 aa, Homo sapiens
  Payload ID: 11035
  Gene Symbol: NRXN1
  Gene Name: neurexin 1
  ENSP ID: ENSP00000486185
  MOD_RES (1)..(1): Any amino acid
XSNNFMGCLKEVVYKNNDVRLELSRLAKQGDPKMKIHGVVAFKCENVATLDPITFETPESFISLPKWNAKKTGSISFDFRTTEPNGLILFSHGKPRHQKDAKHPQMIKVDFFAIEMLDGHLYLLLDMGSGTIKIKALLKKVNDGEWYHVDFQRDGRSGQMAGDHTRLEF

SEQ ID NO: 56154 - protein, 213 aa, Homo sapiens
  Payload ID: 11035
  Gene Symbol: NRXN1
  Gene Name: neurexin 1
  ENSP ID: ENSP00000486253
DLGNGANLIKGSSNKPLNDNQWHNVMISRDTSNLHTVKIDTKITTQITAGARNLDLKSDLYIGGVAKETYKSLPKLVHAKEGFQGCLASVDLNGRLPDLISDALFCNGQIERGCEVALMKADLQGPSTTCQEDSCSNQGVCLQQWDGFSCDCSMTSFSGPLCNDPGTTYIFSKGGGQITYKWPPNDRPSTRADRLAIGFSTVQKEAVLVRVDS

SEQ ID NO: 56155 - protein, 459 aa, Homo sapiens
  Payload ID: 11035
  Gene Symbol: NRXN1
  Gene Name: neurexin 1
  ENSP ID: ENSP00000486544
MGTALLQRGGCFLLCLSLLLLGCWAELGSGLEFPGAEGQWTRFPKWNACCESEMSFQLKTRSARGLVLYFDDEGFCDFLELILTRGGRLQLSFSIFCAEPATLLADTPVNDGAWHSVRIRRQFRNTTLFIDQVEAKWVEVKSKRRDMTVFSGLFVGGLPPELRAAALKLTLASVREREPFKGWIRDVRVNSSQVLPVDSGEVKLDDEPPNSGGGSPCEAGEEGEGGVCLNGGVCSVVDDQAVCDCSRTGFRGKDCSQGKEEYIATFKGSEYFCYDLSQNPIQSSSDEITLSFKTLQRNGLMLHTGKSADYVNLALKNGAVSLVINLGSGAFEALVEPVNGKFNDNAWHDVKVTRNLRQVTISVDGILTTTGYTQEDYTMLGSDDFFYVGGSPSTADLPGSPVSNNFMGCLKEVNIVAIRIIPNSWSHHFRSSMKAPLLKTRCSRVKRHNFKFNILLLFM

SEQ ID NO: 56156 - protein, 1499 aa, Homo sapiens
  Payload ID: 11035
  Gene Symbol: NRXN1
  Gene Name: neurexin 1
  Uniprot ID: Q9ULB1
  ENSP ID: ENSP00000486879
MGTALLQRGGCFLLCLSLLLLGCWAELGSGLEFPGAEGQWTRFPKWNACCESEMSFQLKTRSARGLVLYFDDEGFCDFLELILTRGGRLQLSFSIFCAEPATLLADTPVNDGAWHSVRIRRQFRNTTLFIDQVEAKWVEVKSKRRDMTVFSGLFVGGLPPELRAAALKLTLASVREREPFKGWIRDVRVNSSQVLPVDSGEVKLDDEPPNSGGGSPCEAGEEGEGGVCLNGGVCSVVDDQAVCDCSRTGFRGKDCSQEDNNVEGLAHLMMGDQGKSKGKEEYIATFKGSEYFCYDLSQNPIQSSSDEITLSFKTLQRNGLMLHTGKSADYVNLALKNGAVSLVINLGSGAFEALVEPVNGKFNDNAWHDVKVTRNLRQVTISVDGILTTTGYTQEDYTMLGSDDFFYVGGSPSTADLPGSPVSNNFMGCLKEVVYKNNDVRLELSRLAKQGDPKMKIHGVVAFKCENVATLDPITFETPESFISLPKWNAKKTGSISFDFRTTEPNGLILFSHGKPRHQKDAKHPQMIKVDFFAIEMLDGHLYLLLDMGSGTIKIKALLKKVNDGEWYHVDFQRDGRSGTISVNTLRTPYTAPGESEILDLDDELYLGGLPENKAGLVFPTEVWTALLNYGYVGCIRDLFIDGQSKDIRQMAEVQSTAGVKPSCSKETAKPCLSNPCKNNGMCRDGWNRYVCDCSGTGYLGRSCEREATVLSYDGSMFMKIQLPVVMHTEAEDVSLRFRSQRAYGILMATTSRDSADTLRLELDAGRVKLTVNLDCIRINCNSSKGPETLFAGYNLNDNEWHTVRVVRRGKSLKLTVDDQQAMTGQMAGDHTRLEFHNIETGIITERRYLSSVPSNFIGHLQSLTFNGMAYIDLCKNGDIDYCELNARFGFRNIIADPVTFKTKSSYVALATLQAYTSMHLFFQFKTTSLDGLILYNSGDGNDFIVVELVKGYLHYVFDLGNGANLIKGSSNKPLNDNQWHNVMISRDTSNLHTVKIDTKITTQITAGARNLDLKSDLYIGGVAKETYKSLPKLVHAKEGFQGCLASVDLNGRLPDLISDALFCNGQIERGCEGPSTTCQEDSCSNQGVCLQQWDGFSCDCSMTSFSGPLCNDPGTTYIFSKGGGQITYKWPPNDRPSTRADRLAIGFSTVQKEAVLVRVDSSSGLGDYLELHIHQGKIGVKFNVGTDDIAIEESNAIINDGKYHVVRFTRSGGNATLQVDSWPVIERYPAGNNDNERLAIARQRIPYRLGRVVDEWLLDKGRQLTIFNSQATIIIGGKEQGQPFQGQLSGLYYNGLKVLNMAAENDANIAIVGNVRLVGEVPSSMTTESTATAMQSEMSTSIMETTTTLATSTARRGKPPTKEPISQTTDDILVASAECPSDDEDIDPCEPSSGGLANPTRAGGREPYPGSAEVIRESSSTTGMVVGIVAAAALCILILLYAMYKYRNRDEGSYHVDESRNYISNSAQSNGAVVKEKQPSSAKSSNKNKKNKDKEYYV

SEQ ID NO: 56157 - protein, 75 aa, Homo sapiens
  Payload ID: 11035
  Gene Symbol: NRXN1
  Gene Name: neurexin 1
  ENSP ID: ENSP00000486993
MVVGIVAAAALCILILLYAMYKYRNRDEGSYHVDESRNYISNSAQSNGAVVKEKQPSSAKSSNKNKKNKDKEYYV

SEQ ID NO: 56158 - protein, 126 aa, Homo sapiens
  Payload ID: 11035
  Gene Symbol: NRXN1
  Gene Name: neurexin 1
  ENSP ID: ENSP00000487165
  MOD_RES (1)..(1): Any amino acid
XPELRAAALKLTLASVREREPFKGWIRDVRVNSSQVLPVDSGEVKLDDEPPNSGGGSPCEAGEEGEGGVCLNGGVCSVVDDQAVCDCSRTGFRGKDCSQGLAHLMMGDQGMGSVPFPLCFQCFLVL

SEQ ID NO: 56159 - protein, 136 aa, Homo sapiens
  Payload ID: 11035
  Gene Symbol: NRXN1
  Gene Name: neurexin 1
  ENSP ID: ENSP00000487268
SSQVLPVDSGEVKLDDEPPNSGGGSPCEAGEEGEGGVCLNGGVCSVVDDQAVCDCSRTGFRGKDCSQEIKFGLQCVLPVLLHDNDQGKYCCINTAKPLTEKDNNVEGLAHLMMGDQGKSKEKLEIFRWIRKDFTNF

SEQ ID NO: 56160 - protein, 176 aa, Homo sapiens
  Payload ID: 11035
  Gene Symbol: NRXN1
  Gene Name: neurexin 1
  ENSP ID: ENSP00000489108
MTSGSKCPSTDSGKEEYIATFKGSEYFCYDLSQNPIQSSSDEITLSFKTLQRNGLMLHTGKSADYVNLALKNGAVSLVINLGSGAFEALVEPVNGKFNDNAWHDVKVTRNLRQVTISVDGILTTTGYTQEDYTMLGSDDFFYVGGSPSTADLPGSPIQHESTFAEDPMFQSQTAQL

SEQ ID NO: 56161 - protein, 62 aa, Homo sapiens
  Payload ID: 11035
  Gene Symbol: NRXN1
  Gene Name: neurexin 1
  ENSP ID: ENSP00000489258
MDMRWHCENLQTTDDILVASAECPSDDEDIDPCEPSSGTKQTMWKTSRDHRILPNARRERKD

SEQ ID NO: 56162 - protein, 903 aa, Homo sapiens
  Payload ID: 11035
  Gene Symbol: NRXN1
  Gene Name: neurexin 1
  ENSP ID: ENSP00000489573
MTSGSKCPSTDSGKEEYIATFKGSEYFCYDLSQNPIQSSSDEITLSFKTLQRNGLMLHTGKSADYVNLALKNGAVSLVINLGSGAFEALVEPVNGKFNDNAWHDVKVTRNLRQVTISVDGILTTTGYTQEDYTMLGSDDFFYVGGSPSTADLPGSPVSNNFMGCLKEVVYKNNDVRLELSRLAKQGDPKMKIHGVVAFKCENVATLDPITFETPESFISLPKWNAKKTGSISFDFRTTEPNGLILFSHGKPRHQKDAKHPQMIKVDFFAIEMLDGHLYLLLDMGSGTIKIKALLKKVNDGEWYHVDFQRDGRSGTISVNTLRTPYTAPGESEILDLDDELYLGGLPENKAGLVFPTEVWTALLNYGYVGCIRDLFIDGQSKDIRQMAEVQSTAGVKPSCSKETAKPCLSNPCKNNGMCRDGWNRYVCDCSGTGYLGRSCEREATVLSYDGSMFMKIQLPVVMHTEAEDVSLRFRSQRAYGILMATTSRDSADTLRLELDAGRVKLTVNLGKGPETLFAGYNLNDNEWHTVRVVRRGKSLKLTVDDQQAMTGQMAGDHTRLEFHNIETGIITERRYLSSVPSNFIGHLQSLTFNGMAYIDLCKNGDIDYCELNARFGFRNIIADPVTFKTKSSYVALATLQAYTSMHLFFQFKTTSLDGLILYNSGDGNDFIVVELVKGYLHYVFDLGNGANLIKGSSNKPLNDNQWHNVMISRDTSNLHTVKIDTKITTQITAGARNLDLKSDLYIGGVAKETYKSLPKLVHAKEGFQGCLASVDLNGRLPDLISDALFCNGQIERGCEGPSTTCQEDSCSNQGVCLQQWDGFSCDCSMTSFSGPLCNDPGTTYIFSKGGGQITYKWPPNDRPSTRADRLAIGFSTVQKEAVLVRVDSSSGLGDYLELHITLQ

SEQ ID NO: 56163 - protein, 1712 aa, Homo sapiens
  Payload ID: 11036
  Gene Symbol: NRXN2
  Gene Name: neurexin 2
  Uniprot ID: Q9P2S2
  ENSP ID: ENSP00000265459
MASGSRWRPTPPPLLLLLLLALAARADGLEFGGGPGQWARYARWAGAASSGELSFSLRTNATRALLLYLDDGGDCDFLELLLVDGRLRLRFTLSCAEPATLQLDTPVADDRWHMVLLTRDARRTALAVDGEARAAEVRSKRREMQVASDLFVGGIPPDVRLSALTLSTVKYEPPFRGLLANLKLGERPPALLGSQGLRGATADPLCAPARNPCANGGLCTVLAPGEVGCDCSHTGFGGKFCSEEEHPMEGPAHLTLNSEVGSLLFSEGGAGRGGAGDVHQPTKGKEEFVATFKGNEFFCYDLSHNPIQSSTDEITLAFRTLQRNGLMLHTGKSADYVNLSLKSGAVWLVINLGSGAFEALVEPVNGKFNDNAWHDVRVTRNLRQHAGIGHAMVNKLHYLVTISVDGILTTTGYTQEDYTMLGSDDFFYIGGSPNTADLPGSPVSNNFMGCLKDVVYKNNDFKLELSRLAKEGDPKMKLQGDLSFRCEDVAALDPVTFESPEAFVALPRWSAKRTGSISLDFRTTEPNGLLLFSQGRRAGGGAGSHSSAQRADYFAMELLDGHLYLLLDMGSGGIKLRASSRKVNDGEWCHVDFQRDGRKGSISVNSRSTPFLATGDSEILDLESELYLGGLPEGGRVDLPLPPEVWTAALRAGYVGCVRDLFIDGRSRDLRGLAEAQGAVGVAPFCSRETLKQCASAPCRNGGVCREGWNRFICDCIGTGFLGRVCEREATVLSYDGSMYMKIMLPNAMHTEAEDVSLRFMSQRAYGLMMATTSRESADTLRLELDGGQMKLTVNLDCLRVGCAPSKGPETLFAGHKLNDNEWHTVRVVRRGKSLQLSVDNVTVEGQMAGAHMRLEFHNIETGIMTERRFISVVPSNFIGHLSGLVFNGQPYMDQCKDGDITYCELNARFGLRAIVADPVTFKSRSSYLALATLQAYASMHLFFQFKTTAPDGLLLFNSGNGNDFIVIELVKGYIHYVFDLGNGPSLMKGNSDKPVNDNQWHNVVVSRDPGNVHTLKIDSRTVTQHSNGARNLDLKGELYIGGLSKNMFSNLPKLVASRDGFQGCLASVDLNGRLPDLIADALHRIGQVERGCDGPSTTCTEESCANQGVCLQQWDGFTCDCTMTSYGGPVCNDPGTTYIFGKGGALITYTWPPNDRPSTRMDRLAVGFSTHQRSAVLVRVDSASGLGDYLQLHIDQGTVGVIFNVGTDDITIDEPNAIVSDGKYHVVRFTRSGGNATLQVDSWPVNERYPAGNFDNERLAIARQRIPYRLGRVVDEWLLDKGRQLTIFNSQAAIKIGGRDQGRPFQGQVSGLYYNGLKVLALAAESDPNVRTEGHLRLVGEGPSVLLSAETTATTLLADMATTIMETTTTMATTTTRRGRSPTLRDSTTQNTDDLLVASAECPSDDEDLEECEPSTGGELILPIITEDSLDPPPVATRSPFVPPPPTFYPFLTGVGATQDTLPPPAARRPPSGGPCQAERDDSDCEEPIEASGFASGEVFDSSLPPTDDEDFYTTFPLVTDRTTLLSPRKPAPRPNLRTDGATGAPGVLFAPSAPAPNLPAGKMNHRDPLQPLLENPPLGPGAPTSFEPRRPPPLRPGVTSAPGFPHLPTANPTGPGERGPPGAVEVIRESSSTTGMVVGIVAAAALCILILLYAMYKYRNRDEGSYQVDQSRNYISNSAQSNGAVVKEKAPAAPKTPSKAKKNKDKEYYV

SEQ ID NO: 56164 - protein, 666 aa, Homo sapiens
  Payload ID: 11036
  Gene Symbol: NRXN2
  Gene Name: neurexin 2
  Uniprot ID: P58401
  ENSP ID: ENSP00000301894
MPPGGSGPGGCPRRPPALAGPLPPPPPPPPPPLLPLLPLLLLLLLGAAEGARVSSSLSTTHHVHHFHSKHGTVPIAINRMPFLTRGGHAGTTYIFGKGGALITYTWPPNDRPSTRMDRLAVGFSTHQRSAVLVRVDSASGLGDYLQLHIDQGTVGVIFNVGTDDITIDEPNAIVSDGKYHVVRFTRSGGNATLQVDSWPVNERYPAGNFDNERLAIARQRIPYRLGRVVDEWLLDKGRQLTIFNSQAAIKIGGRDQGRPFQGQVSGLYYNGLKVLALAAESDPNVRTEGHLRLVGEGPSVLLSAETTATTLLADMATTIMETTTTMATTTTRRGRSPTLRDSTTQNTDDLLVASAECPSDDEDLEECEPSTGGELILPIITEDSLDPPPVATRSPFVPPPPTFYPFLTGVGATQDTLPPPAARRPPSGGPCQAERDDSDCEEPIEASGFASGEVFDSSLPPTDDEDFYTTFPLVTDRTTLLSPRKPAPRPNLRTDGATGAPGVLFAPSAPAPNLPAGKMNHRDPLQPLLENPPLGPGAPTSFEPRRPPPLRPGVTSAPGFPHLPTANPTGPGERGPPGAVEVIRESSSTTGMVVGIVAAAALCILILLYAMYKYRNRDEGSYQVDQSRNYISNSAQSNGAVVKEKAPAAPKTPSKAKKNKDKEYYV

SEQ ID NO: 56165 - protein, 1712 aa, Homo sapiens; identical to SEQ ID NO: 56163
  Payload ID: 11036
  Gene Symbol: NRXN2
  Gene Name: neurexin 2
  Uniprot ID: Q9P2S2
  ENSP ID: ENSP00000366774

SEQ ID NO: 56166 - protein, 1642 aa, Homo sapiens
  Payload ID: 11036
  Gene Symbol: NRXN2
  Gene Name: neurexin 2
  Uniprot ID: Q9P2S2
  ENSP ID: ENSP00000366782
MASGSRWRPTPPPLLLLLLLALAARADGLEFGGGPGQWARYARWAGAASSGELSFSLRTNATRALLLYLDDGGDCDFLELLLVDGRLRLRFTLSCAEPATLQLDTPVADDRWHMVLLTRDARRTALAVDGEARAAEVRSKRREMQVASDLFVGGIPPDVRLSALTLSTVKYEPPFRGLLANLKLGERPPALLGSQGLRGATADPLCAPARNPCANGGLCTVLAPGEVGCDCSHTGFGGKFCSEEEHPMEGPAHLTLNSEGKEEFVATFKGNEFFCYDLSHNPIQSSTDEITLAFRTLQRNGLMLHTGKSADYVNLSLKSGAVWLVINLGSGAFEALVEPVNGKFNDNAWHDVRVTRNLRQHAGIGHAMVTISVDGILTTTGYTQEDYTMLGSDDFFYIGGSPNTADLPGSPVSNNFMGCLKDVVYKNNDFKLELSRLAKEGDPKMKLQGDLSFRCEDVAALDPVTFESPEAFVALPRWSAKRTGSISLDFRTTEPNGLLLFSQGRRAGGGAGSHSSAQRADYFAMELLDGHLYLLLDMGSGGIKLRASSRKVNDGEWCHVDFQRDGRKGSISVNSRSTPFLATGDSEILDLESELYLGGLPEGGRVDLPLPPEVWTAALRAGYVGCVRDLFIDGRSRDLRGLAEAQGAVGVAPFCSRETLKQCASAPCRNGGVCREGWNRFICDCIGTGFLGRVCEREATVLSYDGSMYMKIMLPNAMHTEAEDVSLRFMSQRAYGLMMATTSRESADTLRLELDGGQMKLTVNLGKGPETLFAGHKLNDNEWHTVRVVRRGKSLQLSVDNVTVEGQMAGAHMRLEFHNIETGIMTERRFISVVPSNFIGHLSGLVFNGQPYMDQCKDGDITYCELNARFGLRAIVADPVTFKSRSSYLALATLQAYASMHLFFQFKTTAPDGLLLFNSGNGNDFIVIELVKGYIHYVFDLGNGPSLMKGNSDKPVNDNQWHNVVVSRDPGNVHTLKIDSRTVTQHSNGARNLDLKGELYIGGLSKNMFSNLPKLVASRDGFQGCLASVDLNGRLPDLIADALHRIGQVERGCDGPSTTCTEESCANQGVCLQQWDGFTCDCTMTSYGGPVCNDPGTTYIFGKGGALITYTWPPNDRPSTRMDRLAVGFSTHQRSAVLVRVDSASGLGDYLQLHIDQGTVGVIFNVGTDDITIDEPNAIVSDGKYHVVRFTRSGGNATLQVDSWPVNERYPAGRQLTIFNSQAAIKIGGRDQGRPFQGQVSGLYYNGLKVLALAAESDPNVRTEGHLRLVGEGPSVLLSAETTATTLLADMATTIMETTTTMATTTTRRGRSPTLRDSTTQNTDDLLVASAECPSDDEDLEECEPSTGGELILPIITEDSLDPPPVATRSPFVPPPPTFYPFLTGVGATQDTLPPPAARRPPSGGPCQAERDDSDCEEPIEASGFASGEVFDSSLPPTDDEDFYTTFPLVTDRTTLLSPRKPAPRPNLRTDGATGAPGVLFAPSAPAPNLPAGKMNHRDPLQPLLENPPLGPGAPTSFEPRRPPPLRPGVTSAPGFPHLPTANPTGPGERGPPGAVEVIRESSSTTGMVVGIVAAAALCILILLYAMYKYRNRDEGSYQVDQSRNYISNSAQSNGAVVKEKAPAAPKTPSKAKKNKDKEYYV

SEQ ID NO: 56167 - protein, 1705 aa, Homo sapiens
  Payload ID: 11036
  Gene Symbol: NRXN2
  Gene Name: neurexin 2
  ENSP ID: ENSP00000386416
MASGSRWRPTPPPLLLLLLLALAARADGLEFGGGPGQWARYARWAGAASSGELSFSLRTNATRALLLYLDDGGDCDFLELLLVDGRLRLRFTLSCAEPATLQLDTPVADDRWHMVLLTRDARRTALAVDGEARAAEVRSKRREMQVASDLFVGGIPPDVRLSALTLSTVKYEPPFRGLLANLKLGERPPALLGSQGLRGATADPLCAPARNPCANGGLCTVLAPGEVGCDCSHTGFGGKFCSEEEHPMEGPAHLTLNSEVGSLLFSEGGAGRGGAGDVHQPTKGKEEFVATFKGNEFFCYDLSHNPIQSSTDEITLAFRTLQRNGLMLHTGKSADYVNLSLKSGAVWLVINLGSGAFEALVEPVNGKFNDNAWHDVRVTRNLRQHAGIGHAMVTISVDGILTTTGYTQEDYTMLGSDDFFYIGGSPNTADLPGSPVSNNFMGCLKDVVYKNNDFKLELSRLAKEGDPKMKLQGDLSFRCEDVAALDPVTFESPEAFVALPRWSAKRTGSISLDFRTTEPNGLLLFSQGRRAGGGAGSHSSAQRADYFAMELLDGHLYLLLDMGSGGIKLRASSRKVNDGEWCHVDFQRDGRKGSISVNSRSTPFLATGDSEILDLESELYLGGLPEGGRVDLPLPPEVWTAALRAGYVGCVRDLFIDGRSRDLRGLAEAQGAVGVAPFCSRETLKQCASAPCRNGGVCREGWNRFICDCIGTGFLGRVCEREATVLSYDGSMYMKIMLPNAMHTEAEDVSLRFMSQRAYGLMMATTSRESADTLRLELDGGQMKLTVNLDCLRVGCAPSKGPETLFAGHKLNDNEWHTVRVVRRGKSLQLSVDNVTVEGQMAGAHMRLEFHNIETGIMTERRFISVVPSNFIGHLSGLVFNGQPYMDQCKDGDITYCELNARFGLRAIVADPVTFKSRSSYLALATLQAYASMHLFFQFKTTAPDGLLLFNSGNGNDFIVIELVKGYIHYVFDLGNGPSLMKGNSDKPVNDNQWHNVVVSRDPGNVHTLKIDSRTVTQHSNGARNLDLKGELYIGGLSKNMFSNLPKLVASRDGFQGCLASVDLNGRLPDLIADALHRIGQVERGCDGPSTTCTEESCANQGVCLQQWDGFTCDCTMTSYGGPVCNDPGTTYIFGKGGALITYTWPPNDRPSTRMDRLAVGFSTHQRSAVLVRVDSASGLGDYLQLHIDQGTVGVIFNVGTDDITIDEPNAIVSDGKYHVVRFTRSGGNATLQVDSWPVNERYPAGNFDNERLAIARQRIPYRLGRVVDEWLLDKGRQLTIFNSQAAIKIGGRDQGRPFQGQVSGLYYNGLKVLALAAESDPNVRTEGHLRLVGEGPSVLLSAETTATTLLADMATTIMETTTTMATTTTRRGRSPTLRDSTTQNTDDLLVASAECPSDDEDLEECEPSTGGELILPIITEDSLDPPPVATRSPFVPPPPTFYPFLTGVGATQDTLPPPAARRPPSGGPCQAERDDSDCEEPIEASGFASGEVFDSSLPPTDDEDFYTTFPLVTDRTTLLSPRKPAPRPNLRTDGATGAPGVLFAPSAPAPNLPAGKMNHRDPLQPLLENPPLGPGAPTSFEPRRPPPLRPGVTSAPGFPHLPTANPTGPGERGPPGAVEVIRESSSTTGMVVGIVAAAALCILILLYAMYKYRNRDEGSYQVDQSRNYISNSAQSNGAVVKEKAPAAPKTPSKAKKNKDKEYYV

SEQ ID NO: 56168 - protein, 292 aa, Homo sapiens
  Payload ID: 11036
  Gene Symbol: NRXN2
  Gene Name: neurexin 2
  ENSP ID: ENSP00000388971
SVSPAATCGQPVWSEEHPMEGPAHLTLNSEVGSLLFSEGGAGRGGAGDVHQPTKGKEEFVATFKGNEFFCYDLSHNPIQSSTDEITLAFRTLQRNGLMLHTGKSADYVNLSLKSGAVWLVINLGSGAFEALVEPVNGKFNDNAWHDVRVTRNLRQVTISVDGILTTTGYTQEDYTMLGSDDFFYIGGSPNTADLPGSPVSNNFMGCLKDVVYKNNDFKLELSRLAKEGDPKMKLQGDLSFRCEDVAALDPVTFESPEAFVALPRWSAKRTGSISLDFRTTEPNGLLLFSQGR

SEQ ID NO: 56169 - protein, 276 aa, Homo sapiens
  Payload ID: 11036
  Gene Symbol: NRXN2
  Gene Name: neurexin 2
  ENSP ID: ENSP00000407374
LLLLLLGAAEGARVSSSLSTTHHVHHFHSKHGTVPIAINRMPFLTRGGHAGTTYIFGKGGALITYTWPPNDRPSTRMDRLAVGFSTHQRSAVLVRVDSASGLGDYLQLHIDQGTVGVIFNVGTDDITIDEPNAIVSDGKYHVVRFTRSGGNATLQVDSWPVNERYPAGRQLTIFNSQAAIKIGGRDQGRPFQGQVSGLYYNGLKVLALAAESDPNVRTEGHLRLVGEGPSVLLSAETTATTLLADMATTIMETTTTMATTTTRRGRSPTLRDSTTQ

SEQ ID NO: 56170 - protein, 206 aa, Homo sapiens
  Payload ID: 11036
  Gene Symbol: NRXN2
  Gene Name: neurexin 2
  ENSP ID: ENSP00000411271
  MOD_RES (1)..(1): Any amino acid
XCSEEEHPMEGPAHLTLNSEVGSLLFSEGGAGRGGAGDVHQPTKGKEEFVATFKGNEFFCYDLSHNPIQSSTDEITLAFRTLQRNGLMLHTGKSADYVNLSLKSGAVWLVINLGSGAFEALVEPVNGKFNDNAWHDVRVTRNLRQVTISVDGILTTTGYTQEDYTMLGSDDFFYIGGSPNTADLPGSPVSNNFMGCLKDVVYKNND

SEQ ID NO: 56171 - protein, 215 aa, Homo sapiens
  Payload ID: 11036
  Gene Symbol: NRXN2
  Gene Name: neurexin 2
  ENSP ID: ENSP00000412211
  MOD_RES (1)..(1): Any amino acid
XADPLCAPARNPCANGGLCTVLAPGEVGCDCSHTGFGGKFCSEEEHPMEVGSLLFSEGGAGRGGAGDVHQPTKGKEEFVATFKGNEFFCYDLSHNPIQSSTDEITLAFRTLQRNGLMLHTGKSADYVNLSLKSGAVWLVINLGSGAFEALVEPVNGKFNDNAWHDVRVTRNLRQVTISVDGILTTTGYTQEDYTMLGSDDFFYIGGSPNTADLPG

SEQ ID NO: 56172 - protein, 432 aa, Homo sapiens
  Payload ID: 11037
  Gene Symbol: NRXN3
  Gene Name: neurexin 3
  Uniprot ID: Q9HDB5
  ENSP ID: ENSP00000281127
MHLRIHARRSPPRRPAWTLGIWFLFWGCIVSSVWSSSNVASSSSTSSSPGSHSQHEHHFHGSKHHSVPISIYRSPVSLRGGHAGATYIFGKSGGLILYTWPANDRPSTRSDRLAVGFSTTVKDGILVRIDSAPGLGDFLQLHIEQGKIGVVFNIGTVDISIKEERTPVNDGKYHVVRFTRNGGNATLQVDNWPVNEHYPTGRQLTIFNTQAQIAIGGKDKGRLFQGQLSGLYYDGLKVLNMAAENNPNIKINGSVRLVGEVPSILGTTQTTSMPPEMSTTVMETTTTMATTTTRKNRSTASIQPTSDDLVSSAECSSDDEDFVECEPSTGRSANPTEPGIRRVPGASEVIRESSSTTGMVVGIVAAAALCILILLYAMYKYRNRDEGSYQVDETRNYISNSAQSNGTLMKEKQQSSKSGHKKQKNKDREYYV

SEQ ID NO: 56173 - protein, 879 aa, Homo sapiens
  Payload ID: 11037
  Gene Symbol: NRXN3
  Gene Name: neurexin 3
  ENSP ID: ENSP00000338349
MHPSTHFHRDLDEAREENVATFRGSEYLCYDLSQNPIQSSSDEITLSFKTWQRNGLILHTGKSADYVNLALKDGAVSLVINLGSGAFEAIVEPVNGKFNDNAWHDVKVTRNLRQVTISVDGILTTTGYTQEDYTMLGSDDFFYVGGSPSTADLPGSPVSNNFMGCLKEVVYKNNDIRLELSRLARIADTKMKIYGEVVFKCENVATLDPINFETPEAYISLPKWNTKRMGSISFDFRTTEPNGLILFTHGKPQERKDARSQKNTKVDFFAVELLDGNLYLLLDMGSGTIKVKATQKKANDGEWYHVDIQRDGRSGTISVNSRRTPFTASGESEILDLEGDMYLGGLPENRAGLILPTELWTAMLNYGYVGCIRDLFIDGRSKNIRQLAEMQNAAGVKSSCSRMSAKQCDSYPCKNNAVCKDGWNRFICDCTGTGYWGRTCEREASILSYDGSMYMKIIMPMVMHTEAEDVSFRFMSQRAYGLLVATTSRDSADTLRLELDGGRVKLMVNLDCIRINCNSSKGPETLYAGQKLNDNEWHTVRVVRRGKSLKLTVDDDVAEGTMVGDHTRLEFHNIETGIMTEKRYISVVPSSFIGHLQSLMFNGLLYIDLCKNGDIDYCELKARFGLRNIIADPVTFKTKSSYLSLATLQAYTSMHLFFQFKTTSPDGFILFNSGDGNDFIAVELVKGYIHYVFDLGNGPNVIKGNSDRPLNDNQWHNVVITRDNSNTHSLKVDTKVVTQVINGAKNLDLKGDLYMAGLAQGMYSNLPKLVASRDGFQGCLASVDLNGRLPDLINDALHRSGQIERGCEGPSTTCQEDSCANQGVCMQQWEGFTCDCSMTSYSGNQCNDRKYNNLSYWNFVKMFGDLENLKGQYVKGWLF

SEQ ID NO: 56174 - protein, 459 aa, Homo sapiens
  Payload ID: 11037
  Gene Symbol: NRXN3
  Gene Name: neurexin 3
  Uniprot ID: Q9HDB5
  ENSP ID: ENSP00000394426
MHLRIHARRSPPRRPAWTLGIWFLFWGCIVSSVWSSSNVASSSSTSSSPGSHSQHEHHFHGSKHHSVPISIYRSPVSLRGGHAGATYIFGKSGGLILYTWPANDRPSTRSDRLAVGFSTTVKDGILVRIDSAPGLGDFLQLHIEQGKIGVVFNIGTVDISIKEERTPVNDGKYHVVRFTRNGGNATLQVDNWPVNEHYPTGNTDNERFQMVKQKIPFKYNRPVEEWLQEKGRQLTIFNTQAQIAIGGKDKGRLFQGQLSGLYYDGLKVLNMAAENNPNIKINGSVRLVGEVPSILGTTQTTSMPPEMSTTVMETTTTMATTTTRKNRSTASIQPTSDDLVSSAECSSDDEDFVECEPSTANPTEPGIRRVPGASEVIRESSSTTGMVVGIVAAAALCILILLYAMYKYRNRDEGSYQVDETRNYISNSAQSNGTLMKEKQQSSKSGHKKQKNKDREYYV

SEQ ID NO: 56175 - protein, 119 aa, Homo sapiens
  Payload ID: 11037
  Gene Symbol: NRXN3
  Gene Name: neurexin 3
  ENSP ID: ENSP00000450462
MKIYGEVVFKCENVATLDPINFETPEAYISLPKWNTKRMGSISFDFRTTEPNGLILFTHGKPQERKDARSQKNTKVDFFAVELLDGNLYLLLDMGSGTIKVKATQKKANDGEWYHVDIQ

SEQ ID NO: 56176 - protein, 1392 aa, Homo sapiens
  Payload ID: 11037
  Gene Symbol: NRXN3
  Gene Name: neurexin 3
  Uniprot ID: Q9Y4C0
  ENSP ID: ENSP00000450683
MSSTLHSVFFTLKVSILLGSLLGLCLGLEFMGLPNQWARYLRWDASTRSDLSFQFKTNVSTGLLLYLDDGGVCDFLCLSLVDGRVQLRFSMDCAETAVLSNKQVNDSSWHFLMVSRDRLRTVLMLDGEGQSGELQPQRPYMDVVSDLFLGGVPTDIRPSALTLDGVQAMPGFKGLILDLKYGNSEPRLLGSRGVQMDAEGPCGERPCENGGICFLLDGHPTCDCSTTGYGGKLCSEGLSHLMMSEQGRSKAREENVATFRGSEYLCYDLSQNPIQSSSDEITLSFKTWQRNGLILHTGKSADYVNLALKDGAVSLVINLGSGAFEAIVEPVNGKFNDNAWHDVKVTRNLRQVTISVDGILTTTGYTQEDYTMLGSDDFFYVGGSPSTADLPGSPVSNNFMGCLKEVVYKNNDIRLELSRLARIADTKMKIYGEVVFKCENVATLDPINFETPEAYISLPKWNTKRMGSISFDFRTTEPNGLILFTHGKPQERKDARSQKNTKVDFFAVELLDGNLYLLLDMGSGTIKVKATQKKANDGEWYHVDIQRDGRSGTISVNSRRTPFTASGESEILDLEGDMYLGGLPENRAGLILPTELWTAMLNYGYVGCIRDLFIDGRSKNIRQLAEMQNAAGVKSSCSRMSAKQCDSYPCKNNAVCKDGWNRFICDCTGTGYWGRTCEREASILSYDGSMYMKIIMPMVMHTEAEDVSFRFMSQRAYGLLVATTSRDSADTLRLELDGGRVKLMVNLGKGPETLYAGQKLNDNEWHTVRVVRRGKSLKLTVDDDVAEGTMVGDHTRLEFHNIETGIMTEKRYISVVPSSFIGHLQSLMFNGLLYIDLCKNGDIDYCELKARFGLRNIIADPVTFKTKSSYLSLATLQAYTSMHLFFQFKTTSPDGFILFNSGDGNDFIAVELVKGYIHYVFDLGNGPNVIKGNSDRPLNDNQWHNVVITRDNSNTHSLKVDTKVVTQVINGAKNLDLKGDLYMAGLAQGMYSNLPKLVASRDGFQGCLASVDLNGRLPDLINDALHRSGQIERGCEGPSTTCQEDSCANQGVCMQQWEGFTCDCSMTSYSGNQCNDPGATYIFGKSGGLILYTWPANDRPSTRSDRLAVGFSTTVKDGILVRIDSAPGLGDFLQLHIEQGKIGVVFNIGTVDISIKEERTPVNDGKYHVVRFTRNGGNATLQVDNWPVNEHYPTGNTDNERFQMVKQKIPFKYNRPVEEWLQEKGRQLTIFNTQAQIAIGGKDKGRLFQGQLSGLYYDGLKVLNMAAENNPNIKINGSVRLVGEVPSILGTTQTTSMPPEMSTTVMETTTTMATTTTRKNRSTASIQPTSDDLVSSAECSSDDEDFVECEPSTGRSARSSNAARSLRAALTWTWRLTYTFTPIIFISCVVHS

SEQ ID NO: 56177 - protein, 398 aa, Homo sapiens
  Payload ID: 11037
  Gene Symbol: NRXN3
  Gene Name: neurexin 3
  ENSP ID: ENSP00000451393
MHLRIHARRSPPRRPAWTLGIWFLFWGCIVSSVWSSSNVASSSSTSSSPGSHSQHEHHFHGSKHHSVPISIYRSPVSLRGGHAGATYIFGKSGGLILYTWPANDRPSTRSDRLAVGFSTTVKDGILVRIDSAPGLGDFLQLHIEQGKIGVVFNIGTVDISIKEERTPVNDGKYHVVRFTRNGGNATLQVDNWPVNEHYPTGNTDNERFQMVKQKIPFKYNRPVEEWLQEKGRQLTIFNTQAQIAIGGKDKGRLFQGQLSGLYYDGLKVLNMAAENNPNIKINGSVRLVGEVPSILGTTQTTSMPPEMSTTVMETTTTMATTTTRKNRSTASIQPTSDDLVSSAECSSDDEDFVECEPSTGRSARSSNAARSLRAALTWTWRLTYTFTPIIFISCVVHS

SEQ ID NO: 56178 - protein, 1061 aa, Homo sapiens
  Payload ID: 11037
  Gene Symbol: NRXN3
  Gene Name: neurexin 3
  Uniprot ID: Q9Y4C0
  ENSP ID: ENSP00000451648
MLGSDDFFYVGGSPSTADLPGSPVSNNFMGCLKEVVYKNNDIRLELSRLARIADTKMKIYGEVVFKCENVATLDPINFETPEAYISLPKWNTKRMGSISFDFRTTEPNGLILFTHGKPQERKDARSQKNTKVDFFAVELLDGNLYLLLDMGSGTIKVKATQKKANDGEWYHVDIQRDGRSGTISVNSRRTPFTASGESEILDLEGDMYLGGLPENRAGLILPTELWTAMLNYGYVGCIRDLFIDGRSKNIRQLAEMQNAAGVKSSCSRMSAKQCDSYPCKNNAVCKDGWNRFICDCTGTGYWGRTCEREASILSYDGSMYMKIIMPMVMHTEAEDVSFRFMSQRAYGLLVATTSRDSADTLRLELDGGRVKLMVNLDCIRINCNSSKGPETLYAGQKLNDNEWHTVRVVRRGKSLKLTVDDDVAEGTMVGDHTRLEFHNIETGIMTEKRYISVVPSSFIGHLQSLMFNGLLYIDLCKNGDIDYCELKARFGLRNIIADPVTFKTKSSYLSLATLQAYTSMHLFFQFKTTSPDGFILFNSGDGNDFIAVELVKGYIHYVFDLGNGPNVIKGNSDRPLNDNQWHNVVITRDNSNTHSLKVDTKVVTQVINGAKNLDLKGDLYMAGLAQGMYSNLPKLVASRDGFQGCLASVDLNGRLPDLINDALHRSGQIERGCEGPSTTCQEDSCANQGVCMQQWEGFTCDCSMTSYSGNQCNDPGATYIFGKSGGLILYTWPANDRPSTRSDRLAVGFSTTVKDGILVRIDSAPGLGDFLQLHIEQGKIGVVFNIGTVDISIKEERTPVNDGKYHVVRFTRNGGNATLQVDNWPVNEHYPTGRQLTIFNTQAQIAIGGKDKGRLFQGQLSGLYYDGLKVLNMAAENNPNIKINGSVRLVGEVPSILGTTQTTSMPPEMSTTVMETTTTMATTTTRKNRSTASIQPTSDDLVSSAECSSDDEDFVECEPSTANPTEPGIRRVPGASEVIRESSSTTGMVVGIVAAAALCILILLYAMYKYRNRDEGSYQVDETRNYISNSAQSNGTLMKEKQQSSKSGHKKQKNKDREYYV

SEQ ID NO: 56179 - protein, 637 aa, Homo sapiens
  Payload ID: 11037
  Gene Symbol: NRXN3
  Gene Name: neurexin 3
  Uniprot ID: Q9HDB5
  ENSP ID: ENSP00000451672
MHLRIHARRSPPRRPAWTLGIWFLFWGCIVSSVWSSSNVASSSSTSSSPGSHSQHEHHFHGSKHHSVPISIYRSPVSLRGGHAGATYIFGKSGGLILYTWPANDRPSTRSDRLAVGFSTTVKDGILVRIDSAPGLGDFLQLHIEQGKIGVVFNIGTVDISIKEERTPVNDGKYHVVRFTRNGGNATLQVDNWPVNEHYPTGRQLTIFNTQAQIAIGGKDKGRLFQGQLSGLYYDGLKVLNMAAENNPNIKINGSVRLVGEVPSILGTTQTTSMPPEMSTTVMETTTTMATTTTRKNRSTASIQPTSDDLVSSAECSSDDEDFVECEPSTGGELVIPLLVEDPLATPPIATRAPSITLPPTFRPLLTIIETTKDSLSMTSEAGLPCLSDQGSDGCDDDGLVISGYGSGETFDSNLPPTDDEDFYTTFSLVTDKSLSTSIFEGGYKAHAPKWESKDFRPNKVSETSRTTTTSLSPELIRFTASSSSGMVPKLPAGKMNNRDLKPQPDIVLLPLPTAYELDSTKLKSPLITSPMFRNVPTANPTEPGIRRVPGASEVIRESSSTTGMVVGIVAAAALCILILLYAMYKYRNRDEGSYQVDETRNYISNSAQSNGTLMKEKQQSSKSGHKKQKNKDREYYV

SEQ ID NO: 56180 - protein, 175 aa, Homo sapiens
  Payload ID: 11037
  Gene Symbol: NRXN3
  Gene Name: neurexin 3
  ENSP ID: ENSP00000451754
  MOD_RES (1)..(1): Any amino acid
XDVSQDPGLSHLMMSEQAREENVATFRGSEYLCYDLSQNPIQSSSDEITLSFKTWQRNGLILHTGKSADYVNLALKDGAVSLVINLGSGAFEAIVEPVNGKFNDNAWHDVKVTRNLRQHSGIGHAMVTISVDGILTTTGYTQEDYTMLGSDDFFYVGGSPSTADLPGSPVSNNFM

SEQ ID NO: 56181 - protein, 75 aa, Homo sapiens
  Payload ID: 11037
  Gene Symbol: NRXN3
  Gene Name: neurexin 3
  ENSP ID: ENSP00000451947
MKIYGEVVFKCENVATLDPINFETPEAYISLPKWNTKRMGSISFDFRTTEPNGLILFTHGKPQERKDARSQKNTK

SEQ ID NO: 56182 - protein, 1664 aa, Homo sapiens
  Payload ID: 11037
  Gene Symbol: NRXN3
  Gene Name: neurexin 3
  ENSP ID: ENSP00000488920
MSSTLHSVFFTLKVSILLGSLLGLCLGLEFMGLPNQWARYLRWDASTRSDLSFQFKTNVSTGLLLYLDDGGVCDFLCLSLVDGRVQLRFSMDCAETAVLSNKQVNDSSWHFLMVSRDRLRTVLMLDGEGQSGELQPQRPYMDVVSDLFLGGVPTDIRPSALTLDGVQAMPGFKGLILDLKYGNSEPRLLGSRGVQMDAEGPCGERPCENGGICFLLDGHPTCDCSTTGYGGKLCSEGLSHLMMSEQGRSKAREENVATFRGSEYLCYDLSQNPIQSSSDEITLSFKTWQRNGLILHTGKSADYVNLALKDGAVSLVINLGSGAFEAIVEPVNGKFNDNAWHDVKVTRNLRQVTISVDGILTTTGYTQEDYTMLGSDDFFYVGGSPSTADLPGSPVSNNFMGCLKEVVYKNNDIRLELSRLARIADTKMKIYGEVVFKCENVATLDPINFETPEAYISLPKWNTKRMGSISFDFRTTEPNGLILFTHGKPQERKDARSQKNTKVDFFAVELLDGNLYLLLDMGSGTIKVKATQKKANDGEWYHVDIQRDGRSGTISVNSRRTPFTASGESEILDLEGDMYLGGLPENRAGLILPTELWTAMLNYGYVGCIRDLFIDGRSKNIRQLAEMQNAAGVKSSCSRMSAKQCDSYPCKNNAVCKDGWNRFICDCTGTGYWGRTCEREASILSYDGSMYMKIIMPMVMHTEAEDVSFRFMSQRAYGLLVATTSRDSADTLRLELDGGRVKLMVNLGKGPETLYAGQKLNDNEWHTVRVVRRGKSLKLTVDDDVAEGTMVGDHTRLEFHNIETGIMTEKRYISVVPSSFIGHLQSLMFNGLLYIDLCKNGDIDYCELKARFGLRNIIADPVTFKTKSSYLSLATLQAYTSMHLFFQFKTTSPDGFILFNSGDGNDFIAVELVKGYIHYVFDLGNGPNVIKGNSDRPLNDNQWHNVVITRDNSNTHSLKVDTKVVTQVINGAKNLDLKGDLYMAGLAQGMYSNLPKLVASRDGFQGCLASVDLNGRLPDLINDALHRSGQIERGCEGPSTTCQEDSCANQGVCMQQWEGFTCDCSMTSYSGNQCNDPGATYIFGKSGGLILYTWPANDRPSTRSDRLAVGFSTTVKDGILVRIDSAPGLGDFLQLHIEQGKIGVVFNIGTVDISIKEERTPVNDGKYHVVRFTRNGGNATLQVDNWPVNEHYPTGNTDNERFQMVKQKIPFKYNRPVEEWLQEKGRQLTIFNTQAQIAIGGKDKGRLFQGQLSGLYYDGLKVLNMAAENNPNIKINGSVRLVGEVPSILGTTQTTSMPPEMSTTVMETTTTMATTTTRKNRSTASIQPTSDDLVSSAECSSDDEDFVECEPSTGRSGGELVIPLLVEDPLATPPIATRAPSITLPPTFRPLLTIIETTKDSLSMTSEAGLPCLSDQGSDGCDDDGLVISGYGSGETFDSNLPPTDDEDFYTTFSLVTDKSLSTSIFEGGYKAHAPKWESKDFRPNKVSETSRTTTTSLSPELIRFTASSSSGMVPKLPAGKMNNRDLKPQPDIVLLPLPTAYELDSTKLKSPLITSPMFRNVPTANPTEPGIRRVPGASEVIRESSSTTGMVVGIVAAAALCILILLYAMYKYRNRDEGSYQVDETRNYISNSAQSNGTLMKEKQQSSKSGHKKQKNKDREYYV

SEQ ID NO: 56183 - protein, 1571 aa, Homo sapiens
  Payload ID: 11037
  Gene Symbol: NRXN3
  Gene Name: neurexin 3
  ENSP ID: ENSP00000489551
MSSTLHSVFFTLKVSILLGSLLGLCLGLEFMGLPNQWARYLRWDASTRSDLSFQFKTNVSTGLLLYLDDGGVCDFLCLSLVDGRVQLRFSMDCAETAVLSNKQVNDSSWHFLMVSRDRLRTVLMLDGEGQSGELQPQRPYMDVVSDLFLGGVPTDIRPSALTLDGVQAMPGFKGLILDLKYGNSEPRLLGSRGVQMDAEGPCGERPCENGGICFLLDGHPTCDCSTTGYGGKLCSEDVSQDPGLSHLMMSEQAREENVATFRGSEYLCYDLSQNPIQSSSDEITLSFKTWQRNGLILHTGKSADYVNLALKDGAVSLVINLGSGAFEAIVEPVNGKFNDNAWHDVKVTRNLRQVTISVDGILTTTGYTQEDYTMLGSDDFFYVGGSPSTADLPGSPVSNNFMGCLKEVVYKNNDIRLELSRLARIADTKMKIYGEVVFKCENVATLDPINFETPEAYISLPKWNTKRMGSISFDFRTTEPNGLILFTHGKPQERKDARSQKNTKVDFFAVELLDGNLYLLLDMGSGTIKVKATQKKANDGEWYHVDIQRDGRSGTISVNSRRTPFTASGESEILDLEGDMYLGGLPENRAGLILPTELWTAMLNYGYVGCIRDLFIDGRSKNIRQLAEMQNAAGVKSSCSRMSAKQCDSYPCKNNAVCKDGWNRFICDCTGTGYWGRTCEREASILSYDGSMYMKIIMPMVMHTEAEDVSFRFMSQRAYGLLVATTSRDSADTLRLELDGGRVKLMVNLDCIRINCNSSKGPETLYAGQKLNDNEWHTVRVVRRGKSLKLTVDDDVAEGTMVGDHTRLEFHNIETGIMTEKRYISVVPSSFIGHLQSLMFNGLLYIDLCKNGDIDYCELKARFGLRNIIADPVTFKTKSSYLSLATLQAYTSMHLFFQFKTTSPDGFILFNSGDGNDFIAVELVKGYIHYVFDLGNGPNVIKGNSDRPLNDNQWHNVVITRDNSNTHSLKVDTKVVTQVINGAKNLDLKGDLYMAGLAQGMYSNLPKLVASRDGFQGCLASVDLNGRLPDLINDALHRSGQIERGCEGPSTTCQEDSCANQGVCMQQWEGFTCDCSMTSYSGNQCNDPGATYIFGKSGGLILYTWPANDRPSTRSDRLAVGFSTTVKDGILVRIDSAPGLGDFLQLHIEQGKIGVVFNIGTVDISIKEERTPVNDGKYHVVRFTRNGGNATLQVDNWPVNEHYPTGNTDNERFQMVKQKIPFKYNRPVEEWLQEKGRQLTIFNTQAQIAIGGKDKGRLFQGQLSGLYYDGLKVLNMAAENNPNIKINGSVRLVGEVPSILGTTQTTSMPPEMSTTVMETTTTMATTTTRKNRSTASIQPTSDDLVSSAECSSDDEDFVECEPSTDKSLSTSIFEGGYKAHAPKWESKDFRPNKVSETSRTTTTSLSPELIRFTASSSSGMVPKLPAGKMNNRDLKPQPDIVLLPLPTAYELDSTKLKSPLITSPMFRNVPTANPTEPGIRRVPGASEVIRESSSTTGMVVGIVAAAALCILILLYAMYKYRNRDEGSYQVDETRNYISNSAQSNGTLMKEKQQSSKSGHKKQKNKDREYYV

SEQ ID NO: 56184 - protein, 271 aa, Homo sapiens
  Payload ID: 11038
  Gene Symbol: NXPH1
  Gene Name: neurexophilin 1
  Uniprot ID: P58417
  ENSP ID: ENSP00000384551
MQAACWYVLFLLQPTVYLVTCANLTNGGKSELLKSGSSKSTLKHIWTESSKDLSISRLLSQTFRGKENDTDLDLRYDTPEPYSEQDLWDWLRNSTDLQEPRPRAKRRPIVKTGKFKKMFGWGDFHSNIKTVKLNLLITGKIVDHGNGTFSVYFRHNSTGQGNVSVSLVPPTKIVEFDLAQQTVIDAKDSKSFNCRIEYEKVDKATKNTLCNYDPSKTCYQEQTQSHVSWLCSKPFKVICIYISFYSTDYKLVQKVCPDYNYHSDTPYFPSG

SEQ ID NO: 56185 - protein, 139 aa, Homo sapiens
  Payload ID: 11038
  Gene Symbol: NXPH1
  Gene Name: neurexophilin 1
  ENSP ID: ENSP00000404689
MQAACWYVLFLLQPTVYLVTCANLTNGGKSELLKSGSSKSTLKHIWTESSKDLSISRLLSQTFRGKENDTDLDLRYDTPEPYSEQDLWDWLRNSTDLQEPRPRAKRRPIVKTGKFKKMFGWGDFHSNIKTVKLNLLITG

SEQ ID NO: 56186 - protein, 143 aa, Homo sapiens
  Payload ID: 11038
  Gene Symbol: NXPH1
  Gene Name: neurexophilin 1
  ENSP ID: ENSP00000408216
MQAACWYVLFLLQPTVYLVTCANLTNGGKSELLKSGSSKSTLKHIWTESSKDLSISRLLSQTFRGKENDTDLDLRYDTPEPYSEQDLWDWLRNSTDLQEPRPRAKRRPIVKTGKFKKMFGWGDFHSNIKTVKLNLLITGKIVD

SEQ ID NO: 56187 - protein, 253 aa, Homo sapiens
  Payload ID: 11038
  Gene Symbol: NXPH1
  Gene Name: neurexophilin 1
  ENSP ID: ENSP00000473269
VTCANLTNGGKSELLKSGSSKSTLKHIWTESSKDLSISRLLSQTFRGKENDTDLDLRYDTPEPYSEQDLWDWLRNSTDLQEPRPRAKRRPIVKTGKFKKMFGWGDFHSNIKTVKLNLLITGKIVDHGNGTFSVYFRHNSTGQGNVSVSLVPPTKIVEFDLAQQTVIDAKDSKSFNCRIEYEKVDKATKNTLCNYDPSKTCYQEQTQSHVSWLCSKPFKVICIYISFYSTDYKLVQKVCPDYNYHSDTPYFPSG

SEQ ID NO: 56188 - protein, 264 aa, Homo sapiens
  Payload ID: 11039
  Gene Symbol: NXPH2
  Gene Name: neurexophilin 2
  Uniprot ID: O95156
  ENSP ID: ENSP00000272641
MRLRPLPLVVVPGLLQLLFCDSKEVVHATEGLDWEDKDAPGTLVGNVVHSRIISPLRLFVKQSPVPKPGPMAYADSMENFWDWLANITEIQEPLARTKRRPIVKTGKFKKMFGWGDFHSNIKTVKLNLLITGKIVDHGNGTFSVYFRHNSTGLGNVSVSLVPPSKVVEFEVSPQSTLETKESKSFNCRIEYEKTDRAKKTALCNFDPSKICYQEQTQSHVSWLCSKPFKVICIYIAFYSVDYKLVQKVCPDYNYHSETPYLSSG

SEQ ID NO: 56189 - protein, 252 aa, Homo sapiens
  Payload ID: 11040
  Gene Symbol: NXPH3
  Gene Name: neurexophilin 3
  Uniprot ID: O95157
  ENSP ID: ENSP00000329295
MQLTRCCFVFLVQGSLYLVICGQDDGPPGSEDPERDDHEGQPRPRVPRKRGHISPKSRPMANSTLLGLLAPPGEAWGILGQPPNRPNHSPPPSAKVKKIFGWGDFYSNIKTVALNLLVTGKIVDHGNGTFSVHFQHNATGQGNISISLVPPSKAVEFHQEQQIFIEAKASKIFNCRMEWEKVERGRRTSLCTHDPAKICSRDHAQSSATWSCSQPFKVVCVYIAFYSTDYRLVQKVCPDYNYHSDTPYYPSG

SEQ ID NO: 56190 - protein, 354 aa, Homo sapiens
  Payload ID: 11040
  Gene Symbol: NXPH3
  Gene Name: neurexophilin 3
  ENSP ID: ENSP00000421168
MQLTRCCFVFLVQGSLYLVICGQDDGPPGSEDPERDDHEGQPRPRVPRKRGHISPKSRPMANSTLLGLLAPPGEAWGILGQPPNRPNHSPPPSAKVKKIFGWGDFYSNIKTVALNLLVTGKIVDHGNGTFSVHFQHNATGQGNISISLVPPSKAVEFHQEQQIFIEAKASKIFNCRMEWEKVERGRRTSLCTHDPAKICSRDHAQSSATWSCSQPFKVVCVYIAFYSTDYRLVQKGPSLLSGDVRHTPLLQTTLRSPPWRLETAGTGAAHQWTPTVCRSASHSAVETAGRRRKQWGQRPWAPSPPPLAELSAGTGGTLTPLLLLSSCGEPDAGDSWRARPSWHTVLPAPGMDSF

SEQ ID NO: 56191 - protein, 308 aa, Homo sapiens
  Payload ID: 11041
  Gene Symbol: NXPH4
  Gene Name: neurexophilin 4
  Uniprot ID: O95158
  ENSP ID: ENSP00000333593
MRLLPEWFLLLFGPWLLRKAVSAQIPESGRPQYLGLRPAAAGAGAPGQQLPEPRSSDGLGVGRAWSWAWPTNHTGALARAGAAGALPAQRTKRKPSIKAARAKKIFGWGDFYFRVHTLKFSLLVTGKIVDHVNGTFSVYFRHNSSSLGNLSVSIVPPSKRVEFGGVWLPGPVPHPLQSTLALEGVLPGLGPPLGMAAAAAGPGLGGSLGGALAGPLGGALGVPGAKESRAFNCHVEYEKTNRARKHRPCLYDPSQVCFTEHTQSQAAWLCAKPFKVICIFVSFLSFDYKLVQKVCPDYNFQSEHPYFG

SEQ ID NO: 56192 - protein, 36 aa, Homo sapiens
  Payload ID: 11041
  Gene Symbol: NXPH4
  Gene Name: neurexophilin 4
  ENSP ID: ENSP00000452288
MRLLPEWFLLLFGPWLLRKPRPGLSLPPARSWEHPA

SEQ ID NO: 56193 - protein, 405 aa, Homo sapiens
  Payload ID: 11042
  Gene Symbol: NXPE1
  Gene Name: neurexophilin and PC-esterase domain family, member 1
  Uniprot ID: Q8N323
  ENSP ID: ENSP00000251921
MSSPALTAGASGKVMDFNNGTYLVSFTLFWEGQVSLSLLLIHPSEGASALWRARNQGYDKIIFKGKFVNGTSHVFTECGLTLNSNAELCEYLDDRDQEAFYCMKPQHMPCEALTYMTTRNREVSYLTDKENSLFHRSKVGVEMMKDRKHIDVTNCNKREKIEETCQVGMKPPVPGGYTLQGKWITTFCNQVQLDTIKINGCLKGKLIYLLGDSTLRQWIYYFPKVVKTLKFFDLHETGIFKKHLLLDAERHTQIQWKKHSYPFVTFQLYSLIDHDYIPREIDRLSGDKNTAIVITFGQHFRPFPIDIFIRRAIGVQKAIERLFLRSPATKVIIKTENIREMHIETERFGDFHGYIHYLIMKDIFKDLNVGIIDAWDMTIAYGTDTIHPPDHVIGNQINMFLNYIC

SEQ ID NO: 56194 - protein, 547 aa, Homo sapiens
  Payload ID: 11042
  Gene Symbol: NXPE1
  Gene Name: neurexophilin and PC-esterase domain family, member 1
  Uniprot ID: Q8N323
  ENSP ID: ENSP00000411690
MSSNTMLQKTLLILISFSVVTWMIFIISQNFTKLWSALNLSISVHYWNNSAKSLFPKTSLIPLKPLTETELRIKEIIEKLDQQIPPRPFTHVNTTTSATHSTATILNPRDTYCRGDQLDILLEVRDHLGQRKQYGGDFLRARMSSPALTAGASGKVMDFNNGTYLVSFTLFWEGQVSLSLLLIHPSEGASALWRARNQGYDKIIFKGKFVNGTSHVFTECGLTLNSNAELCEYLDDRDQEAFYCMKPQHMPCEALTYMTTRNREVSYLTDKENSLFHRSKVGVEMMKDRKHIDVTNCNKREKIEETCQVGMKPPVPGGYTLQGKWITTFCNQVQLDTIKINGCLKGKLIYLLGDSTLRQWIYYFPKVVKTLKFFDLHETGIFKKHLLLDAERHTQIQWKKHSYPFVTFQLYSLIDHDYIPREIDRLSGDKNTAIVITFGQHFRPFPIDIFIRRAIGVQKAIERLFLRSPATKVIIKTENIREMHIETERFGDFHGYIHYLIMKDIFKDLNVGIIDAWDMTIAYGTDTIHPPDHVIGNQINMFLNYIC

SEQ ID NO: 56195 - protein, 62 aa, Homo sapiens
  Payload ID: 11042
  Gene Symbol: NXPE1
  Gene Name: neurexophilin and PC-esterase domain family, member 1
  ENSP ID: ENSP00000439503
MSSNTMLQKTLLILISFSVVTWMIFIISQNFTKLWSALNLSISVHYWNNSAKSLFPKTSLIP

SEQ ID NO: 56196 - protein, 121 aa, Homo sapiens
  Payload ID: 11042
  Gene Symbol: NXPE1
  Gene Name: neurexophilin and PC-esterase domain family, member 1
  ENSP ID: ENSP00000439779
MSSNTMLQKTLLILISFSVVTWMIFIISQNFTKLWSALNLSISVHYWNNSAKSLFPKTSLIPLKPLTETELRIKEIIEKLDQQIPPRPFTHVNTTTSATHSTATILNPRDTYCRGDQLDIL

SEQ ID NO: 56197 - protein, 295 aa, Homo sapiens
  Payload ID: 11042
  Gene Symbol: NXPE1
  Gene Name: neurexophilin and PC-esterase domain family, member 1
  ENSP ID: ENSP00000442984
MSSNTMLQKTLLILISFSVVTWMIFIISQNFTKLWSALNLSISVHYWNNSAKSLFPKTSLIPLKPLTETELRIKEIIEKLDQQIPPRPFTHVNTTTSATHSTATILNPRDTYCRGDQLDILLEVRDHLGQRKQYGGDFLRARMSSPALTAGASGKVMDFNNGTYLVSFTLFWEGQVSLSLLLIHPSEGASALWRARNQGYDKIIFKGKFVNGTSHVFTECGLTLNSNAELCEYLDDRDQEAFYCMKPQHMPCEALTYMTTRNREVSYLTDKENSLFHRMAPGETSIAGNQVQSGS

SEQ ID NO: 56198 - protein, 263 aa, Homo sapiens
  Payload ID: 11042
  Gene Symbol: NXPE1
  Gene Name: neurexophilin and PC-esterase domain family, member 1
  ENSP ID: ENSP00000445200
MMKDRKHIDVTNCNKREKIEETCQVGMKPPVPGGYTLQGKWITTFCNQVQLDTIKINGCLKGKLIYLLGDSTLRQWIYYFPKVVKTLKFFDLHETGIFKKHLLLDAERHTQIQWKKHSYPFVTFQLYSLIDHDYIPREIDRLSGDKNTAIVITFGQHFRPFPIDIFIRRAIGVQKAIERLFLRSPATKVIIKTENIREMHIETERFGDFHGYIHYLIMKDIFKDLNVGIIDAWDMTIAYGTDTIHPPDHVIGNQINMFLNYIC

SEQ ID NO: 56199 - protein, 559 aa, Homo sapiens
  Payload ID: 11043
  Gene Symbol: NXPE2
  Gene Name: neurexophilin and PC-esterase domain family, member 2
  Uniprot ID: Q96DL1
  ENSP ID: ENSP00000374237
MVEKILIHRILTLFPNAIARKLLLMLTFILIFWIIYLASKDHTKFSFNLENHIILNQGNIFKKYSHSETPLCPAVSPKETELRIKDIMEKLDQQIPPRPFTHVNTTTSATHSTATILNPQDTYCRGDQLDILLEVRDHLGHRKQYGGDFLRARMYSTALMAGASGKVTDFNNGTYLVSFTLFWEGQVSLSLLLIHPSEGVSALWRARNQGCDRIIFTGLFANRSSNVFTECGLTLNTNAELCQYMDDRDQEAFYCVRPQHMPCEALTHMTTRTRNISYLSKEEWRLFHRSNIGVEMMKNFTPIEVIPCNKSENIKKNCQIGMKTPFPSGYTLKKMWITAFCKQIKFNETKNINDCLERKLIYLMGDSTLHQWIYYLQKAVKTLKYFDHHGAGIFKTHVLLDVERHILIQWKKHGHPFVTKKLFSVKDENYIPREIDQVAGDKNTAIVITLGQHFRPFPINIFIRRAINIQKAIERLFLRSPETKVILKTENTREIEQNAEMFSDFHGYIQNLIIRDIFVDLNVGIIDAWDMTIAYCTNNAHPPDYVIQNQIGMFLNYIC

SEQ ID NO: 56200 - protein, 559 aa, Homo sapiens
  Payload ID: 11044
  Gene Symbol: NXPE3
  Gene Name: neurexophilin and PC-esterase domain family, member 3
  Uniprot ID: Q969Y0
  ENSP ID: ENSP00000273347
MWTNFFKLRLFCCLLAVLMVVVLVINVTQVEYLDHETVSATFIDSSGQFVSSQVTGISRNPYCGYDQQTLSSQERMEEDSLLAALHRQVPDVGPVPFVKSTDPSSSYFVILNSAAFFKVGSQLEVLVHVQDFQRKPKKYGGDYLQARIHSLKLQAGAVGRVVDYQNGFYKVFFTLLWPGKVKVSVSLVHPSEGIRVLQRLQEDKPDRVYFKSLFRSGRISETTECNVCLPGNLPLCNFTDLYTGEPWFCFKPKKLPCSSRITHFKGGYLKGLLTAAESAFFQSGVNIKMPVNSSGPDWVTVIPRRIKETNSLELSQGSGTFPSGYYYKDQWRPRKFKMRQFNDPDNITECLQRKVVHLFGDSTIRQWFEYLTTFVPDLVEFNLGSPKNVGPFLAVDQKHNILLKYRCHGPPIRFTTVFSNELHYVANELNGIVGGKNTVVAIAVWSHFSTFPLEVYIRRLRNIRRAVVRLLDRSPKTVVVIRTANAQELGPEVSLFNSDWYNFQLDTILRRMFSGVGVYLVDAWEMTLAHYLPHKLHPDEVIVKNQLDMFLSFVCPLET

SEQ ID NO: 56201 - protein, 559 aa, Homo sapiens; identical to SEQ ID NO: 56200
  Payload ID: 11044
  Gene Symbol: NXPE3
  Gene Name: neurexophilin and PC-esterase domain family, member 3
  Uniprot ID: Q969Y0
  ENSP ID: ENSP00000396421

SEQ ID NO: 56202 - protein, 559 aa, Homo sapiens; identical to SEQ ID NO: 56200
  Payload ID: 11044
  Gene Symbol: NXPE3
  Gene Name: neurexophilin and PC-esterase domain family, member 3
  Uniprot ID: Q969Y0
  ENSP ID: ENSP00000417485

SEQ ID NO: 56203 - protein, 559 aa, Homo sapiens; identical to SEQ ID NO: 56200
  Payload ID: 11044
  Gene Symbol: NXPE3
  Gene Name: neurexophilin and PC-esterase domain family, member 3
  Uniprot ID: Q969Y0
  ENSP ID: ENSP00000418369

SEQ ID NO: 56204 - protein, 3 aa, Homo sapiens
  Payload ID: 11044
  Gene Symbol: NXPE3
  Gene Name: neurexophilin and PC-esterase domain family, member 3
  ENSP ID: ENSP00000418381
MWT

SEQ ID NO: 56205 - protein, 53 aa, Homo sapiens
  Payload ID: 11044
  Gene Symbol: NXPE3
  Gene Name: neurexophilin and PC-esterase domain family, member 3
  ENSP ID: ENSP00000419667
MWTNFFKLRLFCCLLAVLMVVVLVINVTQVEYLDHETVSATFIDSSGQFVSSQ

SEQ ID NO: 56206 - protein, 89 aa, Homo sapiens
  Payload ID: 11044
  Gene Symbol: NXPE3
  Gene Name: neurexophilin and PC-esterase domain family, member 3
  ENSP ID: ENSP00000478069
MPVNSSGPDWVTVIPRRIKETNSLELSQGSGTFPSGYYYKDQWRPRKFKMRQFNDPTTLQSAYKEKWCIYLVTQQSGNGLNTLLHLFQI

SEQ ID NO: 56207 - protein, 544 aa, Homo sapiens
  Payload ID: 11045
  Gene Symbol: NXPE4
  Gene Name: neurexophilin and PC-esterase domain family, member 4
  Uniprot ID: Q6UWF7
  ENSP ID: ENSP00000364627
MKISMINYKSLLALLFILASWIIFTVFQNSTKVWSALNLSISLHYWNNSTKSLFPKTPLISLKPLTETELRIKEIIEKLDQQIPPRPFTHVNTTTSATHSTATILNPRDTYCRGDQLHILLEVRDHLGRRKQYGGDFLRARMSSPALMAGASGKVTDFNNGTYLVSFTLFWEGQVSLSLLLIHPSEGVSALWSARNQGYDRVIFTGQFVNGTSQVHSECGLILNTNAELCQYLDNRDQEGFYCVRPQHMPCAALTHMYSKNKKVSYLSKQEKSLFERSNVGVEIMEKFNTISVSKCNKETVAMKEKCKFGMTSTIPSGHVWRNTWNPVSCSLATVKMKECLRGKLIYLMGDSTIRQWMEYFKASINTLKSVDLHESGKLQHQLAVDLDRNINIQWQKYCYPLIGSMTYSVKEMEYLTRAIDRTGGEKNTVIVISLGQHFRPFPIDVFIRRALNVHKAIQHLLLRSPDTMVIIKTENIREMYNDAERFSDFHGYIQYLIIKDIFQDLSVSIIDAWDITIAYGTNNVHPPQHVVGNQINILLNYIC

SEQ ID NO: 56208 - protein, 260 aa, Homo sapiens
  Payload ID: 11045
  Gene Symbol: NXPE4
  Gene Name: neurexophilin and PC-esterase domain family, member 4
  Uniprot ID: Q6UWF7
  ENSP ID: ENSP00000401503
MEKFNTISVSKCNKETVAMKEKCKFGMTSTIPSGHVWRNTWNPVSCSLATVKMKECLRGKLIYLMGDSTIRQWMEYFKASINTLKSVDLHESGKLQHQLAVDLDRNINIQWQKYCYPLIGSMTYSVKEMEYLTRAIDRTGGEKNTVIVISLGQHFRPFPIDVFIRRALNVHKAIQHLLLRSPDTMVIIKTENIREMYNDAERFSDFHGYIQYLIIKDIFQDLSVSIIDAWDITIAYGTNNVHPPQHVVGNQINILLNYIC

SEQ ID NO: 56209 - protein, 142 aa, Homo sapiens
  Payload ID: 11046
  Gene Symbol: NRN1
  Gene Name: neuritin 1
  Uniprot ID: Q9NPD7
  ENSP ID: ENSP00000244766
MGLKLNGRYISLILAVQIAYLVQAVRAAGKCDAVFKGFSDCLLKLGDSMANYPQGLDDKTNIKTVCTYWEDFHSCTVTALTDCQEGAKDMWDKLRKESKNLNIQGSLFELCGSGNGAAGSLLPAFPVLLVSLSAALATWLSF

SEQ ID NO: 56210 - protein, 168 aa, Homo sapiens
  Payload ID: 11046
  Gene Symbol: NRN1
  Gene Name: neuritin 1
  ENSP ID: ENSP00000480483
MATAARPQPDHSSSAPGLRTSRLPSFQRGGRGCIRGSHSEYRVHAYLVQAVRAAGKCDAVFKGFSDCLLKLGDSMANYPQGLDDKTNIKTVCTYWEDFHSCTVTALTDCQEGAKDMWDKLRKESKNLNIQGSLFELCGSGNGAAGSLLPAFPVLLVSLSAALATWLSF

SEQ ID NO: 56211 - protein, 142 aa, Homo sapiens; identical to SEQ ID NO: 56209
  Payload ID: 11046
  Gene Symbol: NRN1
  Gene Name: neuritin 1
  Uniprot ID: Q9NPD7
  ENSP ID: ENSP00000484055

SEQ ID NO: 56212 - protein, 165 aa, Homo sapiens
  Payload ID: 11047
  Gene Symbol: NRN1L
  Gene Name: neuritin 1-like
  Uniprot ID: Q496H8
  ENSP ID: ENSP00000342411
MMRCCRRRCCCRQPPHALRPLLLLPLVLLPPLAAAAAGPNRCDTIYQGFAECLIRLGDSMGRGGELETICRSWNDFHACASQVLSGCPEEAAAVWESLQQEARQAPRPNNLHTLCGAPVHVRERGTGSETNQETLRATAPALPMAPAPPLLAAALALAYLLRPLA

SEQ ID NO: 56213 - protein, 88 aa, Homo sapiens
  Payload ID: 11047
  Gene Symbol: NRN1L
  Gene Name: neuritin 1-like
  ENSP ID: ENSP00000459748
  MOD_RES (1)..(1): Any amino acid
XRCCRRRCCCRQPPHALRPLLLLPLVLLPPLAAAAAGPNRCDTIYQGFAECLIRLGDSMGRGGELETICSTVDKEYLIVLREPGGWMS

SEQ ID NO: 56214 - protein, 87 aa, Homo sapiens
  Payload ID: 11047
  Gene Symbol: NRN1L
  Gene Name: neuritin 1-like
  ENSP ID: ENSP00000464568
MTSMPVPLRSCQAVRRRQLQCGNHYSKKLARPPVRITCTLCAVPRCMFGSAAQAPKPTRRRCGLQRLHSPWPLRPHCWRLLWLWPTS

SEQ ID NO: 56215 - protein, 2947 aa, Homo sapiens [sequence omitted]

SEQ ID NO: 56216 - protein, 524 aa, Homo sapiens
  Payload ID: 11048
  Gene Symbol: NBEA
  Gene Name: neurobeachin
  Uniprot ID: Q8NFP9
  ENSP ID: ENSP00000369254
MFVNSNGYNLGVREDEVVVNDVDLPPWAKKPEDFVRINRMALESEFVSCQLHQWIDLIFGYKQRGPEAVRALNVFHYLTYEGSVNLDSITDPVLREIPEAYFIRDPHTFLLTKDFIKAMEAQIQNFGQTPSQLLIEPHPPRSSAMHLCFLPQSPLMFKDQMQQDVIMVLKFPSNSPVTHVAANTLPHLTIPAVVTVTCSRLFAVNRWHNTVGLRGAPGYSLDQAHHLPIEMDPLIANNSGVNKRQITDLVDQSIQINAHCFVVTADNRYILICGFWDKSFRVYSTETGKLTQIVFGHWDVVTCLARSESYIGGDCYIVSGSRDATLLLWYWSGRHHIIGDNPNSSDYPAPRAVLTGHDHEVVCVSVCAELGLVISGAKEGPCLVHTITGDLLRALEGPENCLFPRLISVSSEGHCIIYYERGRFSNFSINGKLLAQMEINDSTRAILLSSDGQNLVTGGDNGVVEVWQACDFKQLYIYPGCDAGIRAMDLSHDQRTLITGMASGSIVAFNIDFNRWHYEHQNRY

SEQ ID NO: 56217 - protein, 2943 aa, Homo sapiens
  Payload ID: 11048
  Gene Symbol: NBEA
  Gene Name: neurobeachin
  ENSP ID: ENSP00000369271
MASEKPGPGPGLEPQPVGLIAVGAAGGGGGGSGGGGTGGSGMGELRGASGSGSVMLPAGMINPSVPIRNIRMKFAVLIGLIQVGEVSNRDIVETVLNLLVGGEFDLEMNFIIQDAESITCMTELLEHCDVTCQAEIWSMFTAILRKSVRNLQTSTEVGLIEQVLLKMSAVDDMIADLLVDMLGVLASYSITVKELKLLFSMLRGESGIWPRHAVKLLSVLNQMPQRHGPDTFFNFPGCSAAAIALPPIAKWPYQNGFTLNTWFRMDPLNNINVDKDKPYLYCFRTSKGVGYSAHFVGNCLIVTSLKSKGKGFQHCVKYDFQPRKWYMISIVHIYNRWRNSEIRCYVNGQLVSYGDMAWHVNTNDSYDKCFLGSSETADANRVFCGQLGAVYVFSEALNPAQIFAIHQLGPGYKSTFKFKSESDIHLAEHHKQVLYDGKLASSIAFTYNAKATDAQLCLESSPKENASIFVHSPHALMLQDVKAIVTHSIHSAIHSIGGIQVLFPLFAQLDNRQLNDSQVETTVCATLLAFLVELLKSSVAMQEQMLGGKGFLVIGYLLEKSSRVHITRAVLEQFLSFAKYLDGLSHGAPLLKQLCDHILFNPAIWIHTPAKVQLSLYTYLSAEFIGTATIYTTIRRVGTVLQLMHTLKYYYWVINPADSSGITPKGLDGPRPSQKEIISLRAFMLLFLKQLILKDRGVKEDELQSILNYLLTMHEDENIHDVLQLLVALMSEHPASMIPAFDQRNGIRVIYKLLASKSESIWVQALKVLGYFLKHLGHKRKVEIMHTHSLFTLLGERLMLHTNTVTVTTYNTLYEILTEQVCTQVVHKPHPEPDSTVKIQNPMILKVVATLLKNSTPSAELMEVRRLFLSDMIKLFSNSRENRRCLLQCSVWQDWMFSLGYINPKNSEEQKITEMVYNIFRILLYHAIKYEWGGWRVWVDTLSIAHSKVTYEAHKEYLAKMYEEYQRQEEENIKKGKKGNVSTISGLSSQTTGAKGGMEIREIEDLSQSQSPESETDYPVSTDTRDLLMSTKVSDDILGNSDRPGSGVHVEVHDLLVDIKAEKVEATEVKLDDMDLSPETLVGGENGALVEVESLLDNVYSAAVEKLQNNVHGSVGIIKKNEEKDNGPLITLADEKEDLPNSSTSFLFDKIPKQEEKLLPELSSNHIIPNIQDTQVHLGVSDDLGLLAHMTGSVDLTCTSSIIEEKEFKIHTTSDGMSSISERDLASSTKGLEYAEMTATTLETESSSSKIVPNIDAGSIISDTERSDDGKESGKEIRKIQTTTTTQAVQGRSITQQDRDLRVDLGFRGMPMTEEQRRQFSPGPRTTMFRIPEFKWSPMHQRLLTDLLFALETDVHVWRSHSTKSVMDFVNSNENIIFVHNTIHLISQMVDNIIIACGGILPLLSAATSPTTELENIEVTQGMSAETAVTFLSRLMAMVDVLVFASSLNFSEIEAEKNMSSGGLMRQCLRLVCCVAVRNCLECRQRQRDRGNKSSHGSSKPQEVPQSVTATAASKTPLENVPGNLSPIKDPDRLLQDVDINRLRAVVFRDVDDSKQAQFLALAVVYFISVLMVSKYRDILEPQRETTRTGSQPGRNIRQEINSPTSTVVVIPSIPHPSLNHGFLAKLIPEQSFGHSFYKETPAAFPDTIKEKETPTPGEDIQVESSIPHTDSGIGEEQVASILNGAELETSTGPDAMSELLSTLSSEVKKSQESLTENPSETLKPATSISSISQTKGINVKEILKSLVAAPVEIAECGPEPIPYPDPALKRETQAILPMQFHSFDRSVVVPVKKPPPGSLAVTTVGATTAGSGLPTGSTSNIFAATGATPKSMINTTGAVDSGSSSSSSSSSFVNGATSKNLPAVQTVAPMPEDSAENMSITAKLERALEKVAPLLREIFVDFAPFLSRTLLGSHGQELLIEGLVCMKSSTSVVELVMLLCSQEWQNSIQKNAGLAFIELINEGRLLCHAMKDHIVRVANEAEFILNRQRAEDVHKHAEFESQCAQYAADRREEEKMCDHLISAAKHRDHVTANQLKQKILNILTNKHGAWGAVSHSQLHDFWRLDYWEDDLRRRRRFVRNAFGSTHAEALLKAAIEYGTEEDVVKSKKTFRSQAIVNQNAETELMLEGDDDAVSLLQEKEIDNLAGPVVLSTPAQLIAPVVVAKGTLSITTTEIYFEVDEDDSAFKKIDTKVLAYTEGLHGKWMFSEIRAVFSRRYLLQNTALEVFMANRTSVMFNFPDQATVKKVVYSLPRVGVGTSYGLPQARRISLATPRQLYKSSNMTQRWQRREISNFEYLMFLNTIAGRTYNDLNQYPVFPWVLTNYESEELDLTLPGNFRDLSKPIGALNPKRAVFYAERYETWEDDQSPPYHYNTHYSTATSTLSWLVRIEPFTTFFLNANDGKFDHPDRTFSSVARSWRTSQRDTSDVKELIPEFYYLPEMFVNSNGYNLGVREDEVVVNDVDLPPWAKKPEDFVRINRMALESEFVSCQLHQWIDLIFGYKQRGPEAVRALNVFHYLTYEGSVNLDSITDPVLREAMEAQIQNFGQTPSQLLIEPHPPRSSAMHLCFLPQSPLMFKDQMQQDVIMVLKFPSNSPVTHVAANTLPHLTIPAVVTVTCSRLFAVNRWHNTVGLRGAPGYSLDQAHHLPIEMDPLIANNSGVNKRQITDLVDQSIQINAHCFVVTADNRYILICGFWDKSFRVYSTETGKLTQIVFGHWDVVTCLARSESYIGGDCYIVSGSRDATLLLWYWSGRHHIIGDNPNSSDYPAPRAVLTGHDHEVVCVSVCAELGLVISGAKEGPCLVHTITGDLLRALEGPENCLFPRLISVSSEGHCIIYYERGRFSNFSINGKLLAQMEINDSTRAILLSSDGQNLVTGGDNGVVEVWQACDFKQLYIYPGCDAGIRAMDLSHDQRTLITGMASGSIVAFNIDFNRWHYEHQNRY

SEQ ID NO: 56218 - protein, 2946 aa, Homo sapiens
  Payload ID: 11048
  Gene Symbol: NBEA
  Gene Name: neurobeachin
  Uniprot ID: Q8NFP9
  ENSP ID: ENSP00000383295
MASEKPGPGPGLEPQPVGLIAVGAAGGGGGGSGGGGTGGSGMGELRGASGSGSVMLPAGMINPSVPIRNIRMKFAVLIGLIQVGEVSNRDIVETVLNLLVGGEFDLEMNFIIQDAESITCMTELLEHCDVTCQAEIWSMFTAILRKSVRNLQTSTEVGLIEQVLLKMSAVDDMIADLLVDMLGVLASYSITVKELKLLFSMLRGESGIWPRHAVKLLSVLNQMPQRHGPDTFFNFPGCSAAAIALPPIAKWPYQNGFTLNTWFRMDPLNNINVDKDKPYLYCFRTSKGVGYSAHFVGNCLIVTSLKSKGKGFQHCVKYDFQPRKWYMISIVHIYNRWRNSEIRCYVNGQLVSYGDMAWHVNTNDSYDKCFLGSSETADANRVFCGQLGAVYVFSEALNPAQIFAIHQLGPGYKSTFKFKSESDIHLAEHHKQVLYDGKLASSIAFTYNAKATDAQLCLESSPKENASIFVHSPHALMLQDVKAIVTHSIHSAIHSIGGIQVLFPLFAQLDNRQLNDSQVETTVCATLLAFLVELLKSSVAMQEQMLGGKGFLVIGYLLEKSSRVHITRAVLEQFLSFAKYLDGLSHGAPLLKQLCDHILFNPAIWIHTPAKVQLSLYTYLSAEFIGTATIYTTIRRVGTVLQLMHTLKYYYWVINPADSSGITPKGLDGPRPSQKEIISLRAFMLLFLKQLILKDRGVKEDELQSILNYLLTMHEDENIHDVLQLLVALMSEHPASMIPAFDQRNGIRVIYKLLASKSESIWVQALKVLGYFLKHLGHKRKVEIMHTHSLFTLLGERLMLHTNTVTVTTYNTLYEILTEQVCTQVVHKPHPEPDSTVKIQNPMILKVVATLLKNSTPSAELMEVRRLFLSDMIKLFSNSRENRRCLLQCSVWQDWMFSLGYINPKNSEEQKITEMVYNIFRILLYHAIKYEWGGWRVWVDTLSIAHSKVTYEAHKEYLAKMYEEYQRQEEENIKKGKKGNVSTISGLSSQTTGAKGGMEIREIEDLSQSQSPESETDYPVSTDTRDLLMSTKVSDDILGNSDRPGSGVHVEVHDLLVDIKAEKVEATEVKLDDMDLSPETLVGGENGALVEVESLLDNVYSAAVEKLQNNVHGSVGIIKKNEEKDNGPLITLADEKEDLPNSSTSFLFDKIPKQEEKLLPELSSNHIIPNIQDTQVHLGVSDDLGLLAHMTGSVDLTCTSSIIEEKEFKIHTTSDGMSSISERDLASSTKGLEYAEMTATTLETESSSSKIVPNIDAGSIISDTERSDDGKESGKEIRKIQTTTTTQAVQGRSITQQDRDLRVDLGFRGMPMTEEQRRQFSPGPRTTMFRIPEFKWSPMHQRLLTDLLFALETDVHVWRSHSTKSVMDFVNSNENIIFVHNTIHLISQMVDNIIIACGGILPLLSAATSPTGSKTELENIEVTQGMSAETAVTFLSRLMAMVDVLVFASSLNFSEIEAEKNMSSGGLMRQCLRLVCCVAVRNCLECRQRQRDRGNKSSHGSSKPQEVPQSVTATAASKTPLENVPGNLSPIKDPDRLLQDVDINRLRAVVFRDVDDSKQAQFLALAVVYFISVLMVSKYRDILEPQRETTRTGSQPGRNIRQEINSPTSTVVVIPSIPHPSLNHGFLAKLIPEQSFGHSFYKETPAAFPDTIKEKETPTPGEDIQVESSIPHTDSGIGEEQVASILNGAELETSTGPDAMSELLSTLSSEVKKSQESLTENPSETLKPATSISSISQTKGINVKEILKSLVAAPVEIAECGPEPIPYPDPALKRETQAILPMQFHSFDRSVVVPVKKPPPGSLAVTTVGATTAGSGLPTGSTSNIFAATGATPKSMINTTGAVDSGSSSSSSSSSFVNGATSKNLPAVQTVAPMPEDSAENMSITAKLERALEKVAPLLREIFVDFAPFLSRTLLGSHGQELLIEGLVCMKSSTSVVELVMLLCSQEWQNSIQKNAGLAFIELINEGRLLCHAMKDHIVRVANEAEFILNRQRAEDVHKHAEFESQCAQYAADRREEEKMCDHLISAAKHRDHVTANQLKQKILNILTNKHGAWGAVSHSQLHDFWRLDYWEDDLRRRRRFVRNAFGSTHAEALLKAAIEYGTEEDVVKSKKTFRSQAIVNQNAETELMLEGDDDAVSLLQEKEIDNLAGPVVLSTPAQLIAPVVVAKGTLSITTTEIYFEVDEDDSAFKKIDTKVLAYTEGLHGKWMFSEIRAVFSRRYLLQNTALEVFMANRTSVMFNFPDQATVKKVVYSLPRVGVGTSYGLPQARRISLATPRQLYKSSNMTQRWQRREISNFEYLMFLNTIAGRTYNDLNQYPVFPWVLTNYESEELDLTLPGNFRDLSKPIGALNPKRAVFYAERYETWEDDQSPPYHYNTHYSTATSTLSWLVRIEPFTTFFLNANDGKFDHPDRTFSSVARSWRTSQRDTSDVKELIPEFYYLPEMFVNSNGYNLGVREDEVVVNDVDLPPWAKKPEDFVRINRMALESEFVSCQLHQWIDLIFGYKQRGPEAVRALNVFHYLTYEGSVNLDSITDPVLREAMEAQIQNFGQTPSQLLIEPHPPRSSAMHLCFLPQSPLMFKDQMQQDVIMVLKFPSNSPVTHVAANTLPHLTIPAVVTVTCSRLFAVNRWHNTVGLRGAPGYSLDQAHHLPIEMDPLIANNSGVNKRQITDLVDQSIQINAHCFVVTADNRYILICGFWDKSFRVYSTETGKLTQIVFGHWDVVTCLARSESYIGGDCYIVSGSRDATLLLWYWSGRHHIIGDNPNSSDYPAPRAVLTGHDHEVVCVSVCAELGLVISGAKEGPCLVHTITGDLLRALEGPENCLFPRLISVSSEGHCIIYYERGRFSNFSINGKLLAQMEINDSTRAILLSSDGQNLVTGGDNGVVEVWQACDFKQLYIYPGCDAGIRAMDLSHDQRTLITGMASGSIVAFNIDFNRWHYEHQNRY

SEQ ID NO: 56219 - protein, 739 aa, Homo sapiens
  Payload ID: 11048
  Gene Symbol: NBEA
  Gene Name: neurobeachin
  Uniprot ID: Q8NFP9
  ENSP ID: ENSP00000440233
MFSEIRAVFSRRYLLQNTALEVFMANRTSVMFNFPDQATVKKVVYSLPRVGVGTSYGLPQARRISLATPRQLYKSSNMTQRWQRREISNFEYLMFLNTIAGRTYNDLNQYPVFPWVLTNYESEELDLTLPGNFRDLSKPIGALNPKRAVFYAERYETWEDDQSPPYHYNTHYSTATSTLSWLVRIEPFTTFFLNANDGKFDHPDRTFSSVARSWRTSQRDTSDVKELIPEFYYLPEMFVNSNGYNLGVREDEVVVNDVDLPPWAKKPEDFVRINRMALESEFVSCQLHQWIDLIFGYKQRGPEAVRALNVFHYLTYEGSVNLDSITDPVLREAMEAQIQNFGQTPSQLLIEPHPPRSSAMHLCFLPQSPLMFKDQMQQDVIMVLKFPSNSPVTHVAANTLPHLTIPAVVTVTCSRLFAVNRWHNTVGLRGAPGYSLDQAHHLPIEMDPLIANNSGVNKRQITDLVDQSIQINAHCFVVTADNRYILICGFWDKSFRVYSTETGKLTQIVFGHWDVVTCLARSESYIGGDCYIVSGSRDATLLLWYWSGRHHIIGDNPNSSDYPAPRAVLTGHDHEVVCVSVCAELGLVISGAKEGPCLVHTITGDLLRALEGPENCLFPRLISVSSEGHCIIYYERGRFSNFSINGKLLAQMEINDSTRAILLSSDGQNLVTGGDNGVVEVWQACDFKQLYIYPGCDAGIRAMDLSHDQRTLITGMASGSIVAFNIDFNRWHYEHQNRY

SEQ ID NO: 56220 - protein, 2946 aa, Homo sapiens [sequence omitted]

SEQ ID NO: 56221 - protein, 709 aa, Homo sapiens
  Payload ID: 11049
  Gene Symbol: NBEAL1
  Gene Name: neurobeachin-like 1
  ENSP ID: ENSP00000388466
EIFHVDQSNYFLNFKKEVRNKIYSRLLSLHSPNSYYGSRSPQELFKASGLTQFPWILQDYTSEELDLNNPAVFRDLSKPIGVVNEKNAKAMREKYENFEDPMGTIDKFHYGTHYSNSAGVMHYLIRVEPFTTLHIQLQSGRFDCADRQFHSIPATWQALMDNPYDVKELIPEFFYFPEFLENQNQFNLGRLQISKELVNDVILPKWAKSAEDFIYKHRKALESEYVSAHLHEWIDLIFGYKQRGPAAVEALNVFYYCSYEGAVDLDALTDEKERKALEGMINNFGQTPCQLLKEPHPPRLSAEEAVQKPTKIDTSTLNLFQHLPELKSFFIEGISDGIPLLKATIPKNQYRSFMSQGSPELLITISMNYVIGTHGWLPYDRNISNYFTFIKDQTVTNPKTQRSINGSFAPGLEITSKLFVVSHDAKLLFSAGYWDNSIQVMSLTKGKIISHIIRHMDIVTCLATDYCGIHLISGSRDTTCMIWQITQQGGVPVGLASKPFQILYGHTNEVLSVGISTELDMAVSGSRDGTVIIHTIQKGQYMRTLRPPCESSLFLTIPNLAISWEGHIVVYSSTEEKTTLKDKNALHLFSINGKYLGSQILKEQVSDICIIGEHIVTGSIQGFLSIRDLHSLNLSINPLAMRLPIHCVCVTKEYSHILVGLEDGKLIVVGVGKPAEMRSGQLSRKFWGSSKRLSQISAGETEYNTQDSK

SEQ ID NO: 56222 - protein, 2694 aa, Homo sapiens
  Payload ID: 11049
  Gene Symbol: NBEAL1
  Gene Name: neurobeachin-like 1
  Uniprot ID: Q6ZS30
  ENSP ID: ENSP00000399903
MASRERLFELWMLYCTKKDPDYLKLWLDTFVSSYEQFLDVDFEKLPTRVDDMPPGISLLPDNILQVLRIQLLQCVQKMADGLEEQQQALSILLVKFFIILCRNLSNVEEIGTCSYINYVITMTTLYIQQLKSKKKEKEMADQTCIEEFVIHALAFCESLYDPYRNWRHRISGRILSTVEKSRQKYKPASLTVEFVPFFYQCFQESEHLKESLKCCLLHLFGAIVAGGQRNALQAISPATMEVLMRVLADCDSWEDGDPEEVGRKAELTLKCLTEVVHILLSSNSDQRQVETSTILENYFKLLNSDHSALPNQRRSRQWENRFIALQIKMLNTITAMLDCTDRPVLQAIFLNSNCFEHLIRLLQNCKVFQGQLDCLAISTIQALTAVMNKSPAAKEVFKERIGYTHMLEVLKSLGQPPLELLKELMNMAVEGDHTSVGILGISNVQPLLLLIQWLPELQSHDLQIFISDWLKRICCINRQSRTTCVNANMGIRIIETLDLHSSLHQTCAENLIAIHGSLGSQSVSSEEIRRLLRLLRVDESESVHPYVTPVTRAILTMARKLSLESALQYFNLSHSMAGISVPPIQKWPGSAFSFSAWFCLDQDQLTLGIANKGGKRKQLYSFFTGSGMGFEAFITHSGMLVVAVCTKREYATVMLPDHSFCDSLWHNITVVHMPGKRPFGQSFVYIYDNGQQKVSAPLRFPAMNEPFTSCCIGSAGQRTTTPPPSQIPDPPFSSPITPHRTSFGGILSSASWGGTIEKSKLITKLISAGTQDSEWGCPTSLEGQLGSVIIFYEPLQPPQVKALYLAGPNCLSPWKCQESDMADLPGNILLYYTAKACKNSICLDLSTNCLHGRLTGNKVVNWDIKDIINCIGGLNVLFPLLEQISHFSEGQIPEEKNESTVPESVTPVEGDWLVWTSTKASESRLERNLVATFILIVKHFIQRHPINQGNLIHSHGVATLGALLQKVPSTLMDVNVLMAVQLLIEQVSLEKNMQLLQQMYQYLLFDFRIWNRGDFPFRIGHIQYLSTIIKDSRRVFRKKYGVQFLLDTLRIYYGNGCKYNELSLDDIRTIRTSLYGLIKYFLCKGGSHEEIQSIMGYIAATNEEEQLFGILDVLFSLLRTSPTRGQLFLLLFEPGNADILYALLLNQKYSDRLREIIFKIMEQMLKCTNVYERSKQHIRLREVGYSGLGLLLNEALVNTSLIKNLTHQIINTDPVINFKDLLSVVYISHRAHINVRVAICRKVLQILQFQPDAAHQISQQVGWQDTLVRLFLKAKFENGNTLHKHSRAVLMKDNDKNMSTEDTKKNSDEKTDEEKITSFASANVSSDQWSLEDRHSLDSNTPLFPEDSSVGELSFKSENQEEFWHSNPSHLSLDLSGIDSCEMSDSGSQVPDSLPSTPSPVESTKSFSVHSDRESSITNDMGFSDDFSLLESQERCEEELLQLLTHILNYVMCKGLEKSDDDTWIERGQVFSALSKPGISSELLRPSDEIKLTLLQKMLEWAISENREAKTNPVTAENAFRLVLIIQDFLQSEGLVNSNMWTEKLLEDMMLLFDCLSVCYSESPVWVKLSQIQIQLLLGFIGRGNLQVCAMASAKLNTLLQTKVIENQDEACYILGKLEHVLSQSIKEQTEIYSFLIPLVRTLVSKIYELLFMNLHLPSLPFTNGSSSFFEDFQEYCNSNEWQVYIEKYIVPYMKQYEAHTFYDGHENMALYWKDCYEALMVNMHKRDREGGESKLKFQELFVEPFNRKARQENLRYNNMLKQLSSQQLATLRRWKAIQLYLTCERGPWAKRKQNPIHWKLANVENYSRMRLKLVPNYNFKTHEEASALRDNLGIQHSQPSSDTLLLEVVKQVKVSDMVEDKLDLPEEDITARVNVDEKEEQDQKEKLVLMEDCELITIIDVIPGRLEITTQHIYFYDGSIEKEDGVGFDFKWPHSQIREIHLRRYNLRRSALEIFHVDQSNYFLNFKKEVRNKIYSRLLSLHSPNSYYGSRSPQELFKASGLTQKWVNREISNFDYLIQINTMAGRTYNDLAQYPVFPWILQDYTSEELDLNNPAVFRDLSKPIGVVNEKNAKAMREKYENFEDPMGTIDKFHYGTHYSNSAGVMHYLIRVEPFTTLHIQLQSGRFDCADRQFHSIPATWQALMDNPYDVKELIPEFFYFPEFLENQNQFNLGRLQISKELVNDVILPKWAKSAEDFIYKHRKALESEYVSAHLHEWIDLIFGYKQRGPAAVEALNVFYYCSYEGAVDLDALTDEKERKALEGMINNFGQTPCQLLKEPHPPRLSAEEAVQKPTKIDTSTLNLFQHLPELKSFFIEGISDGIPLLKATIPKNQYRSFMSQGSPELLITISMNYVIGTHGWLPYDRNISNYFTFIKDQTVTNPKTQRSINGSFAPGLEITSKLFVVSHDAKLLFSAGYWDNSIQVMSLTKGKIISHIIRHMDIVTCLATDYCGIHLISGSRDTTCMIWQITQQGGVPVGLASKPFQILYGHTNEVLSVGISTELDMAVSGSRDGTVIIHTIQKGQYMRTLRPPCESSLFLTIPNLAISWEGHIVVYSSTEEKTTLKDKNALHLFSINGKYLGSQILKEQVSDICIIGEHIVTGSIQGFLSIRDLHSLNLSINPLAMRLPIHCVCVTKEYSHILVGLEDGKLIVVGVGKPAEMRSGQLSRKFWGSSKRLSQISAGETEYNTQDSK

SEQ ID NO: 56223 - protein, 230 aa, Homo sapiens
  Payload ID: 11049
  Gene Symbol: NBEAL1
  Gene Name: neurobeachin-like 1
  ENSP ID: ENSP00000411142
  MOD_RES (1)..(1): Any amino acid
XGGVPVGLASKPFQILYGHTNEVLSVGISTELDMAVSGSRDGTVIIHTIQKGQYMRTLRPPCESSLFLTIPNLAISWEGHIVVYSSTEEKTTLKDKNALHLFSINGKYLGSQILKEQVSDICIIGEHIVTGSIQGFLSIRDLHSLNLSINPLAMRLPIHCVCVTKEYSHILVGLEDGKLIVVGVGKPAEMRSGQLSRKFWGSSKRLSQISAGETEYNTQDSKSRITKQQR

SEQ ID NO: 56224 - protein, 107 aa, Homo sapiens
  Payload ID: 11050
  Gene Symbol: NBEAL2
  Gene Name: neurobeachin-like 2
  ENSP ID: ENSP00000409601
IDQANYFLNFPCKVGTTPVSSPSQTPRPQPGPIPPHTQVRNQVYSWLLRLRPPSQGYLSSRSPQEMLRASGLTQKWVQREISNFEYLMQLNTIAGRTYNDLSQYPVV

SEQ ID NO: 56225 - protein, 2042 aa, Homo sapiens
  Payload ID: 11050
  Gene Symbol: NBEAL2
  Gene Name: neurobeachin-like 2
  ENSP ID: ENSP00000410405
  MOD_RES (1)..(1): Any amino acid
XPMELRHLLRPRPGLDSEPGGAEAGKARHAGAVIRTLSGMARHQGPARALRYFDLTPSMAGIMVPPVQRWPGPGFTFHAWLCLHPMDTAPTPAPTRPLQRKQLYSFFTSSGSGFEAFFTAAGTLVVAVCTRKEYLTMSLPEVSFADSAWHCVAIVHVPGRRPFSQNLVHVYKDGHLVKTAPLRCPSLSEPFSSCCIGSAGYRTTTTTTGLPTPPVPATLAYTHPALTRSQSVPASTGLGWGSGLVAPLQEGSIDSTLAGTQDTRWGSPTSLEGELGAVAIFHEALQATALRTLCTLGPNETAPFKPEGELHELSTRLLLHYSPQACKNNICLDLSPSHGLDGRLTGHRVETWDVKDVVNCVGGMGALLPLLERVAAQPKEAEAGPAETHDLVGPELTSGHNTQGLVLPLGKSSEERMERNAVAAFLLMLRNFLQGHMVNQESLVQCQGPAIIGALLRKVPSWAMDMNVLMSAQLLMEQVAAEGSGPLLYLLYQHLLFNFHLWTLSDFAVRLGHIQYMSSIVREHRQKLRKKYGVQFILDALRTHYSPQRERPLAADDLRTVQTSLLGLAREFLVRSLSADDVQVTQTMLSFLAATGDDGQILRRLQQNERLPERSRQRLRLRECGLQGLVACLPEGTVSPQLCQGLYKLFLGAGSGNTAGGGGSSGTLTPASQPGTPSPLDGPRPFPAAPGRHSSSLSNVLEDGSLPEPTISGDDTSNTSNPQQTSEEELCNLLTNVLFSVTWRGVEGSDEAAWRERGQVFSVLTQLGASATLVRPPDCIKRSLLEMMLESALTDIKEAPVGVLASLTQQALWLLRLLQDFLCAEGHGNQELWSEKLFEGVCSLLDRLGAWPHLANGTADLREMAQIGLRLVLGYILLEDPQLHAQAYVRLHMLLQTAVPARREEACYVLSKLEAALGRVLNTSSLESATDEAGSPLAAAAAAAAAERCSWLVPLVRTLLDRAYEPLGLQWGLPSLPPTNGSPTFFEDFQAFCATPEWRHFIDKQVQPTMSQFEMDTYAKSHDLMSGFWNACYDMLMSSGQRRQWERAQSRRAFQELVLEPAQRRARLEGLRYTAVLKQQATQHSMALLHWGALWRQLASPCGAWALRDTPIPRWKLSSAETYSRMRLKLVPNHHFDPHLEASALRDNLGEVPLTPTEEASLPLAVTKEAKVSTPPELLQEDQLGEDELAELETPMEAAELDEQREKLVLSAECQLVTVVAVVPGLLEVTTQNVYFYDGSTERVETEEGIGYDFRRPLAQLREVHLRRFNLRRSALELFFIDQANYFLNFPCKVGTTPVSSPSQTPRPQPGPIPPHTQVRNQVYSWLLRLRPPSQGYLSSRSPQEMLRASGLTQKWVQREISNFEYLMQLNTIAGRTYNDLSQYPVFPWVLQDYVSPTLDLSNPAVFRDLSKPIGVVNPKHAQLVREKYESFEDPAGTIDKFHYGTHYSNAAGVMHYLIRVEPFTSLHVQLQSGRFDCSDRQFHSVAAAWQARLESPADVKELIPEFFYFPDFLENQNGFDLGCLQLTNEKVGDVVLPPWASSPEDFIQQHRQALESEYVSAHLHEWIDLIFGYKQRGPAAEEALNVFYYCTYEGAVDLDHVTDERERKALEGIISNFGQTPCQLLKEPHPTRLSAEEAAHRLARLDTNSPSIFQHLDELKAFFAEVVSDGVPLVLALVPHRQPHSFITQGSPDLLVTVSASGLLGTHSWLPYDRNISNYFSFSKDPTMGSHKTQRLLSGPWVPGSGVSGQALAVAPDGKLLFSGGHWDGSLRVTALPRGKLLSQLSCHLDVVTCLALDTCGIYLISGSRDTTCMVWRLLHQGGLSVGLAPKPVQVLYGHGAAVSCVAISTELDMAVSGSEDGTVIIHTVRRGQFVAALRPLGATFPGPIFHLALGSEGQIVVQSSAWERPGAQVTYSLHLYSVNGKLRASLPLAEQPTALTVTEDFVLLGTAQCALHILQLNTLLPAAPPLPMKVAIRSVAVTKERSHVLVGLEDGKLIVVVAGQPSEVRSSQFARKLWRSSRRISQVSSGETEYNPTEAR

SEQ ID NO: 56226 - protein, 1093 aa, Homo sapiens
  Payload ID: 11050
  Gene Symbol: NBEAL2
  Gene Name: neurobeachin-like 2
  ENSP ID: ENSP00000414560
  MOD_RES (1)..(1): Any amino acid
XLNTSSLESATDEAGSPLAAAAAAAAAERCSWLVPLVRTLLDRAYEPLGLQWGLPSLPPTNGSPTFFEDFQAFCATPEWRHFIDKQVQPTMSQFEMDTYAKSHDLMSGFWNACYDMLMSSGQRRQWERAQSRRAFQELVLEPAQRRARLEGLRYTAVLKQQATQHSMALLHWGALWRQLASPCGAWALRDTPIPRWKLSSAETYSRMRLKLVPNHHFDPHLEASALRDNLGEVPLTPTEEASLPLAVTKEAKVSTPPELLQEDQLGEDELAELETPMEAAELDEQREKLVLSAECQLVTVVAVVPGLLEVTTQNVYFYDGSTERVETEEGIGYDFRRPLAQLREVHLRRFNLRRSALELFFIDQANYFLNFPCKVGTTPVSSPSQTPRPQPGPIPPHTQVRNQVYSWLLRLRPPSQGYLSSRSPQEMLRASGLTQKWVQREISNFEYLMQLNTIAGRTYNDLSQYPVFPWVLQDYVSPTLDLSNPAVFRDLSKPIGVVNPKHAQLVREKYESFEDPAGTIDKFHYGTHYSNAAGVMHYLIRVEPFTSLHVQLQSGRFDCSDRQFHSVAAAWQARLESPADVKELIPEFFYFPDFLENQNGFDLGCLQLTNEKVGDVVLPPWASSPEDFIQQHRQALESEYVSAHLHEWIDLIFGYKQRGPAAEEALNVFYYCTYEGAVDLDHVTDERERKALEGIISNFGQTPCQLLKEPHPTRLSAEEAAHRLARLDTNSPSIFQHLDELKAFFAEVTVSASGLLGTHSWLPYDRNISNYFSFSKDPTMGSHKTQRLLSGPWVPGSGVSGQALAVAPDGKLLFSGGHWDGSLRVTALPRGKLLSQLSCHLDVVTCLALDTCGIYLISGSRDTTCMVWRLLHQGGLSVGLAPKPVQVLYGHGAAVSCVAISTELDMAVSGSEDGTVIIHTVRRGQFVAALRPLGATFPGPIFHLALGSEGQIVVQSSAWERPGAQVTYSLHLYSVNGKLRASLPLAEQPTALTVTEDFVLLGTAQCALHILQLNTLLPAAPPLPMKVAIRSVAVTKERSHVLVGLEDGKLIVVVAGQPSEVRSSQFARKLWRSSRRISQVSSGETEYNPTEAR

SEQ ID NO: 56227 - protein, 2754 aa, Homo sapiens
  Payload ID: 11050
  Gene Symbol: NBEAL2
  Gene Name: neurobeachin-like 2
  Uniprot ID: Q6ZNJ1
  ENSP ID: ENSP00000415034
MAASERLYELWLLYYAQKDLGYLQQWLKAFVGAFKKSISLSSLEPRRPEEAGAEVPLLPLDELHVLAEQLHQADLEQALLLLKLFIILCRNLENIEAGRGQVLVPRVLALLTKLVAELKGCPPPQGRGTQLENVALHALLLCEGLFDPYQTWRRQRSGEVISSKEKSKYKFPPAALPQEFSAFFQESLQNADHLPPILLLRLIHLFCAVLAGGKENGQMAVSDGSVKGLLSVVRGWSRGPAPDPCLVPLALEALVGAVHVLHASRAPPRGPELRALLESYFHVLNADWPAGLSSGPEEALVTLRVSMLDAIPMMLACEDRPVLQATFLSNNCFEHLTRLIQNSKLYLQSRAPPEGDSDLATRLLTEPDVQKVLDQDTDAIAVHVVRVLTCIMSDSPSAKEVFKERIGYPHLQEVLQSHGPPTHRLLQELLNMAVEGDHSMCPPPPIRNEQPVLVLAQWLPSLPTAELRLFLAQRLRWLCDSCPASRATCVQAGLVGCLLETLSTGLALEARCQEQLLALLQALGRVSIRPMELRHLLRPRPGLDSEPGGAEAGKARHAGAVIRTLSGMARHQGPARALRYFDLTPSMAGIMVPPVQRWPGPGFTFHAWLCLHPMDTAPTPAPTRPLQRKQLYSFFTSSGSGFEAFFTAAGTLVVAVCTRKEYLTMSLPEVSFADSAWHCVAIVHVPGRRPFSQNLVHVYKDGHLVKTAPLRCPSLSEPFSSCCIGSAGYRTTTTTTGLPTPPVPATLAYTHPALTRSQSVPASTGLGWGSGLVAPLQEGSIDSTLAGTQDTRWGSPTSLEGELGAVAIFHEALQATALRTLCTLGPNETAPFKPEGELHELSTRLLLHYSPQACKNNICLDLSPSHGLDGRLTGHRVETWDVKDVVNCVGGMGALLPLLERVAAQPKEAEAGPAETHDLVGPELTSGHNTQGLVLPLGKSSEERMERNAVAAFLLMLRNFLQGHMVNQESLVQCQGPAIIGALLRKVPSWAMDMNVLMSAQLLMEQVAAEGSGPLLYLLYQHLLFNFHLWTLSDFAVRLGHIQYMSSIVREHRQKLRKKYGVQFILDALRTHYSPQRERPLAADDLRTVQTSLLGLAREFLVRSLSADDVQVTQTMLSFLAATGDDGQAVGALDLLLALLHGSLVQESLAVFLLEPGNLEVLLALLVRPGSLPLLPDRVCKILRRLQQNERLPERSRQRLRLRECGLQGLVACLPEGTVSPQLCQGLYKLFLGADCLNLSDLLAVVQLSLQADLSVRLDICRQLFHLIYGQPDVVRLLARQAGWQDVLTRLYVLEAATAGSPPPSSPESPTSPKPAPPKPPTESPAEPSDVFLPSEAPCPDPDGFYHALSPFCTPFDLGLERSSVGSGNTAGGGGSSGTLTPASQPGTPSPLDGPRPFPAAPGRHSSSLSNVLEDGSLPEPTISGDDTSNTSNPQQTSEEELCNLLTNVLFSVTWRGVEGSDEAAWRERGQVFSVLTQLGASATLVRPPDCIKRSLLEMMLESALTDIKEAPVGVLASLTQQALWLLRLLQDFLCAEGHGNQELWSEKLFEGVCSLLDRLGAWPHLANGTADLREMAQIGLRLVLGYILLEDPQLHAQAYVRLHMLLQTAVPARREEACYVLSKLEAALGRVLNTSSLESATDEAGSPLAAAAAAAAAERCSWLVPLVRTLLDRAYEPLGLQWGLPSLPPTNGSPTFFEDFQAFCATPEWRHFIDKQVQPTMSQFEMDTYAKSHDLMSGFWNACYDMLMSSGQRRQWERAQSRRAFQELVLEPAQRRARLEGLRYTAVLKQQATQHSMALLHWGALWRQLASPCGAWALRDTPIPRWKLSSAETYSRMRLKLVPNHHFDPHLEASALRDNLGEVPLTPTEEASLPLAVTKEAKVSTPPELLQEDQLGEDELAELETPMEAAELDEQREKLVLSAECQLVTVVAVVPGLLEVTTQNVYFYDGSTERVETEEGIGYDFRRPLAQLREVHLRRFNLRRSALELFFIDQANYFLNFPCKVGTTPVSSPSQTPRPQPGPIPPHTQVRNQVYSWLLRLRPPSQGYLSSRSPQEMLRASGLTQKWVQREISNFEYLMQLNTIAGRTYNDLSQYPVFPWVLQDYVSPTLDLSNPAVFRDLSKPIGVVNPKHAQLVREKYESFEDPAGTIDKFHYGTHYSNAAGVMHYLIRVEPFTSLHVQLQSGRFDCSDRQFHSVAAAWQARLESPADVKELIPEFFYFPDFLENQNGFDLGCLQLTNEKVGDVVLPPWASSPEDFIQQHRQALESEYVSAHLHEWIDLIFGYKQRGPAAEEALNVFYYCTYEGAVDLDHVTDERERKALEGIISNFGQTPCQLLKEPHPTRLSAEEAAHRLARLDTNSPSIFQHLDELKAFFAEVVSDGVPLVLALVPHRQPHSFITQGSPDLLVTVSASGLLGTHSWLPYDRNISNYFSFSKDPTMGSHKTQRLLSGPWVPGSGVSGQALAVAPDGKLLFSGGHWDGSLRVTALPRGKLLSQLSCHLDVVTCLALDTCGIYLISGSRDTTCMVWRLLHQGGLSVGLAPKPVQVLYGHGAAVSCVAISTELDMAVSGSEDGTVIIHTVRRGQFVAALRPLGATFPGPIFHLALGSEGQIVVQSSAWERPGAQVTYSLHLYSVNGKLRASLPLAEQPTALTVTEDFVLLGTAQCALHILQLNTLLPAAPPLPMKVAIRSVAVTKERSHVLVGLEDGKLIVVVAGQPSEVRSSQFARKLWRSSRRISQVSSGETEYNPTEAR

SEQ ID NO: 56228 - protein, 255 aa, Homo sapiens
  Payload ID: 11050
  Gene Symbol: NBEAL2
  Gene Name: neurobeachin-like 2
  ENSP ID: ENSP00000415063
EPFTSLHVQLQSGRFDCSDRQFHSVAAAWQARLESPADVKELIPEFFYFPDFLENQNGFDLGCLQLTNEKVGDVVLPPWASSPEDFIQQHRQALESEYVSAHLHEWIDLIFGYKQRGPAAEEALNVFYYCTYEGAVDLDHVTDERERKALEGIISNFGQTPCQLLKEPHPTRLSAEEAAHRLARLDTNSPSIFQHLDELKAFFAEDAATAEWPVGARQWCEWTSTGSGPGWKAAIQRWPLGWQPAGDCTTPWQAV

SEQ ID NO: 56229 - protein, 216 aa, Homo sapiens
  Payload ID: 11051
  Gene Symbol: NBL1
  Gene Name: neuroblastoma 1, DAN family BMP antagonist
  Uniprot ID: P41271
  ENSP ID: ENSP00000289749
MPGNLMSQTSRAVSIWKFPAKLGKTHGHRALEATGMMLRVLVGAVLPAMLLAAPPPINKLALFPDKSAWCEAKNITQIVGHSGCEAKSIQNRACLGQCFSYSVPNTFPQSTESLVHCDSCMPAQSMWEIVTLECPGHEEVPRVDKLVEKILHCSCQACGKEPSHEGLSVYVQGEDGPGSQPGTHPHPHPHPHPGGQTPEPEDPPGAPHTEEEGAED

SEQ ID NO: 56230 - protein, 181 aa, Homo sapiens; identical to SEQ ID NO: 51716
  Payload ID: 11051
  Gene Symbol: NBL1
  Gene Name: neuroblastoma 1, DAN family BMP antagonist
  Uniprot ID: P41271
  ENSP ID: ENSP00000364278

SEQ ID NO: 56231 - protein, 128 aa, Homo sapiens
  Payload ID: 11051
  Gene Symbol: NBL1
  Gene Name: neuroblastoma 1, DAN family BMP antagonist
  ENSP ID: ENSP00000390607
MMLRVLVGAVLPAMLLAAPPPINKLALFPDKSAWCEAKNITQIVGHSGCEAKSIQNRACLGQCFSYSVPNTFPQSTESLVHCDSCMPAQSMWEIVTLECPGHEEVPRVDKLVEKILHCSCQACGKEPS

SEQ ID NO: 56232 - protein, 128 aa, Homo sapiens
  Payload ID: 11051
  Gene Symbol: NBL1
  Gene Name: neuroblastoma 1, DAN family BMP antagonist
  ENSP ID: ENSP00000391858
MCSLALQQLISMDLFWRLFFVCGQEGLRALEATGMMLRVLVGAVLPAMLLAAPPPINKLALFPDKSAWCEAKNITQIVGHSGCEAKSIQNRACLGQCFSYSVPNTFPQSTESLVHCDSCMPAQSMWEI

SEQ ID NO: 56233 - protein, 163 aa, Homo sapiens
  Payload ID: 11051
  Gene Symbol: NBL1
  Gene Name: neuroblastoma 1, DAN family BMP antagonist
  ENSP ID: ENSP00000394079
MLRVLVGAVLPAMLLAAPPPINKLALFPDKSAWCEAKNITQIVGHSGCEAKSIQNRACLGQCFSYSVPNTFPQSTESLVHCDSCMPAQSMWEIVTLECPGHEEVPRVDKLVEKILHCSCQACGKEPSHEGLSVYVQGEDGPGSQPGTHPHPHPHPHPGGQTPE

SEQ ID NO: 56234 - protein, 109 aa, Homo sapiens
  Payload ID: 11051
  Gene Symbol: NBL1
  Gene Name: neuroblastoma 1, DAN family BMP antagonist
  ENSP ID: ENSP00000399333
MMLRVLVGAVLPAMLLAAPPPINKLALFPDKSAWCEAKNITQIVGHSGCEAKSIQNRACLGQCFSYSVPNTFPQSTESLVHCDSCMPAQSMWEIVTLECPGHEEVPRVD

SEQ ID NO: 56235 - protein, 116 aa, Homo sapiens
  Payload ID: 11051
  Gene Symbol: NBL1
  Gene Name: neuroblastoma 1, DAN family BMP antagonist
  ENSP ID: ENSP00000400250
MMLRVLVGAVLPAMLLAAPPPINKLALFPDKSAWCEAKNITQIVGHSGCEAKSIQNRACLGQCFSYSVPNTFPQSTESLVHCDSCMPAQSMWEIVTLECPGHEEVPRVDKLVEKIL

SEQ ID NO: 56236 - protein, 117 aa, Homo sapiens
  Payload ID: 11051
  Gene Symbol: NBL1
  Gene Name: neuroblastoma 1, DAN family BMP antagonist
  ENSP ID: ENSP00000412419
MMLRVLVGAVLPAMLLAAPPPINKLALFPDKSAWCEAKNITQIVGHSGCEAKSIQNRACLGQCFSYSVPNTFPQSTESLVHCDSCMPAQSMWEIVTLECPGHEEVPRVDKLVEKILH

SEQ ID NO: 56237 - protein, 181 aa, Homo sapiens; identical to SEQ ID NO: 51716
  Payload ID: 11051
  Gene Symbol: NBL1
  Gene Name: neuroblastoma 1, DAN family BMP antagonist
  Uniprot ID: P41271
  ENSP ID: ENSP00000449007

SEQ ID NO: 56238 - protein, 215 aa, Homo sapiens
  Payload ID: 11051
  Gene Symbol: NBL1
  Gene Name: neuroblastoma 1, DAN family BMP antagonist
  ENSP ID: ENSP00000478223
MCSLALQQLISMDLFWRLFFVCGQEGLRALEATGMMLRVLVGAVLPAMLLAAPPPINKLALFPDKSAWCEAKNITQIVGHSGCEAKSIQNRACLGQCFSYSVPNTFPQSTESLVHCDSCMPAQSMWEIVTLECPGHEEVPRVDKLVEKILHCSCQACGKEPSHEGLSVYVQGEDGPGSQPGTHPHPHPHPHPGGQTPEPEDPPGAPHTEEEGAED

SEQ ID NO: 56239 - protein, 181 aa, Homo sapiens; identical to SEQ ID NO: 51716
  Payload ID: 11051
  Gene Symbol: NBL1
  Gene Name: neuroblastoma 1, DAN family BMP antagonist
  Uniprot ID: P41271
  ENSP ID: ENSP00000478885

SEQ ID NO: 56240 - protein, 181 aa, Homo sapiens; identical to SEQ ID NO: 51716
  Payload ID: 11051
  Gene Symbol: NBL1
  Gene Name: neuroblastoma 1, DAN family BMP antagonist
  Uniprot ID: P41271
  ENSP ID: ENSP00000480391

SEQ ID NO: 56241 - protein, 181 aa, Homo sapiens; identical to SEQ ID NO: 51716
  Payload ID: 11051
  Gene Symbol: NBL1
  Gene Name: neuroblastoma 1, DAN family BMP antagonist
  Uniprot ID: P41271
  ENSP ID: ENSP00000483061

SEQ ID NO: 56242 - protein, 2371 aa, Homo sapiens
  Payload ID: 11052
  Gene Symbol: NBAS
  Gene Name: neuroblastoma amplified sequence
  Uniprot ID: A2RRP1
  ENSP ID: ENSP00000281513
MAAPESGPALSPGTAEGEEETILYDLLVNTEWPPETEVQPRGNQKHGASFIITKAIRDRLLFLRQYIWYSPAPFLLPDGLVRLVNKQINWHLVLASNGKLLAAVQDQCVEIRSAKDDFTSIIGKCQVPKDPKPQWRRVAWSYDCTLLAYAESTGTVRVFDLMGSELFVISPASSFIGDLSYAIAGLIFLEYKASAQWSAELLVINYRGELRSYLVSVGTNQSYQESHCFSFSSHYPHGINTAIYHPGHRLLLVGGCETAEVGMSKASSCGLSAWRVLSGSPYYKQVTNGGDGVTAVPKTLGLLRMLSVKFYSRQGQEQDGIFKMSLSPDGMLLAAIHFSGKLSIWAIPSLKQQGEWGQNEQPGYDDLNPDWRLSTEKRKKIKDKESFYPLIDVNWWADSAVTLARCSGALTVSSVKTLKNLLGKSCEWFEPSPQVTATHDGGFLSLECEIKLAPKRSRLETRAGEEDEGEEDSDSDYEISAKARYFGYIKQGLYLVTEMERFAPPRKRPRTITKNYRLVSLRSTTPEELYQRKIESEEYEEALSLAHTYGLDTDLVYQRQWRKSAVNVASIQNYLSKIKKRSWVLHECLERVPENVDAAKELLQYGLKGTDLEALLAIGKGADDGRFTLPGEIDIDSISYEELSPPDEEPAKNKKEKELKKRQELLKLVNFSKLTLEQKELCRCRRKLLTYLDRLATYEEILGVPHASEQRYDAEFFKKFRNQNIVLSARTYAQESNVQALEILFTYHGSDLLPHRLAILSNFPETTSPHEYSVLLPEACFNGDSLMIIPWHEHKHRAKDWCEELACRMVVEPNLQDESEFLYAAQPELLRFRMTQLTVEKVMDWYQTRAEEIEHYARQVDCALSLIRLGMERNIPGLLVLCDNLVTLETLVYEARCDVTLTLKELQQMKDIEKLRLLMNSCSEDKYVTSAYQWMVPFLHRCEKQSPGVANELLKEYLVTLAKGDLKFPLKIFQHSKPDLQQKIIPDQDQLMAIALECIYTCERNDQLCLCYDLLECLPERGYGDKTEATTKLHDMVDQLEQILSVSELLEKHGLEKPISFVKNTQSSSEEARKLMVRLTRHTGRKQPPVSESHWRTLLQDMLTMQQNVYTCLDSDACYEIFTESLLCSSRLENIHLAGQMMHCSACSENPPAGIAHKGKPHYRVSYEKSIDLVLAASREYFNSSTNLTDSCMDLARCCLQLITDRPPAIQEELDLIQAVGCLEEFGVKILPLQVRLCPDRISLIKECISQSPTCYKQSTKLLGLAELLRVAGENPEERRGQVLILLVEQALRFHDYKAASMHCQELMATGYPKSWDVCSQLGQSEGYQDLATRQELMAFALTHCPPSSIELLLAASSSLQTEILYQRVNFQIHHEGGENISASPLTSKAVQEDEVGVPGSNSADLLRWTTATTMKVLSNTTTTTKAVLQAVSDGQWWKKSLTYLRPLQGQKCGGAYQIGTTANEDLEKQGCHPFYESVISNPFVAESEGTYDTYQHVPVESFAEVLLRTGKLAEAKNKGEVFPTTEVLLQLASEALPNDMTLALAYLLALPQVLDANRCFEKQSPSALSLQLAAYYYSLQIYARLAPCFRDKCHPLYRADPKELIKMVTRHVTRHEHEAWPEDLISLTKQLHCYNERLLDFTQAQILQGLRKGVDVQRFTADDQYKRETILGLAETLEESVYSIAISLAQRYSVSRWEVFMTHLEFLFTDSGLSTLEIENRAQDLHLFETLKTDPEAFHQHMVKYIYPTIGGFDHERLQYYFTLLENCGCADLGNCAIKPETHIRLLKKFKVVASGLNYKKLTDENMSPLEALEPVLSSQNILSISKLVPKIPEKDGQMLSPSSLYTIWLQKLFWTGDPHLIKQVPGSSPEWLHAYDVCMKYFDRLHPGDLITVVDAVTFSPKAVTKLSVEARKEMTRKAIKTVKHFIEKPRKRNSEDEAQEAKDSKVTYADTLNHLEKSLAHLETLSHSFILSLKNSEQETLQKYSHLYDLSRSEKEKLHDEAVAICLDGQPLAMIQQLLEVAVGPLDISPKDIVQSAIMKIISALSGGSADLGGPRDPLKVLEGVVAAVHASVDKGEELVSPEDLLEWLRPFCADDAWPVRPRIHVLQILGQSFHLTEEDSKLLVFFRTEAILKASWPQRQVDIADIENEENRYCLFMELLESSHHEAEFQHLVLLLQAWPPMKSEYVITNNPWVRLATVMLTRCTMENKEGLGNEVLKMCRSLYNTKQMLPAEGVKELCLLLLNQSLLLPSLKLLLESRDEHLHEMALEQITAVTTVNDSNCDQELLSLLLDAKLLVKCVSTPFYPRIVDHLLASLQQGRWDAEELGRHLREAGHEAEAGSLLLAVRGTHQAFRTFSTALRAAQHWV

SEQ ID NO: 56243 - protein, 184 aa, Homo sapiens
  Payload ID: 11052
  Gene Symbol: NBAS
  Gene Name: neuroblastoma amplified sequence
  ENSP ID: ENSP00000390920
VDIADIENEENRYCLFMELLESSHHEAEFQHLVLLLQAWPPMKSEYVITNNPWVRLATVMLTRCTMENKEGLGNEVLKMCRSLYNTKQMLPAEVNDSNCDQELLSLLLDAKLLVKCVSTPFYPRIVDHLLASLQQGRWDAEELGRHLREAGHEAEAGSLLLAVRGTHQAFRTFSTALRAAQHWV

SEQ ID NO: 56244 - protein, 204 aa, Homo sapiens
  Payload ID: 11052
  Gene Symbol: NBAS
  Gene Name: neuroblastoma amplified sequence
  ENSP ID: ENSP00000391476
  MOD_RES (1)..(1): Any amino acid
XKELQQMKDIEKLRLLMNSCSEDKYVTSAYQWMVPFLHRCEKQSPGVANELLKEYLVTLAKGDLKFPLKIFQHSKPDLQQKIIPDQDQLMAIALECIYTCERNDQLCLCYDLLECLPERGYGDKTEATTKLHDMVDQLEQILSVSELLEKHGLEKPISFVKNTQSSSEEARKLMVRLTRHTGRNLFTTSLSVDIWVILSFGFYK

SEQ ID NO: 56245 - protein, 171 aa, Homo sapiens
  Payload ID: 11052
  Gene Symbol: NBAS
  Gene Name: neuroblastoma amplified sequence
  ENSP ID: ENSP00000392421
LSVEARKEMTRKAIKTVKHFIEKPRKRNSEDEAQEAKDSKVTYADTLNHLEKSLAHLETLSHSFILSLKNSEQETLQKYSHLYDLSRSEKEKLHDEAVAICLDGQPLAMIQQLLEVAVGPLDISPKDIVQSAIMKIISALSGGSADLGGPRDPLKVLEGVVAAVHASVDKG

SEQ ID NO: 56246 - protein, 281 aa, Homo sapiens
  Payload ID: 11052
  Gene Symbol: NBAS
  Gene Name: neuroblastoma amplified sequence
  ENSP ID: ENSP00000396501
MTQLTVEKVMDWYQTRAEEIEHYARQLQQKIIPDQDQLMAIALECIYTCERNDQLCLCYDLLECLPERGYGDKTEATTKLHDMVDQLEQILSVSELLEKHGLEKPISFVKNTQSSSEEARKLMVRLTRHTGRKQPPVSESHWRTLLQDMLTMQQNVYTCLDSDACYEIFTESLLCSSRLENIHLAGQMMHCSACSENPPAGIAHKGKPHYRVSYEKSIDLVLAASREYFNSSTNLTDSCMDLARCCLQLITDRPPAIQEELDLIQAVGCLEEFGVKILPLQ

SEQ ID NO: 56247 - protein, 1419 aa, Homo sapiens
  Payload ID: 11052
  Gene Symbol: NBAS
  Gene Name: neuroblastoma amplified sequence
  ENSP ID: ENSP00000398411
  MOD_RES (1)..(1): Any amino acid
XMTQLTVEKVMDWYQTRAEEIEHYARQLQQKIIPDQDQLMAIALECIYTCERNDQLCLCYDLLECLPERGYGDKTEATTKLHDMVDQLEQILSVSELLEKHGLEKPISFVKNTQSSSEEARKLMVRLTRHTGRKQPPVSESHWRTLLQDMLTMQQNVYTCLDSDACYEIFTESLLCSSRLENIHLAGQMMHCSACSENPPAGIAHKGKPHYRVSYEKSIDLVLAASREYFNSSTNLTDSCMDLARCCLQLITDRPPAIQEELDLIQAVGCLEEFGVKILPLQVRLCPDRISLIKECISQSPTCYKQSTKLLGLAELLRVAGENPEERRGQVLILLVEQALRFHDYKAASMHCQELMATGYPKSWDVCSQLGQSEGYQDLATRQELMAFALTHCPPSSIELLLAASSSLQTEILYQRVNFQIHHEGGENISASPLTSKAVQEDEVGVPGSNSADLLRWTTATTMKVLSNTTTTTKAVLQAVSDGQWWKKSLTYLRPLQGQKCGGAYQIGTTANEDLEKQGCHPFYESVISNPFVAESEGTYDTYQHVPVESFAEVLLRTGKLAEAKNKGEVFPTTEVLLQLASEALPNDMTLALAYLLALPQVLDANRCFEKQSPSALSLQLAAYYYSLQIYARLAPCFRDKCHPLYRADPKELIKMVTRHVTRHEHEAWPEDLISLTKQLHCYNERLLDFTQAQILQGLRKGVDVQRFTADDQYKRETILGLAETLEESVYSIAISLAQRYSVSRWEVFMTHLEFLFTDSGLSTLEIENRAQDLHLFETLKTDPEAFHQHMVKYIYPTIGGFDHERLQYYFTLLENCGCADLGNCAIKPETHIRLLKKFKVVASGLNYKKLTDENMSPLEALEPVLSSQNILSISKLVPKIPEKDGQMLSPSSLYTIWLQKLFWTGDPHLIKQVPGSSPEWLHAYDVCMKYFDRLHPGDLITVVDAVTFSPKAVTKLSVEARKEMTRKAIKTVKHFIEKPRKRNSEDEAQEAKDSKVTYADTLNHLEKSLAHLETLSHSFILSLKNSEQETLQKYSHLYDLSRSEKEKLHDEAVAICLDGQPLAMIQQLLEVAVGPLDISPKDIVQSAIMKIISALSGGSADLGGPRDPLKVLEGVVAAVHASVDKGEELVSPEDLLEWLRPFCADDAWPVRPRIHVLQILGQSFHLTEEDSKLLVFFRTEAILKASWPQRQVDIADIENEENRYCLFMELLESSHHEAEFQHLVLLLQAWPPMKSEYVITNNPWVRLATVMLTRCTMENKEGLGNEVLKMCRSLYNTKQMLPAEGVKELCLLLLNQSLLLPSLKLLLESRDEHLHEMALEQITAVTTVNDSNCDQELLSLLLDAKLLVKCVSTPFYPRIVDHLLASLQQGRWDAEELGRHLREAGHEAEAGSLLLAVRGTHQAFRTFSTALRAAQHWV

SEQ ID NO: 56248 - protein, 100 aa, Homo sapiens
  Payload ID: 11052
  Gene Symbol: NBAS
  Gene Name: neuroblastoma amplified sequence
  ENSP ID: ENSP00000402458
  MOD_RES (1)..(1): Any amino acid
XASSCGLSAWRVLSGSPYYKQVTNGGDGVTAVPKTLGLLRMLSVKFYSRQGQEQDGIFKMSLSPDGMLLAAIHFSGKLSIWAIPSLKQQGEWGQNEQVLD

SEQ ID NO: 56249 - protein, 137 aa, Homo sapiens
  Payload ID: 11052
  Gene Symbol: NBAS
  Gene Name: neuroblastoma amplified sequence
  ENSP ID: ENSP00000403119
IADIENEENRYCLFMELLESSHHEAEFQHLVLLLQAWPPMKSEYVITNNPWVRLATVMLTRCTMENKEGLGNEVLKMCRSLYNTKQMLPAEGVKELCLLLLNQSLLLPSLKLLLESRDEHLHEMALEQITAVTTDIF

SEQ ID NO: 56250 - protein, 1096 aa, Homo sapiens
  Payload ID: 11053
  Gene Symbol: NBPF1
  Gene Name: neuroblastoma breakpoint family, member 1
  ENSP ID: ENSP00000473697
MVVSAGPWSSEKAETNILEINEKLRPQLAENKQQFRNLKEKCFVTQLAGFLANRQKKYKYEECKDLIKFMLRNERQFKEEKLAEQLKQAEELRQYKVLVHSQERELTQLREKLREGRDASRSLNQHLQALLTPDKPDKSQGQDLQEQLAEGCRLAQQLFQKLSPENDEDEDEDVQVEEAEKVLESSAPREVQKAEESKVPEDSLEECAITCSNSHSPCDSNQPHKNINITFEEDKVNSTLVVDRESSHDECQDAVNILPVPGPTSSATNVSMVVSAGPLSSEKAEMNILEINEKLHPQLAEKKQQFRNLKEKCFVTQLACFLANQQNKYKYEECKDLIKSMLRNERQFKEEKLAEQLKQAEELRQYKVLVHSQERELTQLREKLREGRDASRSLNQHLQALLTPDKPDKSQGQDLQEQLAEGCRLAQQLFQKLSPENDEDEDEDVQVEEAEKVLESSAPREVQKAEESKVPEDSLEECAITCSNSHGPCDSNQPHKNINITFEEDKVNSALVVDRESSHDECQDAVNILPVPGPTSSATNVSMVVSAGPLSSEKAEMNILEINEKLHPQLAEKKQQFRNLKEKCFVTQLACFLANQQNKYKNEECKDLIKSMLRNERQFKEEKLAEQLKQAEELRQYKVLVHSQERELTQLREKLREGRDASCSLNQHLQALLTPDEPDKSQGQDLQEQLAEGCRLAQHLVQKLSPENDNDDDEDVQVEVAEKVQKSSAPREMPKAEEKEVPEDSLEECAITCSNSHGPYDSNQPHRKTKITFEEDKVDSTLIGSSSHVEWEDAVHIIPENESDDEEEEEKGPVSPRNLQESEEEEVPQESWDEGYSTLSIPPEMLASYKSYSGTFHSLEEQQVCMAVDIGGHRWDQVKKEDQEATGPRLSRELLDEKGPEVLQDSLDRCYSTPSGYLELTDSCQPYRSAFYILEQQRVGWALDMDEIEKYQEVEEDQDPSCPRLSRELLEAVEPEVLQDSLDRCYSTPSSCLEQPDSCLPYGSSFYALEEKHVGFSLDVKRRRRGRKEGEEDQNPPCPRLSGMLMEVEEPEVLQDSLDRCYSTPSMYFELPDSFQHYRSVFYSFEEQHISFALDV

SEQ ID NO: 56251 - protein, 71 aa, Homo sapiens
  Payload ID: 11053
  Gene Symbol: NBPF1
  Gene Name: neuroblastoma breakpoint family, member 1
  ENSP ID: ENSP00000473795
MVVSAGPWSSEKAETNILEINEKLRPQLAENKQQFRNLKEKCFVTQLAGFLANRQKKYSNIKSWFTLRNES

SEQ ID NO: 56252 - protein, 1139 aa, Homo sapiens
  Payload ID: 11053
  Gene Symbol: NBPF1
  Gene Name: neuroblastoma breakpoint family, member 1
  ENSP ID: ENSP00000474456
MVVSAGPWSSEKAETNILEINEKLRPQLAENKQQFRNLKEKCFVTQLAGFLANRQKKYKYEECKDLIKFMLRNERQFKEEKLAEQLKQAEELRQYKVLVHSQERELTQLREKLREGRDASRSLNQHLQALLTPDKPDKSQGQDLQEQLAEGCRLAQQLFQKLSPENDEDEDEDVQVEEAEKVLESSAPREVQKAEESKVPEDSLEECAITCSNSHSPCDSNQPHKNINITFEEDKVNSTLVVDRESSHDECQDAVNILPVPGPTSSATNVSMVVSAGPLSSEKAEMNILEINEKLHPQLAEKKQQFRNLKEKCFVTQLACFLANQQNKYKYEECKDLIKSMLRNERQFKEEKLAEQLKQAEELRQYKVLVHSQERELTQLREKLREGRDASRSLNQHLQALLTPDKPDKSQGQDLQEQLAEGCRLAQQLFQKLSPENDEDEDEDVQVEEAEKVLESSAPREVQKAEESKVPEDSLEECAITCSNSHGPCDSNQPHKNINITFEEDKVNSALVVDRESSHDECQDAVNILPVPGPTSSATNVSMVVSAGPLSSEKAEMNILEINEKLHPQLAEKKQQFRNLKEKCFVTQLACFLANQQNKYKNEECKDLIKSMLRNERQFKEEKLAEQLKQAEELRQYKVLVHSQERELTQLREKLREGRDASCSLNQHLQALLTPDEPDKSQGQDLQEQLAEGCRLAQHLVQKLSPENDNDDDEDVQVEVAEKVQKSSAPREMPKAEEKEVPEDSLEECAITCSNSHGPYDSNQPHRKTKITFEEDKVDSTLIGSSSHVEWEDAVHIIPENESDDEEEEEKGPVSPRNLQESEEEEVPQESWDEGYSTLSIPPEMLASYKSYSGTFHSLEEQQVCMAVDIGGHRWDQVKKEDQEATGPRLSRELLDEKGPEVLQDSLDRCYSTPSGYLELTDSCQPYRSAFYILEQQRVGWALDMDEIEKYQEVEEDQDPSCPRLSRELLEAVEPEVLQDSLDRCYSTPSSCLEQPDSCLPYGSSFYALEEKHVGFSLDVGEIEKKGKGKKRRGRRSTKKRRRRGRKEGEEDQNPPCPRLSGMLMEVEEPEVLQDSLDRCYSTPSMYFELPDSFQHYRSVFYSFEEQHISFALDVDNRFLTLMGTSLHLVFQMGVIFPQ

SEQ ID NO: 56253 - protein, 3795 aa, Homo sapiens
  Payload ID: 11054
  Gene Symbol: NBPF10
  Gene Name: neuroblastoma breakpoint family, member 10
  ENSP ID: ENSP00000463957
MVVSAGPWSSEKAEMNILEINETLRPQLAEKKQQFRSLKEKCFLTQLAGFLANRQKKYKYEECKDLIKFMLRNERQFKEEKLAEQLKQAEELRQYKVLVHSQERELTQLREKLREGRDASRSLYEHLQALLTPDEPDKSQGQDLQEQLAEGCRLAQHLVQKLSPENDEDEDEDVQVEEAEKVLESSAPREVQKAEESKVPEDSLEECAITCSNSHGPCDSNQPHKNIKITFEEDEVNSTLVVDRESSHDECQDALNILPVPGPTSSATNVSMVVSAGPLSSEKAEMNILEINEKLRPQLAEKKQQFRNLKEKCFLTQLSGFLANQQKKYKYEECKDLIKFMLRNERQFKEEKLAEQLKQAEELRQYKVLVHAQERELTQLKEKLREGRDASRSLNEHLQALLTPYEPDKSQGQDLQEQLAEGCRLAQHLVQKLSPENDNDDDEDVQVEVAEKVQKSSAPREMQKAEEKEVPEDSLEECAITYSNSHGSYDSNQPHRKTKITFEEDKVDSTLIGSSSHVEWEDAVHIIPENESDDEEEEEKGPVSPRNLQESEEEEVPQESWDEGYSTLSIPPEMLASYQSYSSTFHSLEEQQVCMAVDIGRHRWDQVKKEDQEATGPRLSRELLDEKGPEVLQDSQDRCYSTPSGCLELTDSCQPYRSAFYILEQQRVGLAIDMDEIEKYQEVEEDQDPSCPRLSRELLDEKEPEVLQDSLDRCYSTPSGYLELPDLGQPYSSAVYSLEEQYLGLALDVDRIKKDQEEEEDQGPPCPRLSRELLEVVEPEVLQDSLDRCYSTPSSCLEQPDSCQPYGSSFYALEEKHVGFSLDVGEIEKKGKGKKRRGRRSKKERRRGRKEGEEDQNPPCPRLSRELLDEKGPEVLQDSLDRCYSTPSGCLELTDSCQPYRSAFYVLEQQRVGFAFDMDEIEKYQEVEEDQDPSCPRLSRELLDEKEPEVLQDSLDRCYSTPSGYLELPDLGQPYSSAVYSLEEQYLGLALDVDRIKKDEEEEEDQDPPCPRLSRELLEVVEPEVLQDSLDRCYSTPSSCLEQPDSCQPYGSSFYALEENHVGFSLDVGEIEKKGKGKKRRGRRSKKERRRGRKEGEEDQNPPCPRLSRELLEEKGPEVLQDSLDRCYSTPSGCLELTDSCQPYRSAFYVLEQQRVGFAVDMDEIEKYQEVEEDQDPSCPRLSRELLDEKEPEVLQDSLDRCYSTPSGYLELPDLGQPYSSAVYSLEEQYLGLALDVDRIKKDEEEEEDQDPPCPRLSRELLEVVEPEVLQDSLDRCYSTPSSCLEQPDSCQPYGSSFYALEEKHVGFSLDVGEIEKKGKGKKRRGRRSKKERRRGRKEGEEDQNPPCPRLSRELLEEKGPEVLQDSLDRCYSTPSGCLELTDSCQPYRSAFYVLEQQRVGFAVDMDEIEKYQEVEEDQDPSCPRLSRELLDEKEPEVLQDSLDRCYSTPSGYLELPDLGQPYSSAVYSLEEQYLGLALDVDRIKKDEEEEEDQDPPCPRLSRELLEVVEPEVLQDSLDRCYSTPSSCLEQPDSCQPYGSSFYALEEKHVGFSLDVGEIEKKGKGKKRRGRRSKKERRRGRKEGEEDQNPPCPRLSRELLDEKGPEVLQDSLDRCYSTPSGCLELTDSCQPYRSAFYVLEQQHVGLAVDMDEIEKYQEVEEDQDPSCPRLSRELLDEKEPEVLQDSLDRCYSTPSGYLELPDLGQPYSSAVYSLEEQYLGLALDVDRIKKDQEEEEDQGPPCPRLSRELLEVVEPEVLQDSLDRCYSTPSSCLEQPDSCQPYGSSFYALEEKHVGFSLDVGEIEKKGKGKKRRGRRSKKERRRGRKEGEEDQNPPCPRLSRELLDEKGPEVLQDSLDRCYSTPSGCLELTDSCQPYRSAFYVLEQQHVGLAVDMDEIEKYQEVEEDQDPSCPRLSRELLDEKEPEVLQDSLDRCYSTPSGYLELPDLGQPYSSAVYSLEEQYLGLALDVDRIKKDQEEEEDQGPPCPRLSRELLEVVEPEVLQDSLDRCYSTPSSCLEQPDSCQPYGSSFYALEEKHVGFSLDVGEIEKKGKGKKRRGRRSKKERRRGRKEGEEDQNPPCPRLSRELLDEKGPEVLQDSLDRCYSTPSGCLELTDSCQPYRSAFYVLEQQHVGLAVDMDEIEKYQEVEEDQDPSCPRLSRELLDEKEPEVLQDSLDRCYSTPSGYLELPDLGQPYSSAVYSLEEQYLGLALDVDRIKKDQEEEEDQGPPCPRLSRELLEVVEPEVLQDSLDRCYSTPSSCLEQPDSCQPYGSSFYALEEKHVGFSLDVGEIEKKGKGKKRRGRRSKKERRRGRKEGEEDQNPPCPRLSRELLDEKGPEVLQDSLDRCYSTPSGCLELTDSCQPYRSAFYVLEQQHVGLAVDMDEIEKYQEVEEDQDPSCPRLSRELLDEKEPEVLQDSLDRCYSTPSGYLELPDLGQPYSSAVYSLEEQYLGLALDVDRIKKDQEEEEDQDPPCPRLSRELLEVVEPEVLQDSLDRCYSTPSSCLEQPDSCQPYGSSFYALEEKHVGFSLDVGEIEKKGKGKKRRGRRSKKERRRGRKEGEEDQNPPCPRLSRELLDEKGPEVLQDSLDRCYSTPSGCLELTDSCQPYRSAFYVLEQQHVGLAVDMDEIEKYQEVEEDQDPSCPRLSRELLDEKEPEVLQDSLDRCYSTPSGYLELPDLGQPYSSAVYSLEEQYLGLALDVDRIKKDQEEEEDQGPPCPRLSRELLEVVEPEVLQDSLDRCYSTPSSCLEQPDSCQPYGSSFYALEEKHVGFSLDVGEIEKKGKGKKRRGRRSKKERRRGRKEGEEDQNPPCPRLSRELLDEKGPEVLQDSLDRCYSTPSGCLELTDSCQPYRSAFYVLEQQHVGLAVDMDEIEKYQEVEEDQDPSCPRLSRELLDEKEPEVLQDSLDRCYSTPSGYLELPDLGQPYSSAVYSLEEQYLGLALDVDRIKKDQEEEEDQGPPCPRLSRELLEVVEPEVLQDSLDRCYSTPSSCLEQPDSCQPYGSSFYALEEKHVGFSLDVGEIEKKGKGKKRRGRRSKKERRRGRKEGEEDQNPPCPRLSRELLDEKGPEVLQDSLDRCYSTPSGCLELTDSCQPYRSAFYVLEQQHVGLAVDMDEIEKYQEVEEDQDPSCPRLSRELLDEKEPEVLQDSLDRCYSTPSGYLELPDLGQPYSSAVYSLEEQYLGLALDVDRIKKDEEEEEDQDPPCPRLSRELLEVVEPEVLQDSLDRCYSTPSSCLEQPDSCQPYGSSFYALEEKHVGFSLDVGEIEKKGKGKKRRGRRSKKERRRGRKEGEEDQNPPCPRLSRELLDEKGPEVLQDSLDRCYSTPSGYLELTDSCQPYRSAFYVLEQQHVGLAVDMDEIEKYQEVEEDQDPSCPRLSRELLDEKEPEVLQDSLDRCYSTPSGYLELPDLGQPYSSAVYSLEEQYLGLALDVDRIKKDQEEEEDQGPPCPRLSRELLEVVEPEVLQDSLDRCYSTPSSCLEQPDSCQPYGSSFYALEEKHVGFSLDVGEIEKKGKGKKRRGRRSKKERRRGRKEGEEDQNPPCPRLSRELLDEKGPEVLQDSLDRCYSTPSGCLELCDSCQPYRSAFYVLEQQRVGLAVDMDEIEKYQEVEEDQDPSCPRLSRELLDEKEPEVLQDSLDRCYSTPSGYLELPDLGQPYSSAVYSLEEQYLGLALDVDKIEKKGKGKKRRGRRSKKERRRGRKEGEEDQNPPCPRLNGVLMEVEEREVLQDSLDRCYSTPSMYFELPDSFQHYRSVFYSFEEQHISFALYVDNRFFTLTVTSLHLVFQMGVIFPQ

SEQ ID NO: 56254 - protein, 577 aa, Homo sapiens
  Payload ID: 11054
  Gene Symbol: NBPF10
  Gene Name: neuroblastoma breakpoint family, member 10
  ENSP ID: ENSP00000477670
MVVSAGPWSSEKAEMNILEINETLRPQLAEKKQQFRSLKEKCFLTQLAGFLANRQKKYKYEECKDLIKFMLRNERQFKEEKLAEQLKQAEELRQYKVLVHSQERELTQLREKLREGRDASRSLYEHLQALLTPDEPDKSQGQDLQEQLAEGCRLAQHLVQKLSPENDEDEDEDVQVEEAEKVLESSAPREMQKAEEKEVPEDSLEECAITYSNSHGSYDSNQPHRKTKITFEEDKVDSTLIGSSSHVEWEDAVHIIPENESDDEEEEEKGPVSPRNLQESEEEEVPQESWDEGYSTLSIPPEMLASYQSYSSTFHSLEEQQVCMAVDIGRHRWDQVKKEDQEATGPRLSRELLDEKEPEVLQDSLDRCYSTPSGYLELPDLGQPYSSAVYSLEEQYLGLALDVDRIKKDQEEEEDQGPPCPRLSRELLEVVEPEVLQDSLDRCYSTPSSCLEQPDSCQPYGSSFYALEEKHVGFSLDVGEIEKYQEVEEDQDPSCPRLNGVLMEVEEREVLQDSLDRCYSTPSMYFELPDSFQHYRSVFYSFEEQHISFALYVDNRFFTLTVTSLHLVFQMGVIFPQ

SEQ ID NO: 56255 - protein, 921 aa, Homo sapiens
  Payload ID: 11054
  Gene Symbol: NBPF10
  Gene Name: neuroblastoma breakpoint family, member 10
  ENSP ID: ENSP00000478670
MLRNERQFKEEKLAEQLKQAEELRQYKVLVHAQERELTQLKEKLREGRDASRSLNEHLQALLTPYEPDKSQGQDLQEQLAEGCRLAQHLVQKLSPENDNDDDEDVQVEVAEKVQKSSAPREMQKAEEKEVPEDSLEECAITYSNSHGSYDSNQPHRKTKITFEEDKVDSTLIGSSSHVEWEDAVHIIPENESDDEEEEEKGPVSPRNLQESEEEEVPQESWDEGYSTLSIPPEMLASYQSYSSTFHSLEEQQVCMAVDIGRHRWDQVKKEDQEATGPRLSRELLDEKGPEVLQDSLDRCYSTPSGCLELTDSCQPYRSAFYVLEQQHVGLAVDMDEIEKYQEVEEDQDPSCPRLSRELLDEKEPEVLQDSLDRCYSTPSGYLELPDLGQPYSSAVYSLEEQYLGLALDVDRIKKDQEEEEDQGPPCPRLSRELLEVVEPEVLQDSLDRCYSTPSSCLEQPDSCQPYGSSFYALEEKHVGFSLDVGEIEKKGKGKKRRGRRSKKERRRGRKEGEEDQNPPCPRLSRELLDEKGPEVLQDSLDRCYSTPSGCLELTDSCQPYRSAFYVLEQQHVGLAVDMDEIEKYQEVEEDQDPSCPRLSRELLDEKGPEVLQDSLDRCYSTPSGCLELTDSCQPYRSAFYVLEQQHVGLAVDMDEIEKYQEVEEDQDPSCPRLSRELLDEKEPEVLQDSLDRCYSTPSGYLELPDLGQPYSSAVYSLEEQYLGLALDVDRIKKDQEEEEDQGPPCPRLSRELLEVVEPEVLQDSLDRCYSTPSSCLEQPDSCQPYGSSFYALEEKHVGFSLDVGEIEKKGKGKKRRGRRSKKERRRGRKEGEEDQNPPCPRLNGVLMEVEEREVLQDSLDRCYSTPSMYFELPDSFQHYRSVFYSFEEQHISFALYVDNRFFTLTVTSLHLVFQMGVIFPQ

SEQ ID NO: 56256 - protein, 1239 aa, Homo sapiens
  Payload ID: 11054
  Gene Symbol: NBPF10
  Gene Name: neuroblastoma breakpoint family, member 10
  ENSP ID: ENSP00000479344
MDEIEKYQEVEEDQDPSCPRLSRELLDEKEPEVLQDSLDRCYSTPSGYLELPDLGQPYSSAVYSLEEQYLGLALDVDRIKKDQEEEEDQGPPCPRLSRELLEVVEPEVLQDSLDRCYSTPSSCLEQPDSCQPYGSSFYALEEKHVGFSLDVGEIEKKGKGKKRRGRRSKKERRRGRKEGEEDQNPPCPRLSRELLDEKGPEVLQDSLDRCYSTPSGCLELTDSCQPYRSAFYVLEQQHVGLAVDMDEIEKYQEVEEDQDPSCPRLSRELLDEKEPEVLQDSLDRCYSTPSGYLELPDLGQPYSSAVYSLEEQYLGLALDVDRIKKDQEEEEDQGPPCPRLSRELLEVVEPEVLQDSLDRCYSTPSSCLEQPDSCQPYGSSFYALEEKHVGFSLDVGEIEKKGKGKKRRGRRSKKERRRGRKEGEEDQNPPCPRLSRELLDEKGPEVLQDSLDRCYSTPSGCLELTDSCQPYRSAFYVLEQQHVGLAVDMDEIEKYQEVEEDQDPSCPRLSRELLDEKEPEVLQDSLDRCYSTPSGYLELPDLGQPYSSAVYSLEEQYLGLALDVDRIKKDEEEEEDQDPPCPRLSRELLEVVEPEVLQDSLDRCYSTPSSCLEQPDSCQPYGSSFYALEEKHVGFSLDVGEIEKKGKGKKRRGRRSKKERRRGRKEGEEDQNPPCPRVSFDSLTSMSPGQFTRSLSLCLCLCLCLSFSFIVFYLALFCPNIKAIISGAVWFLIPPGLFFTFSHFSRLSRELLDEKGPEVLQDSLDRCYSTPSGYLELTDSCQPYRSAFYVLEQQHVGLAVDMDEIEKYQEVEEDQDPSCPRLSRELLDEKEPEVLQDSLDRCYSTPSGYLELPDLGQPYSSAVYSLEEQYLGLALDVDRIKKDQEEEEDQGPPCPRLSRELLEVVEPEVLQDSLDRCYSTPSSCLEQPDSCQPYGSSFYALEEKHVGFSLDVGEIEKKGKGKKRRGRRSKKERRRGRKEGEEDQNPPCPRLSRELLDEKGPEVLQDSLDRCYSTPSGCLELCDSCQPYRSAFYVLEQQRVGLAVDMDEIEKYQEVEEDQDPSCPRLSRELLDEKEPEVLQDSLDRCYSTPSGYLELPDLGQPYSSAVYSLEEQYLGLALDVDKIEKKGKGKKRRGRRSKKERRRGRKEGEEDQNPPCPRLNGVLMEVEEREVLQDSLDRCYSTPSMYFELPDSFQHYRSVFYSFEEQHISFALYVDNRFFTLTVTSLHLVFQMGVIFPQ

SEQ ID NO: 56257 - protein, 942 aa, Homo sapiens
  Payload ID: 11054
  Gene Symbol: NBPF10
  Gene Name: neuroblastoma breakpoint family, member 10
  ENSP ID: ENSP00000479934
MVVSAGPWSSEKAEMNILEINETLRPQLAEKKQQFRSLKEKCFLTQLAGFLANRQKKYKYEECKDLIKFMLRNERQFKEEKLAEQLKQAEELRQYKVLVHSQERELTQLREKLREGRDASRSLYEHLQALLTPDEPDKSQGQDLQEQLAEGCRLAQHLVQKLSPENDEDEDEDVQVEEAEKVLESSAPREVQKAEESKVPEDSLEECAITCSNSHGPCDSNQPHKNIKITFEEDEVNSTLVVDRESSHDECQDALNILPVPGPTSSATNVSMVVSAGPLSSEKAEMNILEINEKLRPQLAEKKQQFRNLKEKCFLTQLSGFLANQQKKYKYEECKDLIKFMLRNERQFKEEKLAEQLKQAEELRQYKVLVHAQERELTQLKEKLREGRDASRSLNEHLQALLTPYEPDKSQGQDLQEQLAEGCRLAQHLVQKLSPENDNDDDEDVQVEVAEKVQKSSAPREMQKAEEKEVPEDSLEECAITYSNSHGSYDSNQPHRKTKITFEEDKVDSTLIGSSSHVEWEDAVHIIPENESDDEEEEEKGPVSPRNLQESEEEEVPQESWDEGYSTLSIPPEMLASYQSYSSTFHSLEEQQVCMAVDIGRHRWDQVKKEDQEATGPRLSRELLDEKGPEVLQDSLDRCYSTPSGCLELTDSCQPYRSAFYVLEQQHVGLAVDMDEIEKYQEVEEDQDPSCPRLSRELLDEKEPEVLQDSLDRCYSTPSGYLELPDLGQPYSSAVYSLEEQYLGLALDVDRIKKDQEEEEDQGPPCPRLSRELLEVVEPEVLQDSLDRCYSTPSSCLEQPDSCQPYGSSFYALEEKHVGFSLDVGEIEKKGKGKKRRGRRSKKERRRGRKEGEEDQNPPCPRLNGVLMEVEEREVLQDSLDRCYSTPSMYFELPDSFQHYRSVFYSFEEQHISFALYVDNRFFTLTVTSLHLVFQMGVIFPQ

SEQ ID NO: 56258 - protein, 867 aa, Homo sapiens
  Payload ID: 11054
  Gene Symbol: NBPF10
  Gene Name: neuroblastoma breakpoint family, member 10
  ENSP ID: ENSP00000482792
MVVSAGPWSSEKAEMNILEINETLRPQLAEKKQQFRSLKEKCFLTQLAGFLANRQKKYKYEECKDLIKFMLRNERQFKEEKLAEQLKQAEELRQYKVLVHSQERELTQLREKLREGRDASRSLYEHLQALLTPDEPDKSQGQDLQEQLAEGCRLAQHLVQKLSPENDEDEDEDVQVEEAEKVLESSAPREVQKAEESKVPEDSLEECAITCSNSHGPCDSNQPHKNIKITFEEDEVNSTLVVDRESSHDECQDALNILPVPGPTSSATNVSMVVSAGPLSSEKAEMNILEINEKLRPQLAEKKQQFRNLKEKCFLTQLSGFLANQQKKYKYEECKDLIKFMLRNERQFKEEKLAEQLKQAEELRQYKVLVHAQERELTQLKEKLREGRDASRSLNEHLQALLTPYEPDKSQGQDLQEQLAEGCRLAQHLVQKLSPENDNDDDEDVQVEVAEKVQKSSAPREMQKAEEKEVPEDSLEECAITYSNSHGSYDSNQPHRKTKITFEEDKVDSTLIGSSSHVEWEDAVHIIPENESDDEEEEEKGPVSPRNLQESEEEEVPQESWDEGYSTLSIPPEMLASYQSYSSTFHSLEEQQVCMAVDIGRHRWDQVKKEDQEATGPRLSRELLDEKEPEVLQDSLDRCYSTPSGYLELPDLGQPYSSAVYSLEEQYLGLALDVDRIKKDQEEEEDQGPPCPRLSRELLEVVEPEVLQDSLDRCYSTPSSCLEQPDSCQPYGSSFYALEEKHVGFSLDVGEIEKKGKGKKRRGRRSKKERRRGRKEGEEDQNPPCPRLNGVLMEVEEREVLQDSLDRCYSTPSMYFELPDSFQHYRSVFYSFEEQHISFALYVDNRFFTLTVTSLHLVFQMGVIFPQ

SEQ ID NO: 56259 - protein, 535 aa, Homo sapiens
  Payload ID: 11054
  Gene Symbol: NBPF10
  Gene Name: neuroblastoma breakpoint family, member 10
  ENSP ID: ENSP00000483057
MVVSAGPWSSEKAEMNILEINETLRPQLAEKKQQFRSLKEMFSNSTGRLPGQPTEEIQQYKVLVHSQERELTQLREKLREGRDASRSLYEHLQALLTPDEPDKSQGQDLQEQLAEGCRLAQHLVQKLSPENDEDEDEDVQVEEAEKVLESSAPREVQKAEESKVPEDSLEECAITCSNSHGPCDSNQPHKNIKITFEEDEVNSTLVVDRESSHDECQDALNILPVPGPTSSATNVSMVVSAGPLSSEKAEMNILEINEKLRPQLAEKKQQFRNLKEKCFLTQLSGFLANQQKKYKYEECKDLIKFMLRNERQFKEEKLAEQLKQAEELRQYKVLVHAQERELTQLKEKLREGRDASRSLNEHLQALLTPYEPDKSQGQDLQEQLAEGCRLAQHLVQKLSPENDNDDDEDVQVEVAEKVQKSSAPREMQKAEEKEVPEDSLEECAITYSNSHGSYDSNQPHRKTKITFEEDKVDSTLIGSSSHVEWEDAVHIIPENESDDEEEEEKGPVSPRTSVGSSEKGGPRGNRSQAQQGAAG

SEQ ID NO: 56260 - protein, 267 aa, Homo sapiens
  Payload ID: 11055
  Gene Symbol: NBPF11
  Gene Name: neuroblastoma breakpoint family, member 11
  ENSP ID: ENSP00000463391
MDEIEKYQEVEEDQDPSCPRLSRELLAEKEPEVLQDSLDRCYSTPSGYLELPDLGQPYRSAVYSLEEQYLGLALDVDRIKKDQEEEEDQGPPCPRLSRELLEVVEPEVLQDSLCYSTPSSCLEQPDSCQPYGSSFYALEEKHVGFSLDVGEIEKKGKGKKRRGRRSKKKRRRGRKEGEEDQNPPCPRLSSVLMEVEVPEVLQDSLDRYYSTPSMYFELPDSFQHYRSVFYSFEEQHISFALDMDNRFFTLTVRSLHLVFQMGVIFPQ

SEQ ID NO: 56261 - protein, 865 aa, Homo sapiens
  Payload ID: 11055
  Gene Symbol: NBPF11
  Gene Name: neuroblastoma breakpoint family, member 11
  Uniprot ID: Q86T75
  ENSP ID: ENSP00000477509
MVVSAGPWSSEKAEMNILEINEKLRPQLAENKQQFRNLKERCFLTQLAGFLANRQKKYKYEECKDLIKFMLRNERQFKEEKLAEQLKQAEELRQYKVLVHSQERELTQLREKLREGRDASRSLNEHLQALLTPDEPDKSQGQDLQEQLAEGCRLAQHLVQKLSPENDEDEDEDVQVEEDEKVLESSAPREVQKAEESKVPEDSLEECAITCSNSHGPCDSIQPHKNIKITFEEDKVNSSLVVDRESSHDGCQDALNILPVPGPTSSATNVSMVVSAGPLSSEKAEMNILEINEKLCPQLAEKKQQFRSLKEKCFVTQVACFLAKQQNKYKYEECKDLIKSMLRNERQFKEEKLAEQLKQAEELRQYKVLVHSQERELTQLREKLREGRDASRSLNEHLQALLTPDEPDKSQGQDLQEQLAEGCRLAQHLVQKLSPENDNDDDEDVQVEVAEKVQKSSSPREMQKAEEKEVPEDSLEECAITCSNSHGPYDSNQPHRKTKITFEEDKVDSTLIGSSSHVEWEDAVHIIPENESDDEEEEEKGPVSPRNLQESEEEEVPQESWDEGYSTLSIPPERLASYQSYSSTFHSLEEQQVCMAVDIGRHRWDQVKKEDQEATGPRLSRELLDEKEPEVLQDSLDRCYSTPSVYLGLTDSCQPYRSAFYVLEQQRIGLAVDMDEIEKYQEVEEDQDPSCPRLSRELLAEKEPEVLQDSLDRCYSTPSGYLELPDLGQPYRSAVYSLEEQYLGLALDVDRIKKDQEEEEDQGPPCPRLSRELLEVVEPEVLQDSLDVIQLLPVVLNSLTPASPTEVPFMHWRKNMLAFLLTWEKLKRRGRGRKEGEEDQRRKEEGEEKKGKKIKTHHAPGSAAC

SEQ ID NO: 56262 - protein, 770 aa, Homo sapiens
  Payload ID: 11055
  Gene Symbol: NBPF11
  Gene Name: neuroblastoma breakpoint family, member 11
  ENSP ID: ENSP00000477874
MFSNSTGRLPGQPTEEIQQYKVLVHSQERELTQLREKLREGRDASRSLNEHLQALLTPDEPDKSQGQDLQEQLAEGCRLAQHLVQKLSPENDEDEDEDVQVEEDEKVLESSAPREVQKAEESKVPEDSLEECAITCSNSHGPCDSIQPHKNIKITFEEDKVNSSLVVDRESSHDGCQDALNILPVPGPTSSATNVSMVVSAGPLSSEKAEMNILEINEKLCPQLAEKKQQFRSLKEKCFVTQVACFLAKQQNKYKYEECKDLIKSMLRNERQFKEEKLAEQLKQAEELRQYKVLVHSQERELTQLREKLREGRDASRSLNEHLQALLTPDEPDKSQGQDLQEQLAEGCRLAQHLVQKLSPENDNDDDEDVQVEVAEKVQKSSSPREMQKAEEKEVPEDSLEECAITCSNSHGPYDSNQPHRKTKITFEEDKVDSTLIGSSSHVEWEDAVHIIPENESDDEEEEEKGPVSPRNLQESEEEEVPQESWDEGYSTLSIPPERLASYQSYSSTFHSLEEQQVCMAVDIGRHRWDQVKKEDQEATGPRLSRELLDEKEPEVLQDSLDRCYSTPSVYLGLTDSCQPYRSAFYVLEQQRIGLAVDMDEIEKYQEVEEDQDPSCPRLSRELLAEKEPEVLQDSLDRCYSTPSGYLELPDLGQPYRSAVYSLEEQYLGLALDVDRIKKDQEEEEDQGPPCPRLSRELLEVVEPEVLQDSLDVIQLLPVVLNSLTPASPTEVPFMHWRKNMLAFLLTWEKLKRRGRGRKEGEEDQRRKEE

SEQ ID NO: 56263 - protein, 541 aa, Homo sapiens
  Payload ID: 11055
  Gene Symbol: NBPF11
  Gene Name: neuroblastoma breakpoint family, member 11
  ENSP ID: ENSP00000478618
MFSNSTGRLPGQPTEEIQQYKVLVHSQERELTQLREKLREGRDASRSLNEHLQALLTPDEPDKSQGQDLQEQLAEGCRLAQHLVQKLSPENDEDEDEDVQVEEDEKVLESSAPREVQKAEESKVPEDSLEECAITCSNSHGPCDSIQPHKNIKITFEEDKVNSSLVVDRESSHDGCQDALNILPVPGPTSSATNVSMVVSAGPLSSEKAEMNILEINEKLCPQLAEKKQQFRSLKEKCFVTQVACFLAKQQNKYKYEECKDLIKSMLRNERQFKEEKLAEQLKQAEELRQYKVLVHSQERELTQLREKLREGRDASRSLNEHLQALLTPDEPDKSQGQDLQEQLAEGCRLAQHLVQKLSPENDNDDDEDVQVEVAEKVQKSSSPREMQKAEEKEVPEDSLEECAITCSNSHGPYDSNQPHRKTKITFEEDKVDSTLIGSSSHVEWEDAVHIIPENESDDEEEEEKGPVSPRNLQESEEEEVPQESWDEGYSTLSIPPERLASYQSYSSTFHSLEEQQVCMAVDIGRLDRGMFLCARKNCLM

SEQ ID NO: 56264 - protein, 830 aa, Homo sapiens
  Payload ID: 11055
  Gene Symbol: NBPF11
  Gene Name: neuroblastoma breakpoint family, member 11
  ENSP ID: ENSP00000479429
MVVSAGPWSSEKAEMNILEINEKLRPQLAENKQQFRNLKEMFSNSTGRLPGQPTEEIQQYKVLVHSQERELTQLREKLREGRDASRSLNEHLQALLTPDEPDKSQGQDLQEQLAEGCRLAQHLVQKLSPENDEDEDEDVQVEEDEKVLESSAPREVQKAEESKVPEDSLEECAITCSNSHGPCDSIQPHKNIKITFEEDKVNSSLVVDRESSHDGCQDALNILPVPGPTSSATNVSMVVSAGPLSSEKAEMNILEINEKLCPQLAEKKQQFRSLKEKCFVTQVACFLAKQQNKYKYEECKDLIKSMLRNERQFKEEKLAEQLKQAEELRQYKVLVHSQERELTQLREKLREGRDASRSLNEHLQALLTPDEPDKSQGQDLQEQLAEGCRLAQHLVQKLSPENDNDDDEDVQVEVAEKVQKSSSPREMQKAEEKEVPEDSLEECAITCSNSHGPYDSNQPHRKTKITFEEDKVDSTLIGSSSHVEWEDAVHIIPENESDDEEEEEKGPVSPRNLQESEEEEVPQESWDEGYSTLSIPPERLASYQSYSSTFHSLEEQQVCMAVDIGRHRWDQVKKEDQEATGPRLSRELLDEKEPEVLQDSLDRCYSTPSVYLGLTDSCQPYRSAFYVLEQQRIGLAVDMDEIEKYQEVEEDQDPSCPRLSRELLAEKEPEVLQDSLDRCYSTPSGYLELPDLGQPYRSAVYSLEEQYLGLALDVDRIKKDQEEEEDQGPPCPRLSRELLEVVEPEVLQDSLDVIQLLPVVLNSLTPASPTEVPFMHWRKNMLAFLLTWEKLKRRGRGRKEGEEDQRRKEEGEEKKGKKIKTHHAPGSAAC

SEQ ID NO: 56265 - protein, 865 aa, Homo sapiens; identical to SEQ ID NO: 56261
  Payload ID: 11055
  Gene Symbol: NBPF11
  Gene Name: neuroblastoma breakpoint family, member 11
  Uniprot ID: Q86T75
  ENSP ID: ENSP00000484213

SEQ ID NO: 56266 - protein, 577 aa, Homo sapiens [sequence omitted]

SEQ ID NO: 56267 - protein, 1111 aa, Homo sapiens
  Payload ID: 11056
  Gene Symbol: NBPF12
  Gene Name: neuroblastoma breakpoint family, member 12
  ENSP ID: ENSP00000464426
MVVSAGPWSSEKAEMNILEINEKLRPQLAENKQQFRNLKERCFLTQLAGFLANRQKKYKYEECKDLIKFMLRNERQFKEEKLAEQLKQAEELRQYKVLVHSQERELTQLREKLREGRDASRSLNEHLQALLTPDEPDKSQGQDLQEQLAEGCRLAQQLVQKLSPENDEDEDEDVQVEEDEKVLESSAPREVQKAEESKVPEDSLEECAITCSNSHGPCDSIQPHKNIKITFEEDKVNSTVVVDRKSSHDECQDALNILPVPGPTSSATNVSMVVSAGPLSSEKAEMNILEINEKLRPQLAEKKQQFRSLKEKCFVTQLAGFLAKQQNKYKYEECKDLIKSMLRNELQFKEEKLAEQLKQAEELRQYKVLVHSQERELTQLREKLREGRDASRSLNEHLQALLTPDEPDKSQGQDLQEQLAEGCRLAQHLVQKLSPENDNDDDEDVQVEVAEKVQKSSSPREMQKAEEKEVPEDSLEECAITCSNSHGPYDSNQPHRKTKITFEEDKVDSTLIGSSSHVEWEDAVHIIPENESDDEEEEEKGPVSPRNLQESEEEEVPQESWDEGYSTLSIPPERLASYQSYSSTFHSLEEQQVCMAVDIGRHRWDQVKKEDQEATGPRLSRELLAEKEPEVLQDSLDRCYSTPSVYLGLTDSCQPYRSAFYVLEQQRVGLAVDMDEIEKYQEVEEDQDPSCPRLSRELLAEKEPEVLQDSLDRCYSTPSGYLELPDLGQPYRSAVYSLEEQYLGLALDVDRIKKDQEEEEDQGPPCPRLSRELLEVVEPEVLQDSLDRCYSTPSSCLEQPDSCQPYRSSFYALEEKHVGFSLDVGEIEKKGKGKKRRGRRSKKKRRRGRKEGEEDQNPPCPRLSRELLAEKEPEVLQDSLDRCYSTPSGYLELPDLGQPYRSAVYSLEEQYLGLALDVDRIKKDQEEEEDQGPPCPRLSRELLEVVEPEVLQDSLDRCYSTPSSCLEQPDSCQPYRSSFYALEEKHVGFSLDVGEIEKKGKGKKRRGRRSKKKRRRGRKEGEEDQNPPCPRLNSVLMEVEEPEVLQDSLDRCYSTPSMYFELPDSFQHYRSVFYSFEEQHITFALDMDNSFFTLTVTSLHLVFQMGVIFPQ

SEQ ID NO: 56268 - protein, 1457 aa, Homo sapiens
  Payload ID: 11056
  Gene Symbol: NBPF12
  Gene Name: neuroblastoma breakpoint family, member 12
  ENSP ID: ENSP00000478609
MVVSAGPWSSEKAEMNILEINEKLRPQLAENKQQFRNLKERCFLTQLAGFLANRQKKYKYEECKDLIKFMLRNERQFKEEKLAEQLKQAEELRQYKVLVHSQERELTQLREKLREGRDASRSLNEHLQALLTPDEPDKSQGQDLQEQLAEGCRLAQQLVQKLSPENDEDEDEDVQVEEDEKVLESSAPREVQKAEESKVPEDSLEECAITCSNSHGPCDSIQPHKNIKITFEEDKVNSTVVVDRKSSHDECQDALNILPVPGPTSSATNVSMVVSAGPLSSEKAEMNILEINEKLRPQLAEKKQQFRSLKEKCFVTQLAGFLAKQQNKYKYEECKDLIKSMLRNELQFKEEKLAEQLKQAEELRQYKVLVHSQERELTQLREKLREGRDASRSLNEHLQALLTPDEPDKSQGQDLQEQLAEGCRLAQHLVQKLSPENDEDEDEDVQVEEDEKVLESSSPREMQKAEESKVPEDSLEECAITCSNSHGPCDSNQPHKNIKITFEEDKVNSSLVVDRESSHDECQDALNILPVPGPTSSATNVSMVVSAGPLSSEKAEMNILEINEKLRPQLAEKKQQFRSLKEKCFVTQVACFLAKQQNKYKYEECKDLLKSMLRNELQFKEEKLAEQLKQAEELRQYKVLVHSQERELTQLREKLREGRDASRSLNEHLQALLTPDEPDKSQGQDLQEQLAEGCRLAQHLVQKLSPENDNDDDEDVQVEVAEKVQKSSSPREMQKAEEKEVPEDSLEECAITCSNSHGPYDSNQPHRKTKITFEEDKVDSTLIGSSSHVEWEDAVHIIPENESDDEEEEEKGPVSPRNLQESEEEEVPQESWDEGYSTLSIPPERLASYQSYSSTFHSLEEQQVCMAVDIGRHRWDQVKKEDQEATGPRLSRELLAEKEPEVLQDSLDRCYSTPSVYLGLTDSCQPYRSAFYVLEQQRVGLAVDMDEIEKYQEVEEDQDPSCPRLSRELLAEKEPEVLQDSLDRCYSTPSGYLELPDLGQPYRSAVYSLEEQYLGLALDVDRIKKDQEEEEDQGPPCPRLSRELLEVVEPEVLQDSLDRCYSTPSSCLEQPDSCQPYRSSFYALEEKHVGFSLDVGEIEKKGKGKKRRGRRSKKKRRRGRKEGEEDQNPPCPRLSRELLAEKEPEVLQDSLDRWYSTPSVYLGLTDPCQPYRSAFYVLEQQRVGLAVDMDEIEKYQEVEEDQDPSCPRLSRELLAEKEPEVLQDSLDRCYSTPSGYLELPDLGQPYRSAVYSLEEQYLGLALDVDRIKKDQEEEEDQGPPCPRLSRELLEVVEPEVLQDSLDRCYSTPSSCLEQPDSCQPYRSSFYALEEKHVGFSLDVGEIEKKGKGKKRRGRRSKKKRRRGRKEGEEDQNPPCPRLNSVLMEVEEPEVLQDSLDRCYSTPSMYFELPDSFQHYRSVFYSFEEQHITFALDMDNSFFTLTVTSLHLVFQMGVIFPQ

SEQ ID NO: 56269 - protein, 865 aa, Homo sapiens [sequence omitted]

SEQ ID NO: 56270 - protein, 867 aa, Homo sapiens
  Payload ID: 11056
  Gene Symbol: NBPF12
  Gene Name: neuroblastoma breakpoint family, member 12
  ENSP ID: ENSP00000480046
MVVSAGPLSSEKAEMNILEINEKLRPQLAEKKQQFRSLKEKCFVTQLAGFLAKQQNKYKYEECKDLIKSMLRNELQFKEEKLAEQLKQAEELRQYKVLVHSQERELTQLREKLREGRDASRSLNEHLQALLTPDEPDKSQGQDLQEQLAEGCRLAQHLVQKLSPENDEDEDEDVQVEEDEKVLESSSPREMQKAEESKVPEDSLEECAITCSNSHGPCDSNQPHKNIKITFEEDKVNSSLVVDRESSHDECQDALNILPVPGPTSSATNVSMVVSAGPLSSEKAEMNILEINEKLRPQLAEKKQQFRSLKEKCFVTQVACFLAKQQNKYKYEECKDLLKSMLRNELQFKEEKLAEQLKQAEELRQYKVLVHSQERELTQLREKLREGRDASRSLNEHLQALLTPDEPDKSQGQDLQEQLAEGCRLAQHLVQKLSPENDNDDDEDVQVEVAEKVQKSSSPREMQKAEEKEVPEDSLEECAITCSNSHGPYDSNQPHRKTKITFEEDKVDSTLIGSSSHVEWEDAVHIIPENESDDEEEEEKGPVSPRNLQESEEEEVPQESWDEGYSTLSIPPERLASYQSYSSTFHSLEEQQVCMAVDIGRHRWDQVKKEDQEATGPRLSRELLAEKEPEVLQDSLDRCYSTPSGYLELPDLGQPYRSAVYSLEEQYLGLALDVDRIKKDQEEEEDQGPPCPRLSRELLEVVEPEVLQDSLDRCYSTPSSCLEQPDSCQPYRSSFYALEEKHVGFSLDVGEIEKKGKGKKRRGRRSKKKRRRGRKEGEEDQNPPCPRLNSVLMEVEEPEVLQDSLDRCYSTPSMYFELPDSFQHYRSVFYSFEEQHITFALDMDNSFFTLTVTSLHLVFQMGVIFPQ

SEQ ID NO: 56271 - protein, 1213 aa, Homo sapiens
  Payload ID: 11056
  Gene Symbol: NBPF12
  Gene Name: neuroblastoma breakpoint family, member 12
  ENSP ID: ENSP00000481469
MVVSAGPWSSEKAEMNILEINEKLRPQLAENKQQFRNLKERCFLTQLAGFLANRQKKYKYEECKDLIKFMLRNERQFKEEKLAEQLKQAEELRQYKVLVHSQERELTQLREKLREGRDASRSLNEHLQALLTPDEPDKSQGQDLQEQLAEGCRLAQQLVQKLSPENDEDEDEDVQVEEDEKVLESSAPREVQKAEESKVPEDSLEECAITCSNSHGPCDSIQPHKNIKITFEEDKVNSTVVVDRKSSHDECQDALNILPVPGPTSSATNVSMVVSAGPLSSEKAEMNILEINEKLRPQLAEKKQQFRSLKEKCFVTQLAGFLAKQQNKYKYEECKDLIKSMLRNELQFKEEKLAEQLKQAEELRQYKVLVHSQERELTQLREKLREGRDASRSLNEHLQALLTPDEPDKSQGQDLQEQLAEGCRLAQHLVQKLSPENDEDEDEDVQVEEDEKVLESSSPREMQKAEESKVPEDSLEECAITCSNSHGPCDSNQPHKNIKITFEEDKVNSSLVVDRESSHDECQDALNILPVPGPTSSATNVSMVVSAGPLSSEKAEMNILEINEKLRPQLAEKKQQFRSLKEKCFVTQVACFLAKQQNKYKYEECKDLLKSMLRNELQFKEEKLAEQLKQAEELRQYKVLVHSQERELTQLREKLREGRDASRSLNEHLQALLTPDEPDKSQGQDLQEQLAEGCRLAQHLVQKLSPENDNDDDEDVQVEVAEKVQKSSSPREMQKAEEKEVPEDSLEECAITCSNSHGPYDSNQPHRKTKITFEEDKVDSTLIGSSSHVEWEDAVHIIPENESDDEEEEEKGPVSPRNLQESEEEEVPQESWDEGYSTLSIPPERLASYQSYSSTFHSLEEQQVCMAVDIGRHRWDQVKKEDQEATGPRLSRELLAEKEPEVLQDSLDRCYSTPSVYLGLTDSCQPYRSAFYVLEQQRVGLAVDMDEIEKYQEVEEDQDPSCPRLSRELLAEKEPEVLQDSLDRCYSTPSGYLELPDLGQPYRSAVYSLEEQYLGLALDVDRIKKDQEEEEDQGPPCPRLSRELLEVVEPEVLQDSLDRCYSTPSSCLEQPDSCQPYRSSFYALEEKHVGFSLDVGEIEKKGKGKKRRGRRSKKKRRRGRKEGEEDQNPPCPRLNSVLMEVEEPEVLQDSLDRCYSTPSMYFELPDSFQHYRSVFYSFEEQHITFALDMDNSFFTLTVTSLHLVFQMGVIFPQ

SEQ ID NO: 56272 - protein, 299 aa, Homo sapiens [sequence omitted]

SEQ ID NO: 56273 - protein, 1457 aa, Homo sapiens; identical to SEQ ID NO: 56268
  Payload ID: 11056
  Gene Symbol: NBPF12
  Gene Name: neuroblastoma breakpoint family, member 12
  ENSP ID: ENSP00000484391

SEQ ID NO: 56274 - protein, 942 aa, Homo sapiens
  Payload ID: 11057
  Gene Symbol: NBPF14
  Gene Name: neuroblastoma breakpoint family, member 14
  ENSP ID: ENSP00000463341
MVVSAGPWSSEKAEMNILEINETLRPQLAEKKQQFRNLKEKCFLTQLAGFLANQQKKYKYEECKDLIKFMLRNERQFKEEKLAEQLKQAEELRQYKVLVHSQERELTQLREKLREGRDASRSLYEHLQALLTPYEPDKSQGQDLQEQLAEGCRLAQHLVQKLSPENDEDEDEDVQVEEAEKVLESSAPREVQKAEESKVPEDSLEECAITCSNSHGPCDSNQPHKNIKITFEEDEVNSTLVVDRESSHDECQDALNILPVPGPTSSATNVSMVVSAGPLSSEKAEMNILEINEKLRPQLAEKKQQFRNLKEKCFLTQLSGFLANQQKKYKYEECKDLIKFMLRNERQFKEEKLAEQLKQAEELRQYKVLVHAQERELTQLREKLREGRDASRSLNEHLQALLTPDEPDKSQGQDLQEQLAEGCRLAQHLVQKLSPENDNDDDEDVQVEVAEKVQKSSAPREMQKAEEKEVPEDSLEECAITYSNSHGSYDSNQPHRKTKITFEEDKVDSTLIGSSSHVEWEDAVHIIPENESDDEEEEEKGPVSPRNLQESEEEEVPQESWDEGYSTLSIPPEMLASYQSYSSTFHSLEEQQVCMAVDIGRHRWDQVKKEDQEATGPRLSRELLDEKGPEVLQDSLDRCYSTPSGCLELTDSCQPYRSAFYVLEQQRVGLAVDMDEIEKYQEVEEDQDPSCPRLSRELLDEKEPEVLQDSLDRCYSTPSGYLELPDLGQPYSSAVYSLEEQYLGLALDVDRIKKDQEEEEDQGPPCPRLSRELLEVVEPEVLQDSLDRCYSTPSSCLEQPDSCQPYGSSFYALEEKHVGFSLDVGEIEKKGKGKKRRGRRSKKERRRGRKEGEEDQNPPCPRLNGVLMEVEEREVLQDSLDRCYSTPSMYFELPDSFQHYRSVFYSFEEQHISFALYVDNRFFTLTVTSLHLVFQMGVIFPQ

SEQ ID NO: 56275 - protein, 249 aa, Homo sapiens
  Payload ID: 11057
  Gene Symbol: NBPF14
  Gene Name: neuroblastoma breakpoint family, member 14
  ENSP ID: ENSP00000472124
MCRDGYEPCVNEGMCVTYHNGTGYCKCPEGFLGEYCQHRDPCEKNRCQNGGTCVAQAMLGKATCRCASGFTGEDCQYSTSHPCFVSRPCLNGGTCHMLSRDTYECTCQVGFTGKECQWTDACLSHPCANGSTCTTVANQFSCKCLTGFTGQKCETDVNECDIPGHCQHGGICLNLPGSYQCQCLQGFTGQYCDSLYVPCAPSPCVNGGTCRQTGDFTFECNCLPETVRRGTELWERDREVWNGKEHDEN

SEQ ID NO: 56276 - protein, 77 aa, Homo sapiens
  Payload ID: 11057
  Gene Symbol: NBPF14
  Gene Name: neuroblastoma breakpoint family, member 14
  ENSP ID: ENSP00000475918
MVVSAGPWSSEKAEMNILEINETLRPQLAEKKQQFRNLKEKCFLTQLAGFLANQQKKYKYEECKDLIKFMLRNERQF

SEQ ID NO: 56277 - protein, 299 aa, Homo sapiens
  Payload ID: 11057
  Gene Symbol: NBPF14
  Gene Name: neuroblastoma breakpoint family, member 14
  ENSP ID: ENSP00000478050
MVVSAGPLSSEKAEMNILEINEKLRPQLAEKKQQFRNLKEKCFLTQLSGFLANQQKKYKYEECKDLIKFMLRNERQFKEEKLAEQLKQAEELRQYKVLVHAQERELTQLREKLREGRDASRSLNEHLQALLTPDEPDKSQGQDLQEQLAEGCRLAQHLVQKLSPENDNDDDEDVQVEVAEKVQKSSAPREMQKAEEKEVPEDSLEECAITYSNSHGSYDSNQPHRKTKITFEEDKVDSTLIGSSSHVEWEDAVHIIPENESDDEEEEEKGPVSPRTSVGSSEKGGPRGNRSQAQQGAAG

SEQ ID NO: 56278 - protein, 921 aa, Homo sapiens
  Payload ID: 11057
  Gene Symbol: NBPF14
  Gene Name: neuroblastoma breakpoint family, member 14
  ENSP ID: ENSP00000478178
MLRNERQFKEEKLAEQLKQAEELRQYKVLVHAQERELTQLREKLREGRDASRSLNEHLQALLTPDEPDKSQGQDLQEQLAEGCRLAQHLVQKLSPENDNDDDEDVQVEVAEKVQKSSAPREMQKAEEKEVPEDSLEECAITYSNSHGSYDSNQPHRKTKITFEEDKVDSTLIGSSSHVEWEDAVHIIPENESDDEEEEEKGPVSPRNLQESEEEEVPQESWDEGYSTLSIPPEMLASYQSYSSTFHSLEEQQVCMAVDIGRHRWDQVKKEDQEATGPRLSRELLDEKGPEVLQDSLDRCYSTPSGCLELTDSCQPYRSAFYVLEQQRVGLAVDMDEIEKYQEVEEDQDPSCPRLSRELLDEKEPEVLQDSLDRCYSTPSGYLELPDLGQPYSSAVYSLEEQYLGLALDVDRIKKDEEEEEDQDPPCPRLSRELLEVVEPEVLQDSLDRCYSTPSSCLEQPDSCQPYGSSFYALEEKHVGFSLDVGEIEKKGKGKKRRGRRSKKERRRGRKEGEEDQNPPCPRLSRELLDEKGPEVLQDSLDRCYSTPSGCLELTDSCQPYRSAFYVLEQQRVGLAVDMDEIEKYQEVEEDQDPSCPRLSRELLDEKGPEVLQDSLDRCYSTPSGCLELTDSCQPYRSAFYVLEQQRVGLAVDMDEIEKYQEVEEDQDPSCPRLSRELLDEKEPEVLQDSLDRCYSTPSGYLELPDLGQPYSSAVYSLEEQYLGLALDVDRIKKDQEEEEDQGPPCPRLSRELLEVVEPEVLQDSLDRCYSTPSSCLEQPDSCQPYGSSFYALEEKHVGFSLDVGEIEKKGKGKKRRGRRSKKERRRGRKEGEEDQNPPCPRLNGVLMEVEEREVLQDSLDRCYSTPSMYFELPDSFQHYRSVFYSFEEQHISFALYVDNRFFTLTVTSLHLVFQMGVIFPQ

SEQ ID NO: 56279 - protein, 535 aa, Homo sapiens
  Payload ID: 11057
  Gene Symbol: NBPF14
  Gene Name: neuroblastoma breakpoint family, member 14
  ENSP ID: ENSP00000478849
MVVSAGPWSSEKAEMNILEINETLRPQLAEKKQQFRNLKEMFSNSTGRLPGQPTEEIQQYKVLVHSQERELTQLREKLREGRDASRSLYEHLQALLTPYEPDKSQGQDLQEQLAEGCRLAQHLVQKLSPENDEDEDEDVQVEEAEKVLESSAPREVQKAEESKVPEDSLEECAITCSNSHGPCDSNQPHKNIKITFEEDEVNSTLVVDRESSHDECQDALNILPVPGPTSSATNVSMVVSAGPLSSEKAEMNILEINEKLRPQLAEKKQQFRNLKEKCFLTQLSGFLANQQKKYKYEECKDLIKFMLRNERQFKEEKLAEQLKQAEELRQYKVLVHAQERELTQLREKLREGRDASRSLNEHLQALLTPDEPDKSQGQDLQEQLAEGCRLAQHLVQKLSPENDNDDDEDVQVEVAEKVQKSSAPREMQKAEEKEVPEDSLEECAITYSNSHGSYDSNQPHRKTKITFEEDKVDSTLIGSSSHVEWEDAVHIIPENESDDEEEEEKGPVSPRTSVGSSEKGGPRGNRSQAQQGAAG

SEQ ID NO: 56280 - protein, 299 aa, Homo sapiens
  Payload ID: 11057
  Gene Symbol: NBPF14
  Gene Name: neuroblastoma breakpoint family, member 14
  ENSP ID: ENSP00000479092
MVVSAGPWSSEKAEMNILEINETLRPQLAEKKQQFRNLKEKCFLTQLAGFLANQQKKYKYEECKDLIKFMLRNERQFKEEKLAEQLKQAEELRQYKVLVHAQERELTQLREKLREGRDASRSLNEHLQALLTPDEPDKSQGQDLQEQLAEGCRLAQHLVQKLSPENDNDDDEDVQVEVAEKVQKSSAPREMQKAEEKEVPEDSLEECAITYSNSHGSYDSNQPHRKTKITFEEDKVDSTLIGSSSHVEWEDAVHIIPENESDDEEEEEKGPVSPRTSVGSSEKGGPRGNRSQAQQGAAG

SEQ ID NO: 56281 - protein, 577 aa, Homo sapiens
  Payload ID: 11057
  Gene Symbol: NBPF14
  Gene Name: neuroblastoma breakpoint family, member 14
  ENSP ID: ENSP00000479380
MVVSAGPWSSEKAEMNILEINETLRPQLAEKKQQFRNLKEKCFLTQLAGFLANQQKKYKYEECKDLIKFMLRNERQFKEEKLAEQLKQAEELRQYKVLVHSQERELTQLREKLREGRDASRSLYEHLQALLTPYEPDKSQGQDLQEQLAEGCRLAQHLVQKLSPENDEDEDEDVQVEEAEKVLESSAPREMQKAEEKEVPEDSLEECAITYSNSHGSYDSNQPHRKTKITFEEDKVDSTLIGSSSHVEWEDAVHIIPENESDDEEEEEKGPVSPRNLQESEEEEVPQESWDEGYSTLSIPPEMLASYQSYSSTFHSLEEQQVCMAVDIGRHRWDQVKKEDQEATGPRLSRELLDEKEPEVLQDSLDRCYSTPSGYLELPDLGQPYSSAVYSLEEQYLGLALDVDRIKKDQEEEEDQGPPCPRLSRELLEVVEPEVLQDSLDRCYSTPSSCLEQPDSCQPYGSSFYALEEKHVGFSLDVGEIEKYQEVEEDQDPSCPRLNGVLMEVEEREVLQDSLDRCYSTPSMYFELPDSFQHYRSVFYSFEEQHISFALYVDNRFFTLTVTSLHLVFQMGVIFPQ

SEQ ID NO: 56282 - protein, 2988 aa, Homo sapiens
  Payload ID: 11057
  Gene Symbol: NBPF14
  Gene Name: neuroblastoma breakpoint family, member 14
  ENSP ID: ENSP00000479693
MVVSAGPWSSEKAEMNILEINETLRPQLAEKKQQFRNLKEKCFLTQLAGFLANQQKKYKYEECKDLIKFMLRNERQFKEEKLAEQLKQAEELRQYKVLVHSQERELTQLREKLREGRDASRSLYEHLQALLTPYEPDKSQGQDLQEQLAEGCRLAQHLVQKLSPENDEDEDEDVQVEEAEKVLESSAPREVQKAEESKVPEDSLEECAITCSNSHGPCDSNQPHKNIKITFEEDEVNSTLVVDRESSHDECQDALNILPVPGPTSSATNVSMVVSAGPLSSEKAEMNILEINEKLRPQLAEKKQQFRNLKEKCFLTQLSGFLANQQKKYKYEECKDLIKFMLRNERQFKEEKLAEQLKQAEELRQYKVLVHAQERELTQLREKLREGRDASRSLNEHLQALLTPDEPDKSQGQDLQEQLAEGCRLAQHLVQKLSPENDNDDDEDVQVEVAEKVQKSSAPREMQKAEEKEVPEDSLEECAITYSNSHGSYDSNQPHRKTKITFEEDKVDSTLIGSSSHVEWEDAVHIIPENESDDEEEEEKGPVSPRNLQESEEEEVPQESWDEGYSTLSIPPEMLASYQSYSSTFHSLEEQQVCMAVDIGRHRWDQVKKEDQEATGPRLSRELLDEKGPEVLQDSLDRCYSTPSGCLELTDSCQPYRSAFYVLEQQRVGLAVDMDEIEKYQEVEEDQDPSCPRLSRELLDEKEPEVLQDSLDRCYSTPSGYLELPDLGQPYSSAVYSLEEQYLGLALDVDRIKKDEEEEEDQDPPCPRLSRELLEVVEPEVLQDSLDRCYSTPSSCLEQPDSCQPYGSSFYALEEKHVGFSLDVGEIEKKGKGKKRRGRRSKKERRRGRKEGEEDQNPPCPRLSRELLDEKEPEVLQDSLDRCYSTPSGYLELPDLGQPYSSAVYSLEEQYLGLALDVDRIKKDEEEEEDQDPPCPRLSRELLEVVEPEVLQDSLDRCYSTPSSCLEQPDSCQPYGSSFYALEEKHVGFSLDVGEIEKKGKGKKRRGRRSKKERRRGRKEGEEDQNPPCPRLSRELLDEKGPEVLQDSLDRCYSTPSGCLELTDSCQPYRSAFYVLEQQRVGLAVDMDEIEKYQEVEEDQDPSCPRLSRELLDEKEPEVLQDSLDRCYSTPSGYLELPDLGQPYSSAVYSLEEQYLGLALDVDRIKKDEEEEEDQDPPCPRLSRELLEVVEPEVLQDSLDRCYSTPSSCLEQPDSCQPYGSSFYALEEKHVGFSLDVGEIEKKGKGKKRRGRRSKKERRRGRKEGEEDQNPPCPRLSRELLDEKGPEVLQDSLDRCYSTPSGCLELTDSCQPYRSAFYVLEQQRVGLAVDMDEIEKYQEVEEDQDPSCPRLSRELLDEKEPEVLQDSLDRCYSTPSGYLELPDLGQPYSSAVYSLEEQYLGLALDVDRIKKDEEEEEDQDPPCPRLSRELLEVVEPEVLQDSLDRCYSTPSSCLEQPDSCQPYGSSFYALEEKHVGFSLDVGEIEKKGKGKKRRGRRSKKERRRGRKEGEEDQNPPCPRLSRELLHEKGPEVLQDSLDRCYSTPSGCLELTDSCQPYRSAFYILEQQRVGLAVDMDEIEKYKEVEEDQDPSCPRLSRELLDEKEPEVLQDSLDRCYSTPSGYLELPDLGQPYSSAVYSLEEQYLGLALDVDRFKKDEEEEEDQDPPCPRLSRELLEVVEPEVLQDSLDRCYSTPSSCLEQPDSCQPYGSSFYALEEKHVGFSLDVGEIEKKGKGKKRRGRRSKKERRRGRKEGEEDQNPPCPRLSRELLDEKGPEVLQDSLDRCYSTPSGCLELTDSCQPYRSAFYVLEQQRVGLAVDMDEIEKYKEVEEDQDPSCPRLSRELLDEKEPEVLQDSLDRCYSTPSGYLELPDLGQPYSSAVYSLEEQYLGLALDVDRIKKDQEEEEDQGPPCPRLSRELLEVVEPEVLQDSLDRCYSTPSSCLEQPDSCQPYGSSFYALEEKHVGFSLDVGEIEKKGKGKKRRGRRSKKERRRGRKEGEEDQNPPCPRLSRELLDEKGPEVLQDSLDRCYSTPSGCLELTDSCQPYRSAFYVLEQQRVGLAVDMDEIEKYKEVEEDQDPSCPRLSRELLDEKEPEVLQDSLDRCYSTPSGYLELPDLGQPYSSAVYSLEEQYLGLALDVDRIKKDQEEEEDQGPPCPRLSRELLEVVEPEVLQDSLDRCYSTPSSCLEQPDSCQPYGSSFYALEEKHVGFSLDVGEIEKKGKGKKRRGRRSKKERRRGRKEGEEDQNPPCPRLSRELLDEKGPEVLQDSLDRCYSTPSGCLELTDSCQPYRSAFYVLEQQRVGLAVDMDEIEKYKEVEEDQDPSCPRLSRELLDEKEPEVLQDSLDRCYSTPSGYLELPDLGQPYSSAVYSLEEQYLGLALDVDRIKKDQEEEEDQGPPCPRLSRELLEVVEPEVLQDSLDRCYSTPSSCLEQPDSCQPYGSSFYALEEKHVGFSLDVGEIEKKGKGKKRRGRRSKKERRRGRKEGEEDQNPPCPRLSRELLDEKGPEVLQDSLDRCYSTPSGCLELTDSCQPYRSAFYVLEQQRVGLAVDMDEIEKYKEVEEDQDPSCPRLSRELLDEKEPEVLQDSLDRCYSTPSGYLELPDLGQPYSSAVYSLEEQYLGLALDVDRIKKDQEEEEDQGPPCPRLSRELLEVVEPEVLQDSLDRCYSTPSSCLEQPDSCQPYGSSFYALEEKHVGFSLDVGEIEKKGKGKKRRGRRSKKERRRGRKEGEEDQNPPCPRLSRELLDEKGPEVLQDSLDRCYSTPSGCLELTDSCQPYRSAFYVLEQQRVGLAVDMDEIEKYQEVEEDQDPSCPRLSRELLDEKDPEVLQDSLDRCYSTPSGYLELPDLGQPYSSAVYSLEEQYLGLALDVDKIEKKGKGKKRRGRRSKKERRRGRKEGEEDQNPPCPRLNGVLMEVEEREVLQDSLDRCYSTPSMYFELPDSFQHYRSVFYSFEEQHISFALYVDNRFFTLTVTSLHLVFQMGVIFPQ

SEQ ID NO: 56283 - protein, 867 aa, Homo sapiens
  Payload ID: 11057
  Gene Symbol: NBPF14
  Gene Name: neuroblastoma breakpoint family, member 14
  ENSP ID: ENSP00000481840
MVVSAGPWSSEKAEMNILEINETLRPQLAEKKQQFRNLKEKCFLTQLAGFLANQQKKYKYEECKDLIKFMLRNERQFKEEKLAEQLKQAEELRQYKVLVHSQERELTQLREKLREGRDASRSLYEHLQALLTPYEPDKSQGQDLQEQLAEGCRLAQHLVQKLSPENDEDEDEDVQVEEAEKVLESSAPREVQKAEESKVPEDSLEECAITCSNSHGPCDSNQPHKNIKITFEEDEVNSTLVVDRESSHDECQDALNILPVPGPTSSATNVSMVVSAGPLSSEKAEMNILEINEKLRPQLAEKKQQFRNLKEKCFLTQLSGFLANQQKKYKYEECKDLIKFMLRNERQFKEEKLAEQLKQAEELRQYKVLVHAQERELTQLREKLREGRDASRSLNEHLQALLTPDEPDKSQGQDLQEQLAEGCRLAQHLVQKLSPENDNDDDEDVQVEVAEKVQKSSAPREMQKAEEKEVPEDSLEECAITYSNSHGSYDSNQPHRKTKITFEEDKVDSTLIGSSSHVEWEDAVHIIPENESDDEEEEEKGPVSPRNLQESEEEEVPQESWDEGYSTLSIPPEMLASYQSYSSTFHSLEEQQVCMAVDIGRHRWDQVKKEDQEATGPRLSRELLDEKEPEVLQDSLDRCYSTPSGYLELPDLGQPYSSAVYSLEEQYLGLALDVDRIKKDQEEEEDQGPPCPRLSRELLEVVEPEVLQDSLDRCYSTPSSCLEQPDSCQPYGSSFYALEEKHVGFSLDVGEIEKKGKGKKRRGRRSKKERRRGRKEGEEDQNPPCPRLNGVLMEVEEREVLQDSLDRCYSTPSMYFELPDSFQHYRSVFYSFEEQHISFALYVDNRFFTLTVTSLHLVFQMGVIFPQ

SEQ ID NO: 56284 - protein, 2819 aa, Homo sapiens
  Payload ID: 11057
  Gene Symbol: NBPF14
  Gene Name: neuroblastoma breakpoint family, member 14
  ENSP ID: ENSP00000482693
MVVSAGPWSSEKAEMNILEINETLRPQLAEKKQQFRNLKEKCFLTQLAGFLANQQKKYKYEECKDLIKFMLRNERQFKEEKLAEQLKQAEELRQYKVLVHSQERELTQLREKLREGRDASRSLYEHLQALLTPYEPDKSQGQDLQEQLAEGCRLAQHLVQKLSPENDEDEDEDVQVEEAEKVLESSAPREVQKAEESKVPEDSLEECAITCSNSHGPCDSNQPHKNIKITFEEDEVNSTLVVDRESSHDECQDALNILPVPGPTSSATNVSMVVSAGPLSSEKAEMNILEINEKLRPQLAEKKQQFRNLKEKCFLTQLSGFLANQQKKYKYEECKDLIKFMLRNERQFKEEKLAEQLKQAEELRQYKVLVHAQERELTQLREKLREGRDASRSLNEHLQALLTPDEPDKSQGQDLQEQLAEGCRLAQHLVQKLSPENDNDDDEDVQVEVAEKVQKSSAPREMQKAEEKEVPEDSLEECAITYSNSHGSYDSNQPHRKTKITFEEDKVDSTLIGSSSHVEWEDAVHIIPENESDDEEEEEKGPVSPRNLQESEEEEVPQESWDEGYSTLSIPPEMLASYQSYSSTFHSLEEQQVCMAVDIGRHRWDQVKKEDQEATGPRLSRELLDEKGPEVLQDSLDRCYSTPSGCLELTDSCQPYRSAFYVLEQQRVGLAVDMDEIEKYQEVEEDQDPSCPRLSRELLDEKEPEVLQDSLDRCYSTPSGYLELPDLGQPYSSAVYSLEEQYLGLALDVDRIKKDEEEEEDQDPPCPRLSRELLEVVEPEVLQDSLDRCYSTPSSCLEQPDSCQPYGSSFYALEEKHVGFSLDVGEIEKKGKGKKRRGRRSKKERRRGRKEGEEDQNPPCPRLSRELLDEKGPEVLQDSLDRCYSTPSGCLELTDSCQPYRSAFYVLEQQRVGLAVDMDEIEKYQEVEEDQDPSCPRLSRELLDEKEPEVLQDSLDRCYSTPSGYLELPDLGQPYSSAVYSLEEQYLGLALDVDRIKKDEEEEEDQDPPCPRLSRELLEVVEPEVLQDSLDRCYSTPSSCLEQPDSCQPYGSSFYALEEKHVGFSLDVGEIEKKGKGKKRRGRRSKKERRRGRKEGEEDQNPPCPRLSRELLDEKGPEVLQDSLDRCYSTPSGCLELTDSCQPYRSAFYVLEQQRVGLAVDMDEIEKYQEVEEDQDPSCPRLSRELLDEKEPEVLQDSLDRCYSTPSGYLELPDLGQPYSSAVYSLEEQYLGLALDVDRIKKDEEEEEDQDPPCPRLSRELLEVVEPEVLQDSLDRCYSTPSSCLEQPDSCQPYGSSFYALEEKHVGFSLDVGEIEKKGKGKKRRGRRSKKERRRGRKEGEEDQNPPCPRLSRELLHEKGPEVLQDSLDRCYSTPSGCLELTDSCQPYRSAFYILEQQRVGLAVDMDEIEKYKEVEEDQDPSCPRLSRELLDEKEPEVLQDSLDRCYSTPSGYLELPDLGQPYSSAVYSLEEQYLGLALDVDRFKKDEEEEEDQDPPCPRLSRELLEVVEPEVLQDSLDRCYSTPSSCLEQPDSCQPYGSSFYALEEKHVGFSLDVGEIEKKGKGKKRRGRRSKKERRRGRKEGEEDQNPPCPRLSRELLDEKGPEVLQDSLDRCYSTPSGCLELTDSCQPYRSAFYVLEQQRVGLAVDMDEIEKYKEVEEDQDPSCPRLSRELLDEKEPEVLQDSLDRCYSTPSGYLELPDLGQPYSSAVYSLEEQYLGLALDVDRIKKDQEEEEDQGPPCPRLSRELLEVVEPEVLQDSLDRCYSTPSSCLEQPDSCQPYGSSFYALEEKHVGFSLDVGEIEKKGKGKKRRGRRSKKERRRGRKEGEEDQNPPCPRLSRELLDEKGPEVLQDSLDRCYSTPSGCLELTDSCQPYRSAFYVLEQQRVGLAVDMDEIEKYKEVEEDQDPSCPRLSRELLDEKEPEVLQDSLDRCYSTPSGYLELPDLGQPYSSAVYSLEEQYLGLALDVDRIKKDQEEEEDQGPPCPRLSRELLEVVEPEVLQDSLDRCYSTPSSCLEQPDSCQPYGSSFYALEEKHVGFSLDVGEIEKKGKGKKRRGRRSKKERRRGRKEGEEDQNPPCPRLSRELLDEKGPEVLQDSLDRCYSTPSGCLELTDSCQPYRSAFYVLEQQRVGLAVDMDEIEKYKEVEEDQDPSCPRLSRELLDEKEPEVLQDSLDRCYSTPSGYLELPDLGQPYSSAVYSLEEQYLGLALDVDRIKKDQEEEEDQGPPCPRLSRELLEVVEPEVLQDSLDRCYSTPSSCLEQPDSCQPYGSSFYALEEKHVGFSLDVGEIEKKGKGKKRRGRRSKKERRRGRKEGEEDQNPPCPRLSRELLDEKGPEVLQDSLDRCYSTPSGCLELTDSCQPYRSAFYVLEQQRVGLAVDMDEIEKYKEVEEDQDPSCPRLSRELLDEKEPEVLQDSLDRCYSTPSGYLELPDLGQPYSSAVYSLEEQYLGLALDVDRIKKDQEEEEDQGPPCPRLSRELLEVVEPEVLQDSLDRCYSTPSSCLEQPDSCQPYGSSFYALEEKHVGFSLDVGEIEKKGKGKKRRGRRSKKERRRGRKEGEEDQNPPCPRLSRELLDEKGPEVLQDSLDRCYSTPSGCLELTDSCQPYRSAFYVLEQQRVGLAVDMDEIEKYQEVEEDQDPSCPRLSRELLDEKDPEVLQDSLDRCYSTPSGYLELPDLGQPYSSAVYSLEEQYLGLALDVDKIEKKGKGKKRRGRRSKKERRRGRKEGEEDQNPPCPRLNGVLMEVEEREVLQDSLDRCYSTPSMYFELPDSFQHYRSVFYSFEEQHISFALYVDNRFFTLTVTSLHLVFQMGVIFPQ

SEQ ID NO: 56285 - protein, 670 aa, Homo sapiens
  Payload ID: 11058
  Gene Symbol: NBPF15
  Gene Name: neuroblastoma breakpoint family, member 15
  Uniprot ID: Q8N660
  ENSP ID: ENSP00000462600
MVVSAGPLSSEKAEMNILEINEKLRPQLAEKKQQFRNLKEKCFLTQLAGFLANRQKKYKYEECKDLIKFMLRNERQFKEEKLAEQLKQAEELRQYKVLVHAQERELTQLREKLREGRDASRSLNEHLQALLTPDEPDKSQGQDLQEQLAEGCRLTQHLVQKLSPENDNDDDEDVQVEVAEKVQKSSAPREMQKAEEKEVPEDSLEECAITCSNSHGPYDSNQPHKKTKITFEEDKVDSTLIGSSSHVEWEDAVHIIPENESDDEEEEEKGPVSPRNLQESEEEEVPQESWDEGYSTLSIPPEMLASYQSYSSTFHSLEEQQVCMAVDIGRHRWDQVKKEDQEATGPRLSRELLDEKEPEVLQDSLDRCYSTPSGCLELTDSCQPYRSAFYVLEQQRVGLAIDMDEIEKYQEVEEDQDPSCPRLSRELLDEKEPEVLQDSLDRCYSTPSDYLELPDLGQPYSSAVYSLEEQYLGLALDVDRIKKDQEEEEDQGPPCPRLSRELLEVVEPEVLQDSLDRCYSTPSSCLEQPDSCQPYGSSFYALEEKHVGFSLDVGEIEKKGKGKKRRGRRSKKKRRRGRKEGEDDNPPCPRLYGVLMEVEEPEVLQDSLDRCYSTPSMYFEQPDSFQHYRSVFYSFEEEHISFALYVDNRFFTLTVTSLHLVFQMGVIFPQ

SEQ ID NO: 56286 - protein, 670 aa, Homo sapiens; identical to SEQ ID NO: 56285
  Payload ID: 11058
  Gene Symbol: NBPF15
  Gene Name: neuroblastoma breakpoint family, member 15
  Uniprot ID: Q8N660
  ENSP ID: ENSP00000463178

SEQ ID NO: 56287 - protein, 670 aa, Homo sapiens; identical to SEQ ID NO: 56285
  Payload ID: 11058
  Gene Symbol: NBPF15
  Gene Name: neuroblastoma breakpoint family, member 15
  Uniprot ID: Q8N660
  ENSP ID: ENSP00000481835

SEQ ID NO: 56288 - protein, 921 aa, Homo sapiens
  Payload ID: 11059
  Gene Symbol: NBPF19
  Gene Name: neuroblastoma breakpoint family, member 19
  ENSP ID: ENSP00000358229
MLRNERQFKEEKLAEQLKQAEELRQYKVLFHSQERELTQLREKLREGRDASRSLNEHLQALLTPDEPDKSQGQDLQEQLAEGCRLAQHLVQKLSPENDNDDDEDVQVEVAEKVQKSSAPREMQKAEEKEVPEDSLEECAITYSNSHGPYDSNQPHRKTKITFEEDKVDSTLIGSSSHVEWEDAVHIIPENESDDEEEEEKGPVSPRNLQESEEEEVPQESWDEGYSTLSIPPEMLASYQSYSSTFHSLEEQQVCMAVDIGRHRWDQVKKEDQEATGPRLSRELLDEKGPEVLQDSLDRCYSTPSGCLELTDSCQPYRSAFYVLEQQRVGLAIDMDEIEKYQEVEEDQDPSCPRLSRELLDEKEPEVLQDSLDRCYSTPSGYLELPDLGQPYSSAVYSLEEQYLGLALDVDRIKKDQEEEEDQGPPCPRLSRELLEVVEPEVLQDSLDRCYSTPSSCLEQPDSCQPYGSSFYALEEKHVGFSLDVGEIEKKGKGKKRRGRRSKKERRRGRKEGEEDQNPPCPRLSRELLDEKGPEVLQDSLDRCYSTPSGCLELTDSCQPYRSAFYILEQQCVGLAVDMDEIEKYQEVEEDQDPSCPRLSRELLDEKGPEVLQDSLDRCYSTPSGCLELTDSCQPYRSAFYILEQQCVGLAVDMDEIEKYQEVEEDQDPSCPRLSRELLDEKEPEVLQDSLDRCYSTPSGYLELPDLGQPYSSAVYSLEEQYLGLALDVDRIKKDQEEEEDQGPPCPRLSRELLEVVEPEVLQDSLDRCYSTPSSCLEQPDSCQPYGSSFYALEEKHVGFSLDVGEIEKKGKGKKRRGRRSKKERRRGRKEGEEDQNPPCPRLNSVLMEVEEPEVLQDSLDGCYSTPSMYFELPDSFQHYRSVFYSFEEEHISFALYLDNRFFTLTVTSLHLVFQMLVIFPQ

SEQ ID NO: 56289 - protein, 236 aa, Homo sapiens
  Payload ID: 11059
  Gene Symbol: NBPF19
  Gene Name: neuroblastoma breakpoint family, member 19
  ENSP ID: ENSP00000462298
MCVTYHNGTGYCKCPEGFLGEYCQHRDPCEKNRCQNGGTCVAQAMLGKATCRCASGFTGEDCQYSTSHPCFVSRPCLNGGTCHMLSRDTYECTCQVGFTGKECQWTDACLSHPCANGSTCTTVANQFSCKCLTGFTGQKCETDVNECDIPGHCQHGGTCLNLPGSYQCQCLQGFTGQYCDSLYVPCAPSPCVNGGTCRQTGDFTFECNCLPETVRRGTELWERDREVWNGKEHDEN

SEQ ID NO: 56290 - protein, 3843 aa, Homo sapiens
  Payload ID: 11059
  Gene Symbol: NBPF19
  Gene Name: neuroblastoma breakpoint family, member 19
  ENSP ID: ENSP00000478752
MVVSAGPWSSEKAEMNILEINETLRPQLAEKKQQFRNLKEKCFLTQLAGFLANRQKKYKYEECKDLIKFMLRNERQFKEEKLAEQLKQAEELRQYKVLFHSQERELTQLREKLREGRDASRSLNEHLQALLTPDEPDKSQGQDLQEQLAEGCRLAQHLVQKLSPENDNDDDEDVQVEVAEKVQKSSAPREMQKAEEKEVPEDSLEECAITYSNSHGPYDSNQPHRKTKITFEEDKVDSTLIGSSSHVEWEDAVHIIPENESDDEEEEEKGPVSPRNLQESEEEEVPQESWDEGYSTLSIPPEMLASYQSYSSTFHSLEEQQVCMAVDIGRHRWDQVKKEDQEATGPRLSRELLDEKGPEVLQDSLDRCYSTPSGCLELTDSCQPYRSAFYVLEQQRVGLAIDMDEIEKYQEVEEDQDPSCPRLSRELLDEKEPEVLQDSLDRCYSIPSGYLELPDLGQPYSSAVYSLEEQYLGLALDVDRIKKDQEEEEDQDPPCPRLSRELVEVVEPEVLQDSLDRCYSTPSSCLEQPDSCQPYGSSFYALEEKHVGFSLDVGEIEKKGKGKKRRGRRSKKERRRGRKEGEEDQNPPCPRLSRELLDEKGPEVLQDSLDRCYSTPSGCLELTDSCQPYRSAFYILEQQCVGLAVDMDEIEKYQEVEEDQDPSCPRLSRELLDEKEPEVLQDSLDRCYSIPSGYLELPDLGQPYSSAVYSLEEQYLGLALDVDRIKKDQEEEEDQDPPCPRLSRELVEVVEPEVLQDSLDRCYSTPSSCLEQPDSCQPYGSSFYALEEKHVGFSLDVGEIEKKGKGKKRRGRRSKKERRRGRKEGEEDQNPPCPRLSRELLDEKGPEVLQDSLDRCYSTPSGCLELTDSCQPYRSAFYILEQQCVGLAIDMDEIEKYQEVEEDQDPSCPRLSRELLDEKEPEVLQDSLDRCYSIPSGYLELPDLGQPYSSAVYSLEEQYLGLALDVDRIKKDQEEEEDQDPPCPRLSRELVEVVEPEVLQDSLDRCYSTPSSCLEQPDSCQPYGSSFYALEEKHVGFSLDVGEIEKKGKGKKRRGRRSKKERRRGRKEGEEDQNPPCPRLSRELLDEKGPEVLQDSLDRCYSTPSGCLELTDSCQPYRSAFYILEQQCVGLAVDMDEIEKYQEVEEDQDPSCPRLSRELLDEKEPEVLQDSLDRCYSIPSGYLELPDLGQPYSSAVYSLEEQYLGLALDVDRIKKDQEEEEDQDPPCPRLSRELVEVVEPEVLQDSLDRCYSTPSSCLEQPDSCQPYGSSFYALEEKHVGFSLDVGEIEKKGKGKKRRGRRSKKERRRGRKEGEEDQNPPCPRLSRELLDEKGPEVLQDSLDRCYSTPSGCLELTDSCQPYRSAFYILEQQCVGLAVDMDEIEKYQEVEEDQDPSCPRLSRELLDEKEPEVLQDSLDRCYSIPSGYLELPDLGQPYSSAVYSLEEQYLGLALDVDRIKKDQEEEEDQDPPCPRLSRELVEVVEPEVLQDSLDRCYSTPSSCLEQPDSCQPYGSSFYALEEKHVGFSLDVGEIEKKGKGKKRRGRRSKKERRRGRKEGEEDQNPPCPRLSRELLDEKGPEVLQDSLDRCYSTPSGCLELTDSCQPYRSAFYILEQQCVGLAVDMDEIEKYQEVEEDQDPSCPRLSRELLDEKEPEVLQDSLDRCYSIPSGYLELPDLGQPYSSAVYSLEEQYLGLALDVDRIKKDQEEEEDQDPPCPRLSRELLEVVEPEVLQDSLDRCYSTPSSCLEQPDSCQPYGSSFYALEEKHVGFSLDVGEIEKKGKGKKRRGRRSKKERRRGRKEGEEDQNPPCPRLSRELLDEKGPEVLQDSLDRCYSTPSGCLELTDSCQPYRSAFYILEQQCVGLAVDMDEIEKYQEVEEDQDPSCPRLSRELLDEKEPEVLQDSLDRCYSTPSGYLELPDLGQPYSSAVYSLEEQYLGLALDVDRIKKDQEEEEDQGPPCPRLSRELLEVVEPEVLQDSLDRCYSTPSSCLEQPDSCQPYGSSFYALEEKHVGFSLDVGEIEKKGKGKKRRGRRSKKERRRGRKEGEEDQNPPCPRLSRELLDEKGPEVLQDSLDRCYSTPSGCLELTDSCQPYRSAFYILEQQCVGLAVDMDEIEKYQEVEEDQDPSCPRLSRELLDEKEPEVLQDSLDRCYSTPSGYLELPDLGQPYSSAVYSLEEQYLGLALDVDRIKKDQEEEEDQGPPCPRLSRELLEVVEPEVLQDSLDRCYSTPSSCLEQPDSCQPYGSSFYALEEKHVGFSLDVGEIEKKGKGKKRRGRRSKKERRRGRKEGEEDQNPPCPRLSRELLDEKGPEVLQDSLDRCYSTPSGCLELTDSCQPYRSAFYILEQQCVGLAVDMDEIEKYQEVEEDQDPSCPRLSRELLDEKEPEVLQDSLDRCYSTPSGYLELPDLGQPYSSAVYSLEEQYLGLALDVDRIKKDQEEEEDQGPPCPRLSRELLEVVEPEVLQDSLDRCYSTPSSCLEQPDSCQPYGSSFYALEEKHVGFSLDVGEIEKKGKGKKRRGRRSKKERRRGRKEGEEDQNPPCPRLSRELLDEKGPEVLQDSLDRCYSTPSGCLELTDSCQPYRSAFYILEQQCVGLAVDMDEIEKYQEVEEDQDPSCPRLSRELLDEKEPEVLQDSLDRCYSTPSGYLELPDLGQPYSSAVYSLEEQYLGLALDVDRIKKDQEEEEDQGPPCPRLSRELLEVVEPEVLQDSLDRCYSTPSSCLEQPDSCQPYGSSFYALEEKHVGFSLDVGEIEKKGKGKKRRGRRSKKERRRGRKEGEEDQNPPCPRLSRELLDEKGPEVLQDSLDRCYSTPSGCLELTDSCQPYRSAFYILEQQCVGLAVDMDEIEKYQEVEEDQDPSCPRLSRELLDEKEPEVLQDSLDRCYSTPSGYLELPDLGQPYSSAVYSLEEQYLGLALDVDRIKKDQEEEEDQGPPCPRLSRELLEVVEPEVLQDSLDRCYSTPSSCLEQPDSCQPYGSSFYALEEKHVGFSLDVGEIEKKGKGKKRRGRRSKKERRRGRKEGEEDQNPPCPRLSRELLDEKGPEVLQDSLDRCYSTPSGCLELTDSCQPYRSAFYILEQQCVGLAVDMDEIEKYQEVEEDQDPSCPRLSRELLAEKEPEVLQDPLDRCYSTPSGYLELPDLGQPYSSAVYSLEEQYLGLALDVDRIKKDQEEEEDQGPPCPRLSRELLEVVEPEVLQDSLDRCYSTPSSCLEQPDSCQPYGSSFYALEEKHVGFSLDVGEIEKKGKGKKRRGRRSKKERRRGRKEGEEDQNPPCPRLSRELLDEKGPEVLQDSLDRCYSTPSGCLELTDSCQPYRSAFYILEQQCVGLAVDMDEIEKYQEVEEDQDPSCPRLSRELLAEKEPEVLQDPLDRCYSTPSGYLELPDLGQPYSSAVYSLEEQYLGLALDVDRIKKDQEEEEDQGPPCPRLSRELLEVVEPEVLQDSLDRCYSTPSSCLEQPDSCQPYGSSFYALEEKHVGFSLDVGEIEKKGKGKKRRGRRSKKERRRGRKEGEEDQNPPCPRLSRELLDEKGPEVLQDSLDRCYSTPSGCLELTDSCQPYRSAFYILEQQCVGLAVDMDEIEKYQEVEEDQDPSCPRLSRELLAEKEPEVLQDPLDRCYSTPSGYLELPDLGQPYSSAVYSLEEQYLGLALDVDRIKKDQEEEEDQGPPCPRLSRELLEVVEPEVLQDSLDRCYSTPSSCLEQPDSCQPYGSSFYALEEKHVGFSLDVGEIEKKGKGKKRRGRRSKKERRRGRKEGEEDQNPPCPRLNSVLMEVEEPEVLQDSLDGCYSTPSMYFELPDSFQHYRSVFYSFEEEHISFALYLDNRFFTLTVTSLHLVFQMLVIFPQ

SEQ ID NO: 56291 - protein, 299 aa, Homo sapiens
  Payload ID: 11059
  Gene Symbol: NBPF19
  Gene Name: neuroblastoma breakpoint family, member 19
  ENSP ID: ENSP00000480326
MVVSAGPWSSEKAEMNILEINETLRPQLAEKKQQFRNLKEKCFLTQLAGFLANRQKKYKYEECKDLIKFMLRNERQFKEEKLAEQLKQAEELRQYKVLFHSQERELTQLREKLREGRDASRSLNEHLQALLTPDEPDKSQGQDLQEQLAEGCRLAQHLVQKLSPENDNDDDEDVQVEVAEKVQKSSAPREMQKAEEKEVPEDSLEECAITYSNSHGPYDSNQPHRKTKITFEEDKVDSTLIGSSSHVEWEDAVHIIPENESDDEEEEEKGPVSPRTSLGSSEKGGPRGNRSQAQQGAAG

SEQ ID NO: 56292 - protein, 299 aa, Homo sapiens; identical to SEQ ID NO: 56291
  Payload ID: 11059
  Gene Symbol: NBPF19
  Gene Name: neuroblastoma breakpoint family, member 19
  ENSP ID: ENSP00000484655

SEQ ID NO: 56293 - protein, 235 aa, Homo sapiens
  Payload ID: 11059
  Gene Symbol: NBPF19
  Gene Name: neuroblastoma breakpoint family, member 19
  ENSP ID: ENSP00000484787
DQEEEEDQDPPCPRELVEVVEPEVLQDSLDRCYSTPSSCLEQPDSCQPYGSSFYALEEKHVGFSLDVGGERGRKEGEEDQNPPCPRLSRELLDEKGPEVLQDSLDRCYSTPSGCLELTDSCQPYRSAFYILEQQCVGLAVDMDEIEKYQEVEEDQDPSCPRLSRELLDEKEPEVLQDSLDRCYSIPSGYLELPDLGQPYSSAVYSLEEQYLGLALDVDRIKKDQEEEEDQDPPCP

SEQ ID NO: 56294 - protein, 5646 aa, Homo sapiens
  Payload ID: 11060
  Gene Symbol: NBPF20
  Gene Name: neuroblastoma breakpoint family, member 20
  ENSP ID: ENSP00000358380
MVVSAGPWSSEKAEMNILEINEKLRPQLAENKQQFGNLKERCFVTQLAGFLANQQKKYKYEECKDLIKSMLRNERQFKEEKLAEQLKQAEELRQYKVLVHAQERELTQLREKLREGRDASRSLNEHLQALLTPDEPDKSQGQDLQEQLAEGCRLAQHLVQKLSPENDNDDDEDVQVELAEKVQKSSAPREMQKAEEKEVPEDSQEECAITYSNSHGPYDSNQPHRKTKITFEEDKVDSTLIGSSSHVEWEDAVHIIPGKNESDDEEEEEKGPVSPRNLQESEEEEVPQESWDEGYSTLSIPPEMLASYQSYSSTFHSLEEQQVCMAVDIGRHRWDQVKKEDQEATGPRLSRELLDEKGPEVLQDSLDRCYSTPSGCLELTDSCQPYRSAFYVLEQQRIGLAVDMDEIEKYQEVEEDQDPSCPRLSRELLDEKEPEVLQDSLDRCYSTPSGYLELPDLGQPYSSAVYSLEEQYLGLALDVDRTKKDQEEEEDQGPPCPRLSRELLEVVEPEVLQDSLDRCYSTPSSCLEQPDSCQPYGSSFYALEEKHVGFSLDVGEIEKKGKGKKRRGRRSKKERRRGRKEGEEDQNPPCPRLSRELLDEKGPEVLQDSLDRCYSTPSGCLELTDSCQPYRSAFYVLEQQRVGLAVDMDEIEKYQEVEEDQDPSCPRLSRELLDEKEPEVLQDSLDRCYSTPSGYLELPDLGQPYSSAVYSLEEQYLGLALDVDRTKKDQEEEEDQGPPCPRLSRELLEVVEPEVLQDSLDRCYSTPSSCLEQPDSCQPYGSSFYALEEKHVGFSLDVGEIEKKGKGKKRRGRRSKKERRRGRKEGEEDQNPPCPRLSRELLDEKGPEVLQDSLDRSYSTPSGCLELTDSCQPYRSAFYVLEQQRVGLAVDMDEIEKYQEVEEDQDPSCPRLSRELLDEKEPEVLQDSLDRCYSTPSGYLELPDLGQPYSSAVYSLEEQYLGLALDVDRTKKDQEEEEDQGPPCPRLSRELLEVVEPEVLQDSLDRCYSTPSSCLEQPDSCQPYGSSFYALEEKHVGFSLDVGEIEKKGKGKKRRGRRSKKERRRGRKEGEEDQNPPCPRLSRELLDEKGPEVLQDSLDRCYSTPSGCLELTDSCQPYRSAFYVLEQQRVGLAVDMDEIEKYQEVEEDQDPSCPRLSRELLDEKEPEVLQDSLDRCYSTPSGYLELPDLGQPYSSAVYSLEEQYLGLALDVDRTKKDQEEEEDQGPPCPRLSRELLEVVEPEVLQDSLDRCYSTPSSCLEQPDSCQPYGSSFYALEEKHVGFSLDVGEIEKKGKGKKRRGRRSKKERRRGRKEGEEDQNPPCPRLSRELLDEKGPEVLQDSLDRSYSTPSGCLELTDSCQPYRSAFYVLEQQRVGLAVDMDEIEKYQEVEEDQDPSCPRLSRELLDEKEPEVLQDSLDRCYSTPSGYLELPDLGQPYSSAVYSLEEQYLGLALDVDRTKKDQEEEEDQGPPCPRLSRELLEVVEPEVLQDSLDRCYSTPSSCLEQPDSCQPYGSSFYALEEKHVGFSLDVGEIEKKGKGKKRRGRRSKKERRRGRKEGEEDQNPPCPRLSRELLDEKGPEVLQDSLDRSYSTPSGCLELTDSCQPYRSAFYVLEQQRVGLAVDMDEIEKYQEVEEDQDPSCPRLSRELLDEKEPEVLQDSLDRCYSTPSGYLELPDLGQPYSSAVYSLEEQYLGLALDVDRTKKDQEEEEDQGPPCPRLSRELLEVVEPEVLQDSLDRCYSTPSSCLEQPDSCQPYGSSFYALEEKHVGFSLDVGEIEKKGKGKKRRGRRSKKERRRGRKEGEEDQTPPCPRLSRELLDEKGPEVLQDSLDRSYSTPSGCLELTDSCQPYRSAFYVLEQQRVGLAVDMDEIEKYQEVEEDQDPSCPRLSRELLDEKEPEVLQDSLDRCYSTPSGYLELPDLGQPYSSAVYSLEEQYLGLALDVDRTKKDQEEEEDQGPPCPRLSRELLEVVEPEVLQDSLDRCYSTPSSCLEQPDSCQPYGSSFYALEEKHVGFSLDVGEIEKKGKGKKRRGRRSKKERRRGRKEGEEDQNPPCPRLSRELLDEKGPEVLQDSLDRSYSTPSGCLELTDSCQPYRSAFYVLEQQRVGLAVDMDEIEKYQEVEEDQDPSCPRLSRELLDEKEPEVLQDSLDRCYSTPSGYLELPDLGQPYSSAVYSLEEQYLGLALDVDRTKKDQEEEEDQGPPCPRLSRELLEVVEPEVLQDSLDRCYSTPSSCLEQPDSCQPYGSSFYALEEKHVGFSLDVGEIEKKGKGKKRRGRRSKKERRRGRKEGEEDQNPPCPRLSRELLDEKGPEVLQDSLDRCYSTPSGCLELTDSCQPYRSAFYVLEQQRVGLAVDMDEIEKYQEVEEDQDPSCPRLSRELLDEKEPEVLQDSLDRCYSTPSGYLELPDLGQPYSSAVYSLEEQYLGLALDVDRTKKDQEEEEDQGPPCPRLSRELLEVVEPEVLQDSLDRCYSTPSSCLEQPDSCQPYGSSFYALEEKHVGFSLDVGEIEKKGKGKKRRGRRSKKERRRGRKEGEEDQNPPCPRLSRELLDEKGPEVLQDSLDRCYSTPSGCLELTDSCQPYRSAFYVLEQQRVGLAVDMDEIEKYQEVEEDQDPSCPRLSRELLDEKEPEVLQDSLDRCYSTPSGYLELPDLGQPYSSAVYSLEEQYLGLALDVDRTKKDQEEEEDQGPPCPRLSRELLEVVEPEVLQDSLDRCYSTPSSCLEQPDSCQPYGSSFYALEEKHVGFSLDVGEIEKKGKGKKRRGRRSKKERRRGRKEGEEDQNPPCPRLSRELLDEKGPEVLQDSLDRCYSTPSGCLELTDSCQPYRSAFYVLEQQRVGLAVDMDEIEKYQEVEEDQDPSCPRLSRELLDEKEPEVLQDSLDRCYSTPSGYLELPDLGQPYSSAVYSLEEQYLGLALDVDRTKKDQEEEEDQGPPCPRLSRELLEVVEPEVLQDSLDRCYSTPSSCLEQPDSCQPYGSSFYALEEKHVGFSLDVGEIEKKGKGKKRRGRRSKKERRRGRKEGEEDQNPPCPRLSRELLDEKGPEVLQDSLDRSYSTPSGCLELTDSCQPYRSAFYVLEQQRVGLAVDMDEIEKYQEVEEDQDPSCPRLSRELLDEKEPEVLQDSLDRCYSTPSGYLELPDLGQPYSSAVYSLEEQYLGLALDVDRTKKDQEEEEDQGPPCPRLSRELLEVVEPEVLQDSLDRCYSTPSSCLEQPDSCQPYGSSFYALEEKHVGFSLDVGEIEKKGKGKKRRGRRSKKERRRGRKEGEEDQNPPCPRLSRELLDEKGPEVLQDSLDRSYSTPSGCLELTDSCQPYRSAFYVLEQQRVGLAVDMDEIEKYQEVEEDQDPSCPRLSRELLDEKEPEVLQDSLDRCYSTPSGYLELPDLGQPYSSAVYSLEEQYLGLALDVDRTKKDQEEEEDQGPPCPRLSRELLEVVEPEVLQDSLDRCYSTPSSCLEQPDSCQPYGSSFYALEEKHVGFSLDVGEIEKKGKGKKRRGRRSKKERRRGRKEGEEDQNPPCPRLSRELLDEKGPEVLQDSLDRSYSTPSGCLELTDSCQPYRSAFYVLEQQRVGLAVDMDEIEKYQEVEEDQDPSCPRLSRELLDEKEPEVLQDSLDRCYSTPSGYLELPDLGQPYSSAVYSLEEQYLGLALDVDRTKKDQEEEEDQGPPCPRLSRELLEVVEPEVLQDSLDRCYSTPSSCLEQPDSCQPYGSSFYALEEKHVGFSLDVGEIEKKGKGKKRRGRRSKKERRRGRKEGEEDQNPPCPRLSRELLDEKGPEVLQDSLDRSYSTPSGCLELTDSCQPYRSAFYVLEQQRVGLAVDMDEIEKYQEVEEDQDPSCPRLSRELLDEKEPEVLQDSLDRCYSTPSGYLELPDLGQPYSSAVYSLEEQYLGLALDVDRTKKDQEEEEDQGPPCPRLSRELLEVVEPEVLQDSLDRCYSTPSSCLEQPDSCQPYGSSFYALEEKHVGFSLDVGEIEKKGKGKKRRGRRSKKERRRGRKEGEEDQNPPCPRLSRELLDEKGPEVLQDSLDRCYSTPSGCLELTDSCQPYRSAFYVLEQQRVGLAVDMDEIEKYQEVEEDQDPSCPRLSRELLDEKEPEVLQDSLDRCYSTPSGYLELPDLGQPYSSAVYSLEEQYLGLALDVDRTKKDQEEEEDQGPPCPRLSRELLEVVEPEVLQDSLDRCYSTPSSCLEQPDSCQPYGSSFYALEEKHVGFSLDVGEIEKKGKGKKRRGRRSKKERRRGRKEGEEDQNPPCPRLSRELLDEKGPEVLQDSLDRCYSTPSGCLELTDSCQPYRSAFYVLEQQRVGLAVDMDEIEKYQEVEEDQDPSCPRLSRELLDEKEPEVLQDSLDRCYSTPSGYLELPDLGQPYSSAVYSLEEQYLGLALDVDRTKKDQEEEEDQGPPCPRLSRELLEVVEPEVLQDSLDRCYSTPSSCLEQPDSCQPYGSSFYALEEKHVGFSLDVGEIEKKGKGKKRRGRRSKKERRRGRKEGEEDQTPPCPRLSRELLDEKGPEVLQDSLDRCYSTPSGCLELTDSCQPYRSAFYVLEQQRVGLAVDMDEIEKYQEVEEDQDPSCPRLSRELLDEKEPEVLQDSLDRCYSTPSGYLELPDLGQPYSSAVYSLEEQYLGLALDVDRTKKDQEEEEDQGPPCPRLSRELLEVVEPEVLQDSLDRCYSTPSSCLEQPDSCQPYGSSFYALEEKHVGFSLDVGEIEKKGKGKKRRGRRSKKERRRGRKEGEEDQNPPCPRLSRELLDEKEPEVLQDSLDRCYSTPSGYLELPDLGQPYSSAVYSLEEQYLGLALDVDRTKKDQEEEEDQGPPCPRLSRELLEVVEPEVLQDSLDRCYSTPSSCLEQPDSCQPYGSSFYALEEKHVGFSLDVGEIEKKGKGKKRRGRRSKKERRRGRKEGEEDQNPPCPRLSRELLDEKEPEVLQDSLDRCYSTPSGYLELPDLGQPYSSAVYSLEEQYLGLALDVDRTKKDQEEEEDQGPPCPRLSRELLEVVEPEVLQDSLDRCYSTPSSCLEQPDSCQPYGSSFYALEEKHVGFSLDVGEIEKKGKGKKRRGRRSKKERRRGRKEGEEDQNPPCPRLSRELLDEKGPEVLQDSLDRSYSTPSGCLELTDSCQPYRSAFYVLEQQRVGLAVDMDEIEKYQEVEEDQDPSCPRLSRELLDEKEPEVLQDSLDRCYSTPSGYLELPDLGQPYSSAVYSLEEQYLGLALDVDRTKKDQEEEEDQGPPCPRLSRELLEVVEPEVLQDSLDRCYSTPSSCLEQPDSCQPYGSSFYALEEKHVGFSLDVGEIEKKGKGKKRRGRRSKKERRRGRKEGEEDQNPPCPRLSRELLDEKGPEVLQDSLDRCYSTPSGCLELTDSCQPYRSAFYVLEQQRVGLAVDMDEIEKYQEVEEDQDPSCPRLSRELLDEKEPEVLQDSLDRCYSTPSGYLELPDLGQPYSSAVYSLEEQYLGLALDVDRTKKDQEEEEDQGPPCPRLSRELLEVVEPEVLQDSLDRCYSTPSSCLEQPDSCQPYGSSFYALEEKHVGFSLDVGEIEKKGKGKKRRGRRSKKKRRRGRKEGEEDQNPPCPRLNGVLMEVEEPEVLQDSLDGCYSTPSMYFELPDSFQHYRSVFYSFEEQHISFALYVDNRFFTLTVTSLHLVFQMGVIFPQ

SEQ ID NO: 56295 - protein, 921 aa, Homo sapiens
  Payload ID: 11060
  Gene Symbol: NBPF20
  Gene Name: neuroblastoma breakpoint family, member 20
  ENSP ID: ENSP00000471335
MLRNERQFKEEKLAEQLKQAEELRQYKVLVHAQERELTQLREKLREGRDASRSLNEHLQALLTPDEPDKSQGQDLQEQLAEGCRLAQHLVQKLSPENDNDDDEDVQVELAEKVQKSSAPREMQKAEEKEVPEDSQEECAITYSNSHGPYDSNQPHRKTKITFEEDKVDSTLIGSSSHVEWEDAVHIIPENESDDEEEEEKGPVSPRNLQESEEEEVPQESWDEGYSTLSIPPEMLASYQSYSSTFHSLEEQQVCMAVDIGRHRWDQVKKEDQEATGPRLSRELLDEKGPEVLQDSLDRCYSTPSGCLELTDSCQPYRSAFYVLEQQRVGLAVDMDEIEKYQEVEEDQDPSCPRLSRELLDEKEPEVLQDSLDRCYSTPSGYLELPDLGQPYSSAVYSLEEQYLGLALDVDRTKKDQEEEEDQGPPCPRLSRELLEVVEPEVLQDSLDRCYSTPSSCLEQPDSCQPYGSSFYALEEKHVGFSLDVGEIEKKGKGKKRRGRRSKKERRRGRKEGEEDQNPPCPRLSRELLDEKGPEVLQDSLDRCYSTPSGCLELTDSCQPYRSAFYVLEQQRVGLAVDMDEIEKYQEVEEDQDPSCPRLSRELLDEKGPEVLQDSLDRCYSTPSGCLELTDSCQPYRSAFYVLEQQRVGLAVDMDEIEKYQEVEEDQDPSCPRLSRELLDEKEPEVLQDSLDRCYSTPSGYLELPDLGQPYSSAVYSLEEQYLGLALDVDRTKKDQEEEEDQGPPCPRLSRELLEVVEPEVLQDSLDRCYSTPSSCLEQPDSCQPYGSSFYALEEKHVGFSLDVGEIEKKGKGKKRRGRRSKKERRRGRKEGEEDQNPPCPRLNGVLMEVEEPEVLQDSLDGCYSTPSMYFELPDSFQHYRSVFYSFEEQHISFALYVDNRFFTLTVTSLHLVFQMGVIFPQ

SEQ ID NO: 56296 - protein, 299 aa, Homo sapiens
  Payload ID: 11060
  Gene Symbol: NBPF20
  Gene Name: neuroblastoma breakpoint family, member 20
  ENSP ID: ENSP00000478481
MVVSAGPWSSEKAEMNILEINEKLRPQLAENKQQFGNLKERCFVTQLAGFLANQQKKYKYEECKDLIKSMLRNERQFKEEKLAEQLKQAEELRQYKVLVHAQERELTQLREKLREGRDASRSLNEHLQALLTPDEPDKSQGQDLQEQLAEGCRLAQHLVQKLSPENDNDDDEDVQVELAEKVQKSSAPREMQKAEEKEVPEDSQEECAITYSNSHGPYDSNQPHRKTKITFEEDKVDSTLIGSSSHVEWEDAVHIIPENESDDEEEEEKGPVSPRTSVGSSEKGGPRGNRSQAQQGAAG

SEQ ID NO: 56297 - protein, 5207 aa, Homo sapiens
  Payload ID: 11060
  Gene Symbol: NBPF20
  Gene Name: neuroblastoma breakpoint family, member 20
  ENSP ID: ENSP00000479291
MFRLSRELLDEKGPEVLQDSLDRCYSTPSGCLELTDSCQPYRSAFYVLEQQRIGLAVDMDEIEKYQEVEEDQDPSCPRLSRELLDEKEPEVLQDSLDRCYSTPSGYLELPDLGQPYSSAVYSLEEQYLGLALDVDRTKKDQEEEEDQGPPCPRLSRELLEVVEPEVLQDSLDRCYSTPSSCLEQPDSCQPYGSSFYALEEKHVGFSLDVGEIEKKGKGKKRRGRRSKKERRRGRKEGEEDQNPPCPRLSRELLDEKGPEVLQDSLDRCYSTPSGCLELTDSCQPYRSAFYVLEQQRVGLAVDMDEIEKYQEVEEDQDPSCPRLSRELLDEKEPEVLQDSLDRCYSTPSGYLELPDLGQPYSSAVYSLEEQYLGLALDVDRTKKDQEEEEDQGPPCPRLSRELLEVVEPEVLQDSLDRCYSTPSSCLEQPDSCQPYGSSFYALEEKHVGFSLDVGEIEKKGKGKKRRGRRSKKERRRGRKEGEEDQNPPCPRLSRELLDEKGPEVLQDSLDRSYSTPSGCLELTDSCQPYRSAFYVLEQQRVGLAVDMDEIEKYQEVEEDQDPSCPRLSRELLDEKEPEVLQDSLDRCYSTPSGYLELPDLGQPYSSAVYSLEEQYLGLALDVDRTKKDQEEEEDQGPPCPRLSRELLEVVEPEVLQDSLDRCYSTPSSCLEQPDSCQPYGSSFYALEEKHVGFSLDVGEIEKKGKGKKRRGRRSKKERRRGRKEGEEDQNPPCPRLSRELLDEKGPEVLQDSLDRCYSTPSGCLELTDSCQPYRSAFYVLEQQRVGLAVDMDEIEKYQEVEEDQDPSCPRLSRELLDEKEPEVLQDSLDRCYSTPSGYLELPDLGQPYSSAVYSLEEQYLGLALDVDRTKKDQEEEEDQGPPCPRLSRELLEVVEPEVLQDSLDRCYSTPSSCLEQPDSCQPYGSSFYALEEKHVGFSLDVGEIEKKGKGKKRRGRRSKKERRRGRKEGEEDQNPPCPRLSRELLDEKGPEVLQDSLDRSYSTPSGCLELTDSCQPYRSAFYVLEQQRVGLAVDMDEIEKYQEVEEDQDPSCPRLSRELLDEKEPEVLQDSLDRCYSTPSGYLELPDLGQPYSSAVYSLEEQYLGLALDVDRTKKDQEEEEDQGPPCPRLSRELLEVVEPEVLQDSLDRCYSTPSSCLEQPDSCQPYGSSFYALEEKHVGFSLDVGEIEKKGKGKKRRGRRSKKERRRGRKEGEEDQNPPCPRLSRELLDEKGPEVLQDSLDRSYSTPSGCLELTDSCQPYRSAFYVLEQQRVGLAVDMDEIEKYQEVEEDQDPSCPRLSRELLDEKEPEVLQDSLDRCYSTPSGYLELPDLGQPYSSAVYSLEEQYLGLALDVDRTKKDQEEEEDQGPPCPRLSRELLEVVEPEVLQDSLDRCYSTPSSCLEQPDSCQPYGSSFYALEEKHVGFSLDVGEIEKKGKGKKRRGRRSKKERRRGRKEGEEDQTPPCPRLSRELLDEKGPEVLQDSLDRSYSTPSGCLELTDSCQPYRSAFYVLEQQRVGLAVDMDEIEKYQEVEEDQDPSCPRLSRELLDEKEPEVLQDSLDRCYSTPSGYLELPDLGQPYSSAVYSLEEQYLGLALDVDRTKKDQEEEEDQGPPCPRLSRELLEVVEPEVLQDSLDRCYSTPSSCLEQPDSCQPYGSSFYALEEKHVGFSLDVGEIEKKGKGKKRRGRRSKKERRRGRKEGEEDQNPPCPRLSRELLDEKGPEVLQDSLDRSYSTPSGCLELTDSCQPYRSAFYVLEQQRVGLAVDMDEIEKYQEVEEDQDPSCPRLSRELLDEKEPEVLQDSLDRCYSTPSGYLELPDLGQPYSSAVYSLEEQYLGLALDVDRTKKDQEEEEDQGPPCPRLSRELLEVVEPEVLQDSLDRCYSTPSSCLEQPDSCQPYGSSFYALEEKHVGFSLDVGEIEKKGKGKKRRGRRSKKERRRGRKEGEEDQNPPCPRLSRELLDEKGPEVLQDSLDRCYSTPSGCLELTDSCQPYRSAFYVLEQQRVGLAVDMDEIEKYQEVEEDQDPSCPRLSRELLDEKEPEVLQDSLDRCYSTPSGYLELPDLGQPYSSAVYSLEEQYLGLALDVDRTKKDQEEEEDQGPPCPRLSRELLEVVEPEVLQDSLDRCYSTPSSCLEQPDSCQPYGSSFYALEEKHVGFSLDVGEIEKKGKGKKRRGRRSKKERRRGRKEGEEDQNPPCPRLSRELLDEKGPEVLQDSLDRCYSTPSGCLELTDSCQPYRSAFYVLEQQRVGLAVDMDEIEKYQEVEEDQDPSCPRLSRELLDEKEPEVLQDSLDRCYSTPSGYLELPDLGQPYSSAVYSLEEQYLGLALDVDRTKKDQEEEEDQGPPCPRLSRELLEVVEPEVLQDSLDRCYSTPSSCLEQPDSCQPYGSSFYALEEKHVGFSLDVGEIEKKGKGKKRRGRRSKKERRRGRKEGEEDQNPPCPRLSRELLDEKGPEVLQDSLDRCYSTPSGCLELTDSCQPYRSAFYVLEQQRVGLAVDMDEIEKYQEVEEDQDPSCPRLSRELLDEKEPEVLQDSLDRCYSTPSGYLELPDLGQPYSSAVYSLEEQYLGLALDVDRTKKDQEEEEDQGPPCPRLSRELLEVVEPEVLQDSLDRCYSTPSSCLEQPDSCQPYGSSFYALEEKHVGFSLDVGEIEKKGKGKKRRGRRSKKERRRGRKEGEEDQNPPCPRLSRELLDEKGPEVLQDSLDRSYSTPSGCLELTDSCQPYRSAFYVLEQQRVGLAVDMDEIEKYQEVEEDQDPSCPRLSRELLDEKEPEVLQDSLDRCYSTPSGYLELPDLGQPYSSAVYSLEEQYLGLALDVDRTKKDQEEEEDQGPPCPRLSRELLEVVEPEVLQDSLDRCYSTPSSCLEQPDSCQPYGSSFYALEEKHVGFSLDVGEIEKKGKGKKRRGRRSKKERRRGRKEGEEDQNPPCPRLSRELLDEKGPEVLQDSLDRSYSTPSGCLELTDSCQPYRSAFYVLEQQRVGLAVDMDEIEKYQEVEEDQDPSCPRLSRELLDEKEPEVLQDSLDRCYSTPSGYLELPDLGQPYSSAVYSLEEQYLGLALDVDRTKKDQEEEEDQGPPCPRLSRELLEVVEPEVLQDSLDRCYSTPSSCLEQPDSCQPYGSSFYALEEKHVGFSLDVGEIEKKGKGKKRRGRRSKKERRRGRKEGEEDQNPPCPRLSRELLDEKGPEVLQDSLDRSYSTPSGCLELTDSCQPYRSAFYVLEQQRVGLAVDMDEIEKYQEVEEDQDPSCPRLSRELLDEKEPEVLQDSLDRCYSTPSGYLELPDLGQPYSSAVYSLEEQYLGLALDVDRTKKDQEEEEDQGPPCPRLSRELLEVVEPEVLQDSLDRCYSTPSSCLEQPDSCQPYGSSFYALEEKHVGFSLDVGEIEKKGKGKKRRGRRSKKERRRGRKEGEEDQNPPCPRLSRELLDEKGPEVLQDSLDRSYSTPSGCLELTDSCQPYRSAFYVLEQQRVGLAVDMDEIEKYQEVEEDQDPSCPRLSRELLDEKEPEVLQDSLDRCYSTPSGYLELPDLGQPYSSAVYSLEEQYLGLALDVDRTKKDQEEEEDQGPPCPRLSRELLEVVEPEVLQDSLDRCYSTPSSCLEQPDSCQPYGSSFYALEEKHVGFSLDVGEIEKKGKGKKRRGRRSKKERRRGRKEGEEDQNPPCPRLSRELLDEKGPEVLQDSLDRCYSTPSGCLELTDSCQPYRSAFYVLEQQRVGLAVDMDEIEKYQEVEEDQDPSCPRLSRELLDEKEPEVLQDSLDRCYSTPSGYLELPDLGQPYSSAVYSLEEQYLGLALDVDRTKKDQEEEEDQGPPCPRLSRELLEVVEPEVLQDSLDRCYSTPSSCLEQPDSCQPYGSSFYALEEKHVGFSLDVGEIEKKGKGKKRRGRRSKKERRRGRKEGEEDQNPPCPRLSRELLDEKGPEVLQDSLDRCYSTPSGCLELTDSCQPYRSAFYVLEQQRVGLAVDMDEIEKYQEVEEDQDPSCPRLSRELLDEKEPEVLQDSLDRCYSTPSGYLELPDLGQPYSSAVYSLEEQYLGLALDVDRTKKDQEEEEDQGPPCPRLSRELLEVVEPEVLQDSLDRCYSTPSSCLEQPDSCQPYGSSFYALEEKHVGFSLDVGEIEKKGKGKKRRGRRSKKERRRGRKEGEEDQTPPCPRLSRELLDEKGPEVLQDSLDRCYSTPSGCLELTDSCQPYRSAFYVLEQQRVGLAVDMDEIEKYQEVEEDQDPSCPRLSRELLDEKEPEVLQDSLDRCYSTPSGYLELPDLGQPYSSAVYSLEEQYLGLALDVDRTKKDQEEEEDQGPPCPRLSRELLEVVEPEVLQDSLDRCYSTPSSCLEQPDSCQPYGSSFYALEEKHVGFSLDVGEIEKKGKGKKRRGRRSKKERRRGRKEGEEDQNPPCPRLSRELLDEKEPEVLQDSLDRCYSTPSGYLELPDLGQPYSSAVYSLEEQYLGLALDVDRTKKDQEEEEDQGPPCPRLSRELLEVVEPEVLQDSLDRCYSTPSSCLEQPDSCQPYGSSFYALEEKHVGFSLDVGEIEKKGKGKKRRGRRSKKERRRGRKEGEEDQNPPCPRLSRELLDEKEPEVLQDSLDRCYSTPSGYLELPDLGQPYSSAVYSLEEQYLGLALDVDRTKKDQEEEEDQGPPCPRLSRELLEVVEPEVLQDSLDRCYSTPSSCLELTDSCQPYRSAFYVLEQQRVGLAVDMDEIEKYQEVEEDQDPSCPRLSRELLDEKEPEVLQDSLDRCYSTPSGYLELPDLGQPYSSAVYSLEEQYLGLALDVDRTKKDQEEEEDQGPPCPRLSRELLEVVEPEVLQDSLDRCYSTPSSCLEQPDSCQPYGSSFYALEEKHVGFSLDVGEIEKKGKGKKRRGRRSKKERRRGRKEGEEDQNPPCPRLSRELLDEKGPEVLQDSLDRCYSTPSGCLELTDSCQPYRSAFYVLEQQRVGLAVDMDEIEKYQEVEEDQDPSCPRLSRELLDEKEPEVLQDSLDRCYSTPSGYLELPDLGQPYSSAVYSLEEQYLGLALDVDRTKKDQEEEEDQGPPCPRLSRELLEVVEPEVLQDSLDRCYSTPSSCLEQPDSCQPYGSSFYALEEKHVGFSLDVGEIEKKGKGKKRRGRRSKKKRRRGRKEGEEDQNPPCPRLNGVLMEVEEPEVLQDSLDGCYSTPSMYFELPDSFQHYRSVFYSFEEQHISFALYVDNRFFTLTVTSLHLVFQMGVIFPQ

SEQ ID NO: 56298 - protein, 921 aa, Homo sapiens; identical to SEQ ID NO: 56295
  Payload ID: 11060
  Gene Symbol: NBPF20
  Gene Name: neuroblastoma breakpoint family, member 20
  ENSP ID: ENSP00000481516

SEQ ID NO: 56299 - protein, 921 aa, Homo sapiens
  Payload ID: 11061
  Gene Symbol: NBPF26
  Gene Name: neuroblastoma breakpoint family, member 26
  ENSP ID: ENSP00000476257
MLRNERQFKEEKLAEQLKQAEELRQYKVLVHAQERELTQLREKLREGRDASRSLNEHLQALLTPDEPDKSQGQDLQEQLAEGCRLAQHLVQKLSPENDNDDDEDVQVEVAEKVQKSSAPREMQKAEEKEVPEDSLEECAITCSNSHGPYDCNQPHRKTKITFEEDKVDSTLIGSSSHVEWEDAVHIIPENESDDEEEEEKGPVSPRNLQESEEEEVPQESWDEGYSTLSIPPEMLASYKSYSSTFHSLEEQQVCMAVDIGRHRWDQVKKEDHEATGPRLSRELLDEKGPEVLQDSLDRCYSTPSGCLELTDSCQPYRSAFYVLEQQRVGLAVDMDEIEKYQEVEEDQDPSCPRLSRELLDEKEPEVLQDSLGRCYSTPSGYLELPDLGQPYSSAVYSLEEQYLGLALDVDRIKKDQEEEEDQGPPCPRLSRELLEVVEPEVLQDSLDRCYSTPSSCLEQPDSCQPYGSSFYALEEKHVGFSLDVGEIEKKGKGKKRRGRRSKKERRRGRKEGEEDQNPPCPRLSRELLDEKGPEVLQDSLDRCYSTPSGCLELTDSCQPYRSAFYILEQQRVGLAVDMDEIEKYQEVEEDQDPSCPRLSRELLEVVEPEVLQDSLDRCYSTPSSCLEQPDSCQPYGSSFYALEEKHVGFSLDVGEIEKYQEVEEDQDPSCPRLSRELLDEKEPEVLQDSLGRCYSTPSGYLELPDLGQPYSSAVYSLEEQYLGLALDVDRIKKDQEEEEDQGPPCPRLSRELLEVVEPEVLQDSLDRCYSTPSSCLEQPDSCQPYGSSFYALEEKHVGFSLDVGEIEKKGKGKKRRGRRSKKERRRGRKEGEEDQNPPCPRLNSMLMEVEEPEVLQDSLDICYSTPSMYFELPDSFQHYRSVFYSFEEEHISFALYVDNRFFTLTVTSLHLVFQMGVIFPQ

SEQ ID NO: 56300 - protein, 535 aa, Homo sapiens
  Payload ID: 11061
  Gene Symbol: NBPF26
  Gene Name: neuroblastoma breakpoint family, member 26
  ENSP ID: ENSP00000477847
MVVSAGHWSSEKAEMNILEINETLRPQLPENKQQLRNLKEMFSNSTGRLPGQPTEEIQQYKVLVHSQERELTQLKEKLREGRDASRSLNEHLQALLTPDEPDKSQGQDLQEQLAEGCRLAQHLVQKLSPENDEDEDEDVQVEEDEKVLESSAPREVQKTEESKVPEDSLEECAITCSNSHGPCDSNQPHKNIKITFEEDEVNSTLVVDRESSHDECQDALNILPVPGPTSSATNVSMVVSAGPLSGEKAAINILEINEKLRPQLAEKKQQFRNLKEKCFLTQLAGFLANQQNKYKYEECKDLIKSMLRNERQFKEEKLAEQLKQAEELRQYKVLVHAQERELTQLREKLREGRDASRSLNEHLQALLTPDEPDKSQGQDLQEQLAEGCRLAQHLVQKLSPENDNDDDEDVQVEVAEKVQKSSAPREMQKAEEKEVPEDSLEECAITCSNSHGPYDCNQPHRKTKITFEEDKVDSTLIGSSSHVEWEDAVHIIPENESDDEEEEEKGPVSPRTSVGSSEKGGPRGNRSQAQQGAAG

SEQ ID NO: 56301 - protein, 577 aa, Homo sapiens
  Payload ID: 11061
  Gene Symbol: NBPF26
  Gene Name: neuroblastoma breakpoint family, member 26
  ENSP ID: ENSP00000478334
MVVSAGHWSSEKAEMNILEINETLRPQLPENKQQLRNLKEKCFLTQLAGFLANRQKKYKYEECKDLIKFMLRNERQFKEEKLAEQLKQAEELRQYKVLVHSQERELTQLKEKLREGRDASRSLNEHLQALLTPDEPDKSQGQDLQEQLAEGCRLAQHLVQKLSPENDEDEDEDVQVEEDEKVLESSAPREMQKAEEKEVPEDSLEECAITCSNSHGPYDCNQPHRKTKITFEEDKVDSTLIGSSSHVEWEDAVHIIPENESDDEEEEEKGPVSPRNLQESEEEEVPQESWDEGYSTLSIPPEMLASYKSYSSTFHSLEEQQVCMAVDIGRHRWDQVKKEDHEATGPRLSRELLDEKEPEVLQDSLGRCYSTPSGYLELPDLGQPYSSAVYSLEEQYLGLALDVDRIKKDQEEEEDQGPPCPRLSRELLEVVEPEVLQDSLDRCYSTPSSCLEQPDSCQPYGSSFYALEEKHVGFSLDVGEIEKYQEVEEDQDPSCPRLNSMLMEVEEPEVLQDSLDICYSTPSMYFELPDSFQHYRSVFYSFEEEHISFALYVDNRFFTLTVTSLHLVFQMGVIFPQ

SEQ ID NO: 56302 - protein, 299 aa, Homo sapiens
  Payload ID: 11061
  Gene Symbol: NBPF26
  Gene Name: neuroblastoma breakpoint family, member 26
  ENSP ID: ENSP00000479721
MVVSAGPLSGEKAAINILEINEKLRPQLAEKKQQFRNLKEKCFLTQLAGFLANQQNKYKYEECKDLIKSMLRNERQFKEEKLAEQLKQAEELRQYKVLVHAQERELTQLREKLREGRDASRSLNEHLQALLTPDEPDKSQGQDLQEQLAEGCRLAQHLVQKLSPENDNDDDEDVQVEVAEKVQKSSAPREMQKAEEKEVPEDSLEECAITCSNSHGPYDCNQPHRKTKITFEEDKVDSTLIGSSSHVEWEDAVHIIPENESDDEEEEEKGPVSPRTSVGSSEKGGPRGNRSQAQQGAAG

SEQ ID NO: 56303 - protein, 942 aa, Homo sapiens
  Payload ID: 11061
  Gene Symbol: NBPF26
  Gene Name: neuroblastoma breakpoint family, member 26
  ENSP ID: ENSP00000480416
MVVSAGHWSSEKAEMNILEINETLRPQLPENKQQLRNLKEKCFLTQLAGFLANRQKKYKYEECKDLIKFMLRNERQFKEEKLAEQLKQAEELRQYKVLVHSQERELTQLKEKLREGRDASRSLNEHLQALLTPDEPDKSQGQDLQEQLAEGCRLAQHLVQKLSPENDEDEDEDVQVEEDEKVLESSAPREVQKTEESKVPEDSLEECAITCSNSHGPCDSNQPHKNIKITFEEDEVNSTLVVDRESSHDECQDALNILPVPGPTSSATNVSMVVSAGPLSGEKAAINILEINEKLRPQLAEKKQQFRNLKEKCFLTQLAGFLANQQNKYKYEECKDLIKSMLRNERQFKEEKLAEQLKQAEELRQYKVLVHAQERELTQLREKLREGRDASRSLNEHLQALLTPDEPDKSQGQDLQEQLAEGCRLAQHLVQKLSPENDNDDDEDVQVEVAEKVQKSSAPREMQKAEEKEVPEDSLEECAITCSNSHGPYDCNQPHRKTKITFEEDKVDSTLIGSSSHVEWEDAVHIIPENESDDEEEEEKGPVSPRNLQESEEEEVPQESWDEGYSTLSIPPEMLASYKSYSSTFHSLEEQQVCMAVDIGRHRWDQVKKEDHEATGPRLSRELLDEKGPEVLQDSLDRCYSTPSGCLELTDSCQPYRSAFYVLEQQRVGLAVDMDEIEKYQEVEEDQDPSCPRLSRELLDEKEPEVLQDSLGRCYSTPSGYLELPDLGQPYSSAVYSLEEQYLGLALDVDRIKKDQEEEEDQGPPCPRLSRELLEVVEPEVLQDSLDRCYSTPSSCLEQPDSCQPYGSSFYALEEKHVGFSLDVGEIEKKGKGKKRRGRRSKKERRRGRKEGEEDQNPPCPRLNSMLMEVEEPEVLQDSLDICYSTPSMYFELPDSFQHYRSVFYSFEEEHISFALYVDNRFFTLTVTSLHLVFQMGVIFPQ

SEQ ID NO: 56304 - protein, 1186 aa, Homo sapiens
  Payload ID: 11061
  Gene Symbol: NBPF26
  Gene Name: neuroblastoma breakpoint family, member 26
  ENSP ID: ENSP00000481542
MVVSAGHWSSEKAEMNILEINETLRPQLPENKQQLRNLKEKCFLTQLAGFLANRQKKYKYEECKDLIKFMLRNERQFKEEKLAEQLKQAEELRQYKVLVHSQERELTQLKEKLREGRDASRSLNEHLQALLTPDEPDKSQGQDLQEQLAEGCRLAQHLVQKLSPENDEDEDEDVQVEEDEKVLESSAPREVQKTEESKVPEDSLEECAITCSNSHGPCDSNQPHKNIKITFEEDEVNSTLVVDRESSHDECQDALNILPVPGPTSSATNVSMVVSAGPLSGEKAAINILEINEKLRPQLAEKKQQFRNLKEKCFLTQLAGFLANQQNKYKYEECKDLIKSMLRNERQFKEEKLAEQLKQAEELRQYKVLVHAQERELTQLREKLREGRDASRSLNEHLQALLTPDEPDKSQGQDLQEQLAEGCRLAQHLVQKLSPENDNDDDEDVQVEVAEKVQKSSAPREMQKAEEKEVPEDSLEECAITCSNSHGPYDCNQPHRKTKITFEEDKVDSTLIGSSSHVEWEDAVHIIPENESDDEEEEEKGPVSPRNLQESEEEEVPQESWDEGYSTLSIPPEMLASYKSYSSTFHSLEEQQVCMAVDIGRHRWDQVKKEDHEATGPRLSRELLDEKGPEVLQDSLDRCYSTPSGCLELTDSCQPYRSAFYVLEQQRVGLAVDMDEIEKYQEVEEDQDPSCPRLSRELLDEKEPEVLQDSLGRCYSTPSGYLELPDLGQPYSSAVYSLEEQYLGLALDVDRIKKDQEEEEDQGPPCPRLSRELLEVVEPEVLQDSLDRCYSTPSSCLEQPDSCQPYGSSFYALEEKHVGFSLDVGEIEKKGKGKKRRGRRSKKERRRGRKEGEEDQNPPCPRLSRELLDEKGPEVLQDSLDRCYSTPSGCLELTDSCQPYRSAFYILEQQRVGLAVDMDEIEKYQEVEEDQDPSCPRLSRELLDEKEPEVLQDSLGRCYSTPSGYLELPDLGQPYSSAVYSLEEQYLGLALDVDRIKKDQEEEEDQGPPCPRLSRELLEVVEPEVLQDSLDRCYSTPSSCLEQPDSCQPYGSSFYALEEKHVGFSLDVGEIEKKGKGKKRRGRRSKKERRRGRKEGEEDQNPPCPRLNSMLMEVEEPEVLQDSLDICYSTPSMYFELPDSFQHYRSVFYSFEEEHISFALYVDNRFFTLTVTSLHLVFQMGVIFPQ

SEQ ID NO: 56305 - protein, 602 aa, Homo sapiens
  Payload ID: 11061
  Gene Symbol: NBPF26
  Gene Name: neuroblastoma breakpoint family, member 26
  ENSP ID: ENSP00000482516
MLRNERQFKEEKLAEQLKQAEELRQYKVLVHAQERELTQLREKLREGRDASRSLNEHLQALLTPDEPDKSQGQDLQEQLAEGCRLAQHLVQKLSPENDNDDDEDVQVEVAEKVQKSSAPREMQKAEEKEVPEDSLEECAITCSNSHGPYDCNQPHRKTKITFEEDKVDSTLIGSSSHVEWEDAVHIIPENESDDEEEEEKGPVSPRNLQESEEEEVPQESWDEGYSTLSIPPEMLASYKSYSSTFHSLEEQQVCMAVDIGRHRWDQVKKEDHEATGPRLSRELLDEKGPEVLQDSLDRCYSTPSGCLELTDSCQPYRSAFYVLEQQRVGLAVDMDEIEKYQEVEEDQDPSCPRLSRELLDEKEPEVLQDSLGRCYSTPSGYLELPDLGQPYSSAVYSLEEQYLGLALDVDRIKKDQEEEEDQGPPCPRLSRELLEVVEPEVLQDSLDRCYSTPSSCLEQPDSCQPYGSSFYALEEKHVGFSLDVGEIEKKGKGKKRRGRRSKKERRRGRKEGEEDQNPPCPRLNSMLMEVEEPEVLQDSLDICYSTPSMYFELPDSFQHYRSVFYSFEEEHISFALYVDNRFFTLTVTSLHLVFQMGVIFPQ

SEQ ID NO: 56306 - protein, 867 aa, Homo sapiens
  Payload ID: 11061
  Gene Symbol: NBPF26
  Gene Name: neuroblastoma breakpoint family, member 26
  ENSP ID: ENSP00000482859
MVVSAGHWSSEKAEMNILEINETLRPQLPENKQQLRNLKEKCFLTQLAGFLANRQKKYKYEECKDLIKFMLRNERQFKEEKLAEQLKQAEELRQYKVLVHSQERELTQLKEKLREGRDASRSLNEHLQALLTPDEPDKSQGQDLQEQLAEGCRLAQHLVQKLSPENDEDEDEDVQVEEDEKVLESSAPREVQKTEESKVPEDSLEECAITCSNSHGPCDSNQPHKNIKITFEEDEVNSTLVVDRESSHDECQDALNILPVPGPTSSATNVSMVVSAGPLSGEKAAINILEINEKLRPQLAEKKQQFRNLKEKCFLTQLAGFLANQQNKYKYEECKDLIKSMLRNERQFKEEKLAEQLKQAEELRQYKVLVHAQERELTQLREKLREGRDASRSLNEHLQALLTPDEPDKSQGQDLQEQLAEGCRLAQHLVQKLSPENDNDDDEDVQVEVAEKVQKSSAPREMQKAEEKEVPEDSLEECAITCSNSHGPYDCNQPHRKTKITFEEDKVDSTLIGSSSHVEWEDAVHIIPENESDDEEEEEKGPVSPRNLQESEEEEVPQESWDEGYSTLSIPPEMLASYKSYSSTFHSLEEQQVCMAVDIGRHRWDQVKKEDHEATGPRLSRELLDEKEPEVLQDSLGRCYSTPSGYLELPDLGQPYSSAVYSLEEQYLGLALDVDRIKKDQEEEEDQGPPCPRLSRELLEVVEPEVLQDSLDRCYSTPSSCLEQPDSCQPYGSSFYALEEKHVGFSLDVGEIEKKGKGKKRRGRRSKKERRRGRKEGEEDQNPPCPRLNSMLMEVEEPEVLQDSLDICYSTPSMYFELPDSFQHYRSVFYSFEEEHISFALYVDNRFFTLTVTSLHLVFQMGVIFPQ

SEQ ID NO: 56307 - protein, 53 aa, Homo sapiens
  Payload ID: 11062
  Gene Symbol: NBPF3
  Gene Name: neuroblastoma breakpoint family, member 3
  ENSP ID: ENSP00000316739
MPLTPTVQGFQWTLRGPDVETSPFGAPRAASHGVGRHQELRDPTGSLGRSPNH

SEQ ID NO: 56308 - protein, 633 aa, Homo sapiens
  Payload ID: 11062
  Gene Symbol: NBPF3
  Gene Name: neuroblastoma breakpoint family, member 3
  Uniprot ID: Q9H094
  ENSP ID: ENSP00000316782
MPLTPTVQGFQWTLRGPDVETSPFGAPRAASHGVGRHQELRDPTVPGPTSSATNVSMVVSAGPWSGEKAEMNILEINKKSRPQLAENKQQFRNLKQKCLVTQVAYFLANRQNNYDYEDCKDLIKSMLRDERLLTEEKLAEELGQAEELRQYKVLVHSQERELTQLREKLQEGRDASRSLNQHLQALLTPDEPDNSQGRDLREQLAEGCRLAQHLVQKLSPENDDDEDEDVKVEEAEKVQELYAPREVQKAEEKEVPEDSLEECAITCSNSHHPCESNQPYGNTRITFEEDQVDSTLIDSSSHDEWLDAVCIIPENESDHEQEEEKGPVSPRNLQESEEEEAPQESWDEGDWTLSIPPDMSASYQSDRSTFHSVEEQQVGLALDIGRHWCDQVKKEDQEATSPRLSRELLDEKEPEVLQDSLDRFYSTPFEYLELPDLCQPYRSDFYSLQEQHLGLALDLDRMKKDQEEEEDQGPPCPRLSRELPEVVEPEDLQDSLDRWYSTPFSYPELPDSCQPYGSCFYSLEEEHVGFSLDVDEIEKYQEGEEDQKPPCPRLNEVLMEAEEPEVLQDSLDRCYSTTSTYFQLHASFQQYRSAFYSFEEQDVSLALDVDNRFFTLTVIRHHLAFQMGVIFPH

SEQ ID NO: 56309 - protein, 621 aa, Homo sapiens
  Payload ID: 11062
  Gene Symbol: NBPF3
  Gene Name: neuroblastoma breakpoint family, member 3
  Uniprot ID: Q9H094
  ENSP ID: ENSP00000340336
MPLTPTVQGFQWTLRGPDVETSPFGAPRAASHGVGRHQELRDPTVPGPTSSATNVSMVVSAGPWSGEKAEMNILEINKKSRPQLAENKQQFRNLKQKCLVTQVAYFLANRQNNYDYEDCKDLIKSMLRDERLLTEEKLAEELGQAEELRQYKVLVHSQERELTQLREKLQEGRDASRSLNQHLQALLTPDEPDNSQGRDLREQLAEGCRLAQHLVQKLSPENDDDEDEDVKVEEAEKVQELYAPREVQKAEEKEVPEDSLEECAITCSNSHHPCESNQPYGNTRITFEEDQVDSTLIDSSSHDEWLDAVCIIPENESDHEQEEEKGPVSPRSSGRFCCLISVGYIFCHPCPAWLIRNLQESEEEEAPQESWDEGHWCDQVKKEDQEATSPRLSRELLDEKEPEVLQDSLDRFYSTPFEYLELPDLCQPYRSDFYSLQEQHLGLALDLDRMKKDQEEEEDQGPPCPRLSRELPEVVEPEDLQDSLDRWYSTPFSYPELPDSCQPYGSCFYSLEEEHVGFSLDVDEIEKYQEGEEDQKPPCPRLNEVLMEAEEPEVLQDSLDRCYSTTSTYFQLHASFQQYRSAFYSFEEQDVSLALDVDNRFFTLTVIRHHLAFQMGVIFPH

SEQ ID NO: 56310 - protein, 53 aa, Homo sapiens
  Payload ID: 11062
  Gene Symbol: NBPF3
  Gene Name: neuroblastoma breakpoint family, member 3
  ENSP ID: ENSP00000391865
MPLTPTVQGFQWTLRGPDVETSPFGAPRAASHGVGRHQELRDPTGGKGSETAT

SEQ ID NO: 56311 - protein, 563 aa, Homo sapiens
  Payload ID: 11062
  Gene Symbol: NBPF3
  Gene Name: neuroblastoma breakpoint family, member 3
  Uniprot ID: Q9H094
  ENSP ID: ENSP00000415711
MPLTPTVQGFQWTLRGPDVETSPFGAPRAASHGVGRHQELRDPTDYEDCKDLIKSMLRDERLLTEEKLAEELGQAEELRQYKVLVHSQERELTQLREKLQEGRDASRSLNQHLQALLTPDEPDNSQGRDLREQLAEGCRLAQHLVQKLSPENDDDEDEDVKVEEAEKVQELYAPREVQKAEEKEVPEDSLEECAITCSNSHHPCESNQPYGNTRITFEEDQVDSTLIDSSSHDEWLDAVCIIPENESDHEQEEEKGPVSPRNLQESEEEEAPQESWDEGDWTLSIPPDMSASYQSDRSTFHSVEEQQVGLALDIGRHWCDQVKKEDQEATSPRLSRELLDEKEPEVLQDSLDRFYSTPFEYLELPDLCQPYRSDFYSLQEQHLGLALDLDRMKKDQEEEEDQGPPCPRLSRELPEVVEPEDLQDSLDRWYSTPFSYPELPDSCQPYGSCFYSLEEEHVGFSLDVDEIEKYQEGEEDQKPPCPRLNEVLMEAEEPEVLQDSLDRCYSTTSTYFQLHASFQQYRSAFYSFEEQDVSLALDVDNRFFTLTVIRHHLAFQMGVIFPH

SEQ ID NO: 56312 - protein, 53 aa, Homo sapiens; identical to SEQ ID NO: 56307
  Payload ID: 11062
  Gene Symbol: NBPF3
  Gene Name: neuroblastoma breakpoint family, member 3
  ENSP ID: ENSP00000478530

SEQ ID NO: 56313 - protein, 46 aa, Homo sapiens
  Payload ID: 11062
  Gene Symbol: NBPF3
  Gene Name: neuroblastoma breakpoint family, member 3
  ENSP ID: ENSP00000479028
MPLTPTVQGFQWTLRGPDVETSPFGAPRAASHGVGRHQELRDPTEM

SEQ ID NO: 56314 - protein, 577 aa, Homo sapiens
  Payload ID: 11062
  Gene Symbol: NBPF3
  Gene Name: neuroblastoma breakpoint family, member 3
  Uniprot ID: Q9H094
  ENSP ID: ENSP00000484028
MVVSAGPWSGEKAEMNILEINKKSRPQLAENKQQFRNLKQKCLVTQVAYFLANRQNNYDYEDCKDLIKSMLRDERLLTEEKLAEELGQAEELRQYKVLVHSQERELTQLREKLQEGRDASRSLNQHLQALLTPDEPDNSQGRDLREQLAEGCRLAQHLVQKLSPENDDDEDEDVKVEEAEKVQELYAPREVQKAEEKEVPEDSLEECAITCSNSHHPCESNQPYGNTRITFEEDQVDSTLIDSSSHDEWLDAVCIIPENESDHEQEEEKGPVSPRNLQESEEEEAPQESWDEGDWTLSIPPDMSASYQSDRSTFHSVEEQQVGLALDIGRHWCDQVKKEDQEATSPRLSRELLDEKEPEVLQDSLDRFYSTPFEYLELPDLCQPYRSDFYSLQEQHLGLALDLDRMKKDQEEEEDQGPPCPRLSRELPEVVEPEDLQDSLDRWYSTPFSYPELPDSCQPYGSCFYSLEEEHVGFSLDVDEIEKYQEGEEDQKPPCPRLNEVLMEAEEPEVLQDSLDRCYSTTSTYFQLHASFQQYRSAFYSFEEQDVSLALDVDNRFFTLTVIRHHLAFQMGVIFPH

SEQ ID NO: 56315 - protein, 638 aa, Homo sapiens
  Payload ID: 11063
  Gene Symbol: NBPF4
  Gene Name: neuroblastoma breakpoint family, member 4
  Uniprot ID: Q96M43
  ENSP ID: ENSP00000389237
MVVSADPLSSERAEMNILEINQELRSQLAESNQQFRDLKEKFLITQATAYSLANQLKKYKCEEYKDIIDSVLRDELQSMEKLAEKLRQAEELRQYKALVHSQAKELTQLREKLREGRDASRWLNKHLKTLLTPDDPDKSQGQDLREQLAEGHRLAEHLVHKLSPENDEDEDEDEDDKDEEVEKVQESPAPREVQKTEEKEVPQDSLEECAVTCSNSHNPSNSNQPHRSTKITFKEHEVDSALVVESEHPHDEEEEALNIPPENQNDHEEEEGKAPVPPRHHDKSNSYRHREVSFLALDEQKVCSAQDVARDYSNPKWDETSLGFLEKQSDLEEVKGQETVAPRLSRGPLRVDKHEIPQESLDGCCLTPSILPDLTPSYHPYWSTLYSFEDKQVSLALVDKIKKDQEEIEDQSPPCPRLSQELPEVKEQEVPEDSVNEVYLTPSVHHDVSDCHQPYSSTLSSLEDQLACSALDVASPTEAACPQGTWSGDLSHHQSEVQVSQAQLEPSTLVPSCLRLQLDQGFHCGNGLAQRGLSSTTCSFSANADSGNQWPFQELVLEPSLGMKNPPQLEDDALEGSASNTQGRQVTGRIRASLVLILKTIRRRLPFSKWRLAFRFAGPHAESAEIPNTAGRTQRMAG

SEQ ID NO: 56316 - protein, 667 aa, Homo sapiens
  Payload ID: 11063
  Gene Symbol: NBPF4
  Gene Name: neuroblastoma breakpoint family, member 4
  ENSP ID: ENSP00000479545
MVVSADPLSSERAEMNILEINQELRSQLAESNQQFRDLKEKFLITQATAYSLANQLKKYKCEEYKDIIDSVLRDELQSMEKLAEKLRQAEELRQYKALVHSQAKELTQLREKLREGRDASRWLNKHLKTLLTPDDPDKSQGQDLREQLAEGHRLAEHLVHKLSPENDEDEDEDEDDKDEEVEKVQESPAPREVQKTEEKEVPQDSLEECAVTCSNSHNPSNSNQPHRSTKITFKEHEVDSALVVESEHPHDEEEEALNIPPENQNDHEEEEGKAPVPPRNRQSLEPGELTNLRDFLISPVVSHVANPGHHDKSNSYRHREVSFLALDEQKVCSAQDVARDYSNPKWDETSLGFLEKQSDLEEVKGQETVAPRLSRGPLRVDKHEIPQESLDGCCLTPSILPDLTPSYHPYWSTLYSFEDKQVSLALVDKIKKDQEEIEDQSPPCPRLSQELPEVKEQEVPEDSVNEVYLTPSVHHDVSDCHQPYSSTLSSLEDQLACSALDVASPTEAACPQGTWSGDLSHHQSEVQVSQAQLEPSTLVPSCLRLQLDQGFHCGNGLAQRGLSSTTCSFSANADSGNQWPFQELVLEPSLGMKNPPQLEDDALEGSASNTQGRQVTGRIRASLVLILKTIRRRLPFSKWRLAFRFAGPHAESAEIPNTAGRTQRMAG

SEQ ID NO: 56317 - protein, 638 aa, Homo sapiens
  Payload ID: 11064
  Gene Symbol: NBPF6
  Gene Name: neuroblastoma breakpoint family, member 6
  Uniprot ID: Q5VWK0
  ENSP ID: ENSP00000294652
MVVSADPLSSERAEMNILEINQELRSQLAESNQQFRDLKEKFLITQATAYSLANQLKKYKCEEYKDIIDSVLRDELQSMEKLAEKLRQAEELRQYKALVHSQAKELTQLREKLREGRDASRWLNKHLKTLLTPDDPDKSQGQDLREQLAEGHRLAEHLVHKLSPENDEDEDEDEDDKDEEVEKVQESPAPREVQKTEEKEVPQDSLEECAVTCSNSHNPSNSNQPHRSTKITFKEHEVDSALVVESEHPHDEEEEALNIPPENQNDHEEEEGKAPVPPRHHDKSNSYRHREVSFLALDEQKVCSAQDVARDYSNPKWDETSLGFLEKQSDLEEVKGQETVAPRLSRGPLRVDKHEIPQESLDGCCLTPSILPDLTPSYHPYWSTLYSFEDKQVSLALVDKIKKDQEEIEDQSPPCPRLSQELPEVKEQEVPEDSVNEVYLTPSVHHDVSDCHQPYSSTLSSLEDQLACSALDVASPTEAACPQGTWSGDLSHHRSEVQISQAQLEPSTLVPSCLRLQLDQGFHCGNGLAQRGLSSTTCSFSANADSGNQWPFQELVLEPSLGMKNPPQLEDDALEGSASNTQGRQVTGRIRASLVLILKTIRRRLPFSKWRLAFRFAGPHAESAEIPNTAERMQRMIG

SEQ ID NO: 56318 - protein, 667 aa, Homo sapiens
  Payload ID: 11064
  Gene Symbol: NBPF6
  Gene Name: neuroblastoma breakpoint family, member 6
  Uniprot ID: Q5VWK0
  ENSP ID: ENSP00000359057
MVVSADPLSSERAEMNILEINQELRSQLAESNQQFRDLKEKFLITQATAYSLANQLKKYKCEEYKDIIDSVLRDELQSMEKLAEKLRQAEELRQYKALVHSQAKELTQLREKLREGRDASRWLNKHLKTLLTPDDPDKSQGQDLREQLAEGHRLAEHLVHKLSPENDEDEDEDEDDKDEEVEKVQESPAPREVQKTEEKEVPQDSLEECAVTCSNSHNPSNSNQPHRSTKITFKEHEVDSALVVESEHPHDEEEEALNIPPENQNDHEEEEGKAPVPPRNRQSLEPGELTNLRDFLISPVVSHVANPGHHDKSNSYRHREVSFLALDEQKVCSAQDVARDYSNPKWDETSLGFLEKQSDLEEVKGQETVAPRLSRGPLRVDKHEIPQESLDGCCLTPSILPDLTPSYHPYWSTLYSFEDKQVSLALVDKIKKDQEEIEDQSPPCPRLSQELPEVKEQEVPEDSVNEVYLTPSVHHDVSDCHQPYSSTLSSLEDQLACSALDVASPTEAACPQGTWSGDLSHHRSEVQISQAQLEPSTLVPSCLRLQLDQGFHCGNGLAQRGLSSTTCSFSANADSGNQWPFQELVLEPSLGMKNPPQLEDDALEGSASNTQGRQVTGRIRASLVLILKTIRRRLPFSKWRLAFRFAGPHAESAEIPNTAERMQRMIG

SEQ ID NO: 56319 - protein, 638 aa, Homo sapiens; identical to SEQ ID NO: 56317
  Payload ID: 11064
  Gene Symbol: NBPF6
  Gene Name: neuroblastoma breakpoint family, member 6
  Uniprot ID: Q5VWK0
  ENSP ID: ENSP00000402703

SEQ ID NO: 56320 - protein, 638 aa, Homo sapiens; identical to SEQ ID NO: 56317
  Payload ID: 11064
  Gene Symbol: NBPF6
  Gene Name: neuroblastoma breakpoint family, member 6
  Uniprot ID: Q5VWK0
  ENSP ID: ENSP00000417277

SEQ ID NO: 56321 - protein, 572 aa, Homo sapiens
  Payload ID: 11064
  Gene Symbol: NBPF6
  Gene Name: neuroblastoma breakpoint family, member 6
  ENSP ID: ENSP00000434735
MVVSADPLSSERAEMNILEINQELRSQLAESNQQFRDLKEKFLITQATAYSLANQLKKYKCEEYKDIIDSVLRDELQSMEKLAEKLRQAEELRQYKALVHSQAKELTQLREKLREGRDASRWLNKHLKTLLTPDDPDKSQGQDLREQLAEGHRLAEHLVHKLSPENDEDEDEDEDDKDEEVEKVQESPAPREVQKTEEKEVPQDSLEECAVTCSNSHNPSNSNQPHRSTKITFKEHEVDSALVVESEHPHDEEEEALNIPPENQNDHEEEEGKAPVPPRNRQSLEPGELTNLRDFLISPVVSHVANPGHHDKSNSYRHREVSFLALDEQKVCSAQDVARDYSNPKWDETSLGFLEKQSDLEEVKGQETVAPRLSRGPLRVDKHEIPQESLDGCCLTPSILPDLTPSYHPYWSTLYSFEDKQVSLALVDKIKKDQEEIEDQSPPCPRLSQELPEVKEQEVPEDSVNEVYLTPSVHHDVSDCHQPYSSTLSSLEDQLACSALDVASPTEAACPQGTWSGDLSHHRSEVQISQAQLEPSTLVPSCLRLQLDQGFHCGNGLAQRGLSSTTCSFSAN

SEQ ID NO: 56322 - protein, 1111 aa, Homo sapiens
  Payload ID: 11065
  Gene Symbol: NBPF9
  Gene Name: neuroblastoma breakpoint family, member 9
  ENSP ID: ENSP00000463665
MVVSAGPWSSEKAEMNILEINEKLRPQLAENKQQFGNLKERCFLTQLAGFLANRQKKYKYEECKDLIKFMLRNERQFKEEKLAEQLKQAEELRQYKVLVHSQERELTQLKEKLREGRDASRSLNEHLQALLTPDEPDKSQGQDLQEQLAEGCRLAQHLVQKLSPENDEDEDEDVQVEEDEKVLESSAPREVQKAEESKVAEDSLEECAITCSNSHGPCDSNQPHKNIKITFEEDEVNSTLVVDRESSHDECQDALNILPVPGPTSSATNVSMVVSAGPLSSEKAEMNILEINEKLRPQLAEKKQQFRNLKEKCFLTQLAGFLANQQNKYKYEECKDLIKFMLRNERQFKEEKLAEQLKQAEELRQYKVLVHAQERELTQLREKLREGRDASRSLNEHLQALLTPDEPDKSQGQDLQEQLAEGCRLAQHLVQKLSPENDNDDDEDVQIEVAEKVQKSSAPREMQKAEEKEVPEDSLEECAITYSNSHGPYDSNQPHRKTKITFEEDKVDSTLIGSSSHVEREDAVHIIPENESDDEEEEEKGPVSPRNLQESEEEEVPQESWDEGYSTPSIPPEMLASYKSYSSTFHSLEEQQVCMAVDIGRHRWDQVKKEDQEATGPRLSRELLDEKGPEVLQDSLDRCYSTPSGCLELTDSCQPYRSAFYVLEQQRVGLAVDMDEIEKYQEVEEDQDPSCPRLSRELLDEKEPEVLQDSLGRWYSTPSGYLELPDLGQPYSSAVYSLEEQYLGLALDLDRIKKDQEEEEDQGPPCPRLSRELLEVVEPEVLQDSLDRCYSTPSSCLEQPDSCQPYGSSFYALEEKHVGFSLDVGEIEKKGKGKKRRGRRSKKKRRRGRKEGEENQNPPCPRLSRELLDEKEPEVLQDSLDRCYSTPSGYLELPDLGQPYSSAVYSLEEQYLGLALDVDRIKKDQEEEEDQGPPCPRLSRELLEVVEPEVLQDSLDRCYSTPSSCLEQPDSCQPYGSSFYALEEKHVGFSLDVGEIEKKGKGKKRRGRRSKKERRRGRKEGEEDQNPPCPRLNGVLMEVEEPEVLQDSLDGCYSTPSMYFELPDSFQHYRSVFYSFEEQHISFALYVDNRFFTLTVTSLHLVFQMEVIFPQ

SEQ ID NO: 56323 - protein, 1111 aa, Homo sapiens; identical to SEQ ID NO: 56322
  Payload ID: 11065
  Gene Symbol: NBPF9
  Gene Name: neuroblastoma breakpoint family, member 9
  ENSP ID: ENSP00000477979

SEQ ID NO: 56324 - protein, 867 aa, Homo sapiens
  Payload ID: 11065
  Gene Symbol: NBPF9
  Gene Name: neuroblastoma breakpoint family, member 9
  ENSP ID: ENSP00000479415
MVVSAGPWSSEKAEMNILEINEKLRPQLAENKQQFGNLKERCFLTQLAGFLANRQKKYKYEECKDLIKFMLRNERQFKEEKLAEQLKQAEELRQYKVLVHSQERELTQLKEKLREGRDASRSLNEHLQALLTPDEPDKSQGQDLQEQLAEGCRLAQHLVQKLSPENDEDEDEDVQVEEDEKVLESSAPREVQKAEESKVAEDSLEECAITCSNSHGPCDSNQPHKNIKITFEEDEVNSTLVVDRESSHDECQDALNILPVPGPTSSATNVSMVVSAGPLSSEKAEMNILEINEKLRPQLAEKKQQFRNLKEKCFLTQLAGFLANQQNKYKYEECKDLIKFMLRNERQFKEEKLAEQLKQAEELRQYKVLVHAQERELTQLREKLREGRDASRSLNEHLQALLTPDEPDKSQGQDLQEQLAEGCRLAQHLVQKLSPENDNDDDEDVQIEVAEKVQKSSAPREMQKAEEKEVPEDSLEECAITYSNSHGPYDSNQPHRKTKITFEEDKVDSTLIGSSSHVEREDAVHIIPENESDDEEEEEKGPVSPRNLQESEEEEVPQESWDEGYSTPSIPPEMLASYKSYSSTFHSLEEQQVCMAVDIGRHRWDQVKKEDQEATGPRLSRELLDEKEPEVLQDSLDRCYSTPSGYLELPDLGQPYSSAVYSLEEQYLGLALDVDRIKKDQEEEEDQGPPCPRLSRELLEVVEPEVLQDSLDRCYSTPSSCLEQPDSCQPYGSSFYALEEKHVGFSLDVGEIEKKGKGKKRRGRRSKKERRRGRKEGEEDQNPPCPRLNGVLMEVEEPEVLQDSLDGCYSTPSMYFELPDSFQHYRSVFYSFEEQHISFALYVDNRFFTLTVTSLHLVFQMEVIFPQ

SEQ ID NO: 56325 - protein, 942 aa, Homo sapiens
  Payload ID: 11065
  Gene Symbol: NBPF9
  Gene Name: neuroblastoma breakpoint family, member 9
  ENSP ID: ENSP00000481471
MVVSAGPWSSEKAEMNILEINEKLRPQLAENKQQFGNLKERCFLTQLAGFLANRQKKYKYEECKDLIKFMLRNERQFKEEKLAEQLKQAEELRQYKVLVHSQERELTQLKEKLREGRDASRSLNEHLQALLTPDEPDKSQGQDLQEQLAEGCRLAQHLVQKLSPENDEDEDEDVQVEEDEKVLESSAPREVQKAEESKVAEDSLEECAITCSNSHGPCDSNQPHKNIKITFEEDEVNSTLVVDRESSHDECQDALNILPVPGPTSSATNVSMVVSAGPLSSEKAEMNILEINEKLRPQLAEKKQQFRNLKEKCFLTQLAGFLANQQNKYKYEECKDLIKFMLRNERQFKEEKLAEQLKQAEELRQYKVLVHAQERELTQLREKLREGRDASRSLNEHLQALLTPDEPDKSQGQDLQEQLAEGCRLAQHLVQKLSPENDNDDDEDVQIEVAEKVQKSSAPREMQKAEEKEVPEDSLEECAITYSNSHGPYDSNQPHRKTKITFEEDKVDSTLIGSSSHVEREDAVHIIPENESDDEEEEEKGPVSPRNLQESEEEEVPQESWDEGYSTPSIPPEMLASYKSYSSTFHSLEEQQVCMAVDIGRHRWDQVKKEDQEATGPRLSRELLDEKGPEVLQDSLDRCYSTPSGCLELTDSCQPYRSAFYVLEQQRVGLAVDMDEIEKYQEVEEDQDPSCPRLSRELLDEKEPEVLQDSLGRWYSTPSGYLELPDLGQPYSSAVYSLEEQYLGLALDLDRIKKDQEEEEDQGPPCPRLSRELLEVVEPEVLQDSLDRCYSTPSSCLEQPDSCQPYGSSFYALEEKHVGFSLDVGEIEKKGKGKKRRGRRSKKERRRGRKEGEEDQNPPCPRLNGVLMEVEEPEVLQDSLDGCYSTPSMYFELPDSFQHYRSVFYSFEEQHISFALYVDNRFFTLTVTSLHLVFQMEVIFPQ

SEQ ID NO: 56326 - protein, 942 aa, Homo sapiens
  Payload ID: 11065
  Gene Symbol: NBPF9
  Gene Name: neuroblastoma breakpoint family, member 9
  ENSP ID: ENSP00000482016
MVVSAGPWSSEKAEMNILEINEKLRPQLAENKQQFGNLKERCFLTQLAGFLANRQKKYKYEECKDLIKFMLRNERQFKEEKLAEQLKQAEELRQYKVLVHSQERELTQLKEKLREGRDASRSLNEHLQALLTPDEPDKSQGQDLQEQLAEGCRLAQHLVQKLSPENDEDEDEDVQVEEDEKVLESSAPREVQKAEESKVAEDSLEECAITCSNSHGPCDSNQPHKNIKITFEEDEVNSTLVVDRESSHDECQDALNILPVPGPTSSATNVSMVVSAGPLSSEKAEMNILEINEKLRPQLAEKKQQFRNLKEKCFLTQLAGFLANQQNKYKYEECKDLIKFMLRNERQFKEEKLAEQLKQAEELRQYKVLVHAQERELTQLREKLREGRDASRSLNEHLQALLTPDEPDKSQGQDLQEQLAEGCRLAQHLVQKLSPENDNDDDEDVQIEVAEKVQKSSAPREMQKAEEKEVPEDSLEECAITYSNSHGPYDSNQPHRKTKITFEEDKVDSTLIGSSSHVEREDAVHIIPENESDDEEEEEKGPVSPRNLQESEEEEVPQESWDEGYSTPSIPPEMLASYKSYSSTFHSLEEQQVCMAVDIGRHRWDQVKKEDQEATGPRLSRELLDEKGPEVLQDSLDRCYSTPSGCLELTDSCQPYRSAFYVLEQQRVGLAVDMDEIEKYQEVEEDQDPSCPRLSRELLDEKEPEVLQDSLDRCYSTPSGYLELPDLGQPYSSAVYSLEEQYLGLALDVDRIKKDQEEEEDQGPPCPRLSRELLEVVEPEVLQDSLDRCYSTPSSCLEQPDSCQPYGSSFYALEEKHVGFSLDVGEIEKKGKGKKRRGRRSKKERRRGRKEGEEDQNPPCPRLNGVLMEVEEPEVLQDSLDGCYSTPSMYFELPDSFQHYRSVFYSFEEQHISFALYVDNRFFTLTVTSLHLVFQMEVIFPQ

SEQ ID NO: 56327 - protein, 981 aa, Homo sapiens
  Payload ID: 11065
  Gene Symbol: NBPF9
  Gene Name: neuroblastoma breakpoint family, member 9
  ENSP ID: ENSP00000482587
MVVSAGPWSSEKAEMNILEINEKLRPQLAENKQQFGNLKERCFLTQLAGFLANRQKKYKYEECKDLIKFMLRNERQFKEEKLAEQLKQAEELRQYKVLVHSQERELTQLKEKLREGRDASRSLNEHLQALLTPDEPDKSQGQDLQEQLAEGCRLAQHLVQKLSPENDEDEDEDVQVEEDEKVLESSAPREVQKAEESKVAEDSLEECAITCSNSHGPCDSNQPHKNIKITFEEDEVNSTLVVDRESSHDECQDALNILPVPGPTSSATNVSMVVSAGPLSSEKAEMNILEINEKLRPQLAEKKQQFRNLKEKCFLTQLAGFLANQQNKYKYEECKDLIKFMLRNERQFKEEKLAEQLKQAEELRQYKVLVHAQERELTQLREKLREGRDASRSLNEHLQALLTPDEPDKSQGQDLQEQLAEGCRLAQHLVQKLSPENESDDEEEEEKGPVSPRNLQESEEEEVPQESWDEGHRWDQVKKEDQEATGPRLSRELLDEKGPEVLQDSLDRCYSTPSGCLELTDSCQPYRSAFYVLEQQRVGLAVDMDEIEKYQEVEEDQDPSCPRLSRELLDEKEPEVLQDSLGRWYSTPSGYLELPDLGQPYSSAVYSLEEQYLGLALDLDRIKKDQEEEEDQGPPCPRLSRELLEVVEPEVLQDSLDRCYSTPSSCLEQPDSCQPYGSSFYALEEKHVGFSLDVGEIEKKGKGKKRRGRRSKKKRRRGRKEGEENQNPPCPRLSRELLDEKEPEVLQDSLDRCYSTPSGYLELPDLGQPYSSAVYSLEEQYLGLALDVDRIKKDQEEEEDQGPPCPRLSRELLEVVEPEVLQDSLDRCYSTPSSCLEQPDSCQPYGSSFYALEEKHVGFSLDVGEIEKKGKGKKRRGRRSKKERRRGRKEGEEDQNPPCPRLNGVLMEVEEPEVLQDSLDGCYSTPSMYFELPDSFQHYRSVFYSFEEQHISFALYVDNRFFTLTVTSLHLVFQMEVIFPQ

SEQ ID NO: 56328 - protein, 299 aa, Homo sapiens
  Payload ID: 11065
  Gene Symbol: NBPF9
  Gene Name: neuroblastoma breakpoint family, member 9
  ENSP ID: ENSP00000483736
MVVSAGPLSSEKAEMNILEINEKLRPQLAEKKQQFRNLKEKCFLTQLAGFLANQQNKYKYEECKDLIKFMLRNERQFKEEKLAEQLKQAEELRQYKVLVHAQERELTQLREKLREGRDASRSLNEHLQALLTPDEPDKSQGQDLQEQLAEGCRLAQHLVQKLSPENDNDDDEDVQIEVAEKVQKSSAPREMQKAEEKEVPEDSLEECAITYSNSHGPYDSNQPHRKTKITFEEDKVDSTLIGSSSHVEREDAVHIIPENESDDEEEEEKGPVSPRTSVGSSEKGGPRGNRSQAQQGAAG

SEQ ID NO: 56329 - protein, 942 aa, Homo sapiens; identical to SEQ ID NO: 56325
  Payload ID: 11065
  Gene Symbol: NBPF9
  Gene Name: neuroblastoma breakpoint family, member 9
  ENSP ID: ENSP00000483900

SEQ ID NO: 56330 - protein, 189 aa, Homo sapiens
  Payload ID: 11066
  Gene Symbol: NRAS
  Gene Name: neuroblastoma RAS viral (v-ras) oncogene homolog
  Uniprot ID: P01111
  ENSP ID: ENSP00000358548
MTEYKLVVVGAGGVGKSALTIQLIQNHFVDEYDPTIEDSYRKQVVIDGETCLLDILDTAGQEEYSAMRDQYMRTGEGFLCVFAINNSKSFADINLYREQIKRVKDSDDVPMVLVGNKCDLPTRTVDTKQAHELAKSYGIPFIETSAKTRQGVEDAFYTLVREIRQYRMKKLNSSDDGTQGCMGLPCVVM

SEQ ID NO: 56331 - protein, 193 aa, Homo sapiens [sequence omitted]

SEQ ID NO: 56332 - protein, 193 aa, Homo sapiens [sequence omitted]

SEQ ID NO: 56333 - protein, 193 aa, Homo sapiens [sequence omitted]

SEQ ID NO: 56334 - protein, 74 aa, Homo sapiens
  Payload ID: 11067
  Gene Symbol: NCALD
  Gene Name: neurocalcin delta
  ENSP ID: ENSP00000428093
MGKQNSKLRPEVMQDLLESTDFTEHEIQEWYKGFLRDCPSGHLSMEEFKKIYGNFFPYGDASKFAEHVFRTFDA

SEQ ID NO: 56335 - protein, 193 aa, Homo sapiens [sequence omitted]

SEQ ID NO: 56336 - protein, 81 aa, Homo sapiens
  Payload ID: 11067
  Gene Symbol: NCALD
  Gene Name: neurocalcin delta
  ENSP ID: ENSP00000428193
MGKQNSKLRPEVMQDLLESTDFTEHEIQEWYKGFLRDCPSGHLSMEEFKKIYGNFFPYGDASKFAEHVFRTFDANGDGTID

SEQ ID NO: 56337 - protein, 111 aa, Homo sapiens
  Payload ID: 11067
  Gene Symbol: NCALD
  Gene Name: neurocalcin delta
  ENSP ID: ENSP00000428312
MGKQNSKLRPEVMQDLLESTDFTEHEIQEWYKGFLRDCPSGHLSMEEFKKIYGNFFPYGDASKFAEHVFRTFDANGDGTIDFREFIIALSVTSRGKLEQKLKWAFSMYDLD

SEQ ID NO: 56338 - protein, 112 aa, Homo sapiens
  Payload ID: 11067
  Gene Symbol: NCALD
  Gene Name: neurocalcin delta
  ENSP ID: ENSP00000428598
MGKQNSKLRPEVMQDLLESTDFTEHEIQEWYKGFLRDCPSGHLSMEEFKKIYGNFFPYGDASKFAEHVFRTFDANGDGTIDFREFIIALSVTSRGKLEQKLKWAFSMYDLDG

SEQ ID NO: 56339 - protein, 194 aa, Homo sapiens
  Payload ID: 11067
  Gene Symbol: NCALD
  Gene Name: neurocalcin delta
  ENSP ID: ENSP00000428781
MGKQNSKLRPEVMQDLLESTDFTEHEIQEWYKGFLRDCPSGHLSMEEFKKIYGNFFPYGDASKFAEHVFRTFDANGDGTIDFREFIIALSVTSRGKLEQKLKWAFSMYDLDGNGYISKAEMLEIVQAIYKMVSSVMKMPEDESTPEKRTEKIFRQMDTNRDASFVVDASWECPEPQCACGEHGQTSWCSLFDDF

SEQ ID NO: 56340 - protein, 14 aa, Homo sapiens
  Payload ID: 11067
  Gene Symbol: NCALD
  Gene Name: neurocalcin delta
  ENSP ID: ENSP00000429162
MGKQNSKLRPEVMQ

SEQ ID NO: 56341 - protein, 105 aa, Homo sapiens
  Payload ID: 11067
  Gene Symbol: NCALD
  Gene Name: neurocalcin delta
  ENSP ID: ENSP00000429245
MGKQNSKLRPEVMQDLLESTDFTEHEIQEWYKGFLRDCPSGHLSMEEFKKIYGNFFPYGDASKFAEHVFRTFDANGDGTIDFREFIIALSVTSRGKLEQKLKWAF

SEQ ID NO: 56342 - protein, 136 aa, Homo sapiens
  Payload ID: 11067
  Gene Symbol: NCALD
  Gene Name: neurocalcin delta
  ENSP ID: ENSP00000429255
MGKQNSKLRPEVMQDLLESTDFTEHEIQEWYKGFLRDCPSGHLSMEEFKKIYGNFFPYGDASKFAEHVFRTFDANGDGTIDFREFIIALSVTSRGKLEQKLKWAFSMYDLDGNGYISKAEMLEIVQAIYKMVSSVM

SEQ ID NO: 56343 - protein, 52 aa, Homo sapiens
  Payload ID: 11067
  Gene Symbol: NCALD
  Gene Name: neurocalcin delta
  ENSP ID: ENSP00000429296
MGKQNSKLRPEVMQDLLESTDFTEHEIQEWYKGFLRDCPSGHLSMEEFKKIY

SEQ ID NO: 56344 - protein, 3 aa, Homo sapiens
  Payload ID: 11067
  Gene Symbol: NCALD
  Gene Name: neurocalcin delta
  ENSP ID: ENSP00000429347
MGK

SEQ ID NO: 56345 - protein, 152 aa, Homo sapiens
  Payload ID: 11067
  Gene Symbol: NCALD
  Gene Name: neurocalcin delta
  ENSP ID: ENSP00000429466
MGKQNSKLRPEVMQDLLESTDFTEHEIQEWYKGFLRDCPSGHLSMEEFKKIYGNFFPYGDASKFAEHVFRTFDANGDGTIDFREFIIALSVTSRGKLEQKLKWAFSMYDLDGNGYISKAEMLEIVQERKKMAQLFFHRFTLVELICVSLEIK

SEQ ID NO: 56346 - protein, 105 aa, Homo sapiens; identical to SEQ ID NO: 56341
  Payload ID: 11067
  Gene Symbol: NCALD
  Gene Name: neurocalcin delta
  ENSP ID: ENSP00000429493

SEQ ID NO: 56347 - protein, 116 aa, Homo sapiens
  Payload ID: 11067
  Gene Symbol: NCALD
  Gene Name: neurocalcin delta
  ENSP ID: ENSP00000429522
MGKQNSKLRPEVMQDLLESTDFTEHEIQEWYKGFLRDCPSGHLSMEEFKKIYGNFFPYGDASKFAEHVFRTFDANGDGTIDFREFIIALSVTSRGKLEQKLKWAFSMYDLDGNGYI

SEQ ID NO: 56348 - protein, 87 aa, Homo sapiens
  Payload ID: 11067
  Gene Symbol: NCALD
  Gene Name: neurocalcin delta
  ENSP ID: ENSP00000430064
MGKQNSKLRPEVMQDLLESTDFTEHEIQEWYKGFLRDCPSGHLSMEEFKKIYGNFFPYGDASKFAEHVFRTFDANGDGTIDFREFII

SEQ ID NO: 56349 - protein, 77 aa, Homo sapiens
  Payload ID: 11067
  Gene Symbol: NCALD
  Gene Name: neurocalcin delta
  ENSP ID: ENSP00000430365
MGKQNSKLRPEVMQDLLESTDFTEHEIQEWYKGFLRDCPSGHLSMEEFKKIYGNFFPYGDASKFAEHVFRTFDANGD

SEQ ID NO: 56350 - protein, 193 aa, Homo sapiens [sequence omitted]

SEQ ID NO: 56351 - protein, 85 aa, Homo sapiens
  Payload ID: 11067
  Gene Symbol: NCALD
  Gene Name: neurocalcin delta
  ENSP ID: ENSP00000430534
MGKQNSKLRPEVMQDLLESTDFTEHEIQEWYKGFLRDCPSGHLSMEEFKKIYGNFFPYGDASKFAEHVFRTFDANGDGTIDFREF

SEQ ID NO: 56352 - protein, 15 aa, Homo sapiens
  Payload ID: 11067
  Gene Symbol: NCALD
  Gene Name: neurocalcin delta
  ENSP ID: ENSP00000430578
MGKQNSKLRPEVMQD

SEQ ID NO: 56353 - protein, 121 aa, Homo sapiens
  Payload ID: 11067
  Gene Symbol: NCALD
  Gene Name: neurocalcin delta
  ENSP ID: ENSP00000430731
MGKQNSKLRPEVMQDLLESTDFTEHEIQEWYKGFLRDCPSGHLSMEEFKKIYGNFFPYGDASKFAEHVFRTFDANGDGTIDFREFIIALSVTSRGKLEQKLKWAFSMYDLDGNGYISKAEM

SEQ ID NO: 56354 - protein, 120 aa, Homo sapiens
  Payload ID: 11067
  Gene Symbol: NCALD
  Gene Name: neurocalcin delta
  ENSP ID: ENSP00000430925
MGKQNSKLRPEVMQDLLESTDFTEHEIQEWYKGFLRDCPSGHLSMEEFKKIYGNFFPYGDASKFAEHVFRTFDANGDGTIDFREFIIALSVTSRGKLEQKLKWAFSMYDLDGNGYISKAE

SEQ ID NO: 56355 - protein, 1321 aa, Homo sapiens
  Payload ID: 11068
  Gene Symbol: NCAN
  Gene Name: neurocan
  Uniprot ID: O14594
  ENSP ID: ENSP00000252575
MGAPFVWALGLLMLQMLLFVAGEQGTQDITDASERGLHMQKLGSGSVQAALAELVALPCLFTLQPRPSAARDAPRIKWTKVRTASGQRQDLPILVAKDNVVRVAKSWQGRVSLPSYPRRRANATLLLGPLRASDSGLYRCQVVRGIEDEQDLVPLEVTGVVFHYRSARDRYALTFAEAQEACRLSSAIIAAPRHLQAAFEDGFDNCDAGWLSDRTVRYPITQSRPGCYGDRSSLPGVRSYGRRNPQELYDVYCFARELGGEVFYVGPARRLTLAGARAQCRRQGAALASVGQLHLAWHEGLDQCDPGWLADGSVRYPIQTPRRRCGGPAPGVRTVYRFANRTGFPSPAERFDAYCFRAHHPTSQHGDLETPSSGDEGEILSAEGPPVRELEPTLEEEEVVTPDFQEPLVSSGEEETLILEEKQESQQTLSPTPGDPMLASWPTGEVWLSTVAPSPSDMGAGTAASSHTEVAPTDPMPRRRGRFKGLNGRYFQQQEPEPGLQGGMEASAQPPTSEAAVNQMEPPLAMAVTEMLGSGQSRSPWADLTNEVDMPGAGSAGGKSSPEPWLWPPTMVPPSISGHSRAPVLELEKAEGPSARPATPDLFWSPLEATVSAPSPAPWEAFPVATSPDLPMMAMLRGPKEWMLPHPTPISTEANRVEAHGEATATAPPSPAAETKVYSLPLSLTPTGQGGEAMPTTPESPRADFRETGETSPAQVNKAEHSSSSPWPSVNRNVAVGFVPTETATEPTGLRGIPGSESGVFDTAESPTSGLQATVDEVQDPWPSVYSKGLDASSPSAPLGSPGVFLVPKVTPNLEPWVATDEGPTVNPMDSTVTPAPSDASGIWEPGSQVFEEAESTTLSPQVALDTSIVTPLTTLEQGDKVGVPAMSTLGSSSSQPHPEPEDQVETQGTSGASVPPHQSSPLGKPAVPPGTPTAASVGESASVSSGEPTVPWDPSSTLLPVTLGIEDFELEVLAGSPGVESFWEEVASGEEPALPGTPMNAGAEEVHSDPCENNPCLHGGTCNANGTMYGCSCDQGFAGENCEIDIDDCLCSPCENGGTCIDEVNGFVCLCLPSYGGSFCEKDTEGCDRGWHKFQGHCYRYFAHRRAWEDAEKDCRRRSGHLTSVHSPEEHSFINSFGHENTWIGLNDRIVERDFQWTDNTGLQFENWRENQPDNFFAGGEDCVVMVAHESGRWNDVPCNYNLPYVCKKGTVLCGPPPAVENASLIGARKAKYNVHATVRYQCNEGFAQHHVATIRCRSNGKWDRPQIVCTKPRRSHRMRRHHHHHQHHHQHHHHKSRKERRKHKKHPTEDWEKDEGNFC

SEQ ID NO: 56356 - protein, 175 aa, Homo sapiens
  Payload ID: 11068
  Gene Symbol: NCAN
  Gene Name: neurocan
  ENSP ID: ENSP00000465599
  MOD_RES (1)..(1): Any amino acid
XGCDRGWHKFQGHCYRYFAHRRAWEDAEKDCRRRSGHLTSVHSPEEHSFINSFGHENTWIGLNDRIVERDFQWTDNTGLQFENWRENQPDNFFAGGEDCVVMVAHESGRWNDVPCNYNLPYVCKKGTARRSHRMRRHHHHHQHHHQHHHHKSRKERRKHKKHPTEDWEKDEGNFC

SEQ ID NO: 56357 - protein, 729 aa, Homo sapiens
  Payload ID: 11069
  Gene Symbol: NCDN
  Gene Name: neurochondrin
  Uniprot ID: Q9UBB6
  ENSP ID: ENSP00000348394
MSCCDLAAAGQLGKASIMASDCEPALNQAEGRNPTLERYLGALREAKNDSEQFAALLLVTKAVKAGDIDAKTRRRIFDAVGFTFPNRLLTTKEAPDGCPDHVLRALGVALLACFCSDPELAAHPQVLNKIPILSTFLTARGDPDDAARRSMIDDTYQCLTAVAGTPRGPRHLIAGGTVSALCQAYLGHGYGFDQALALLVGLLAAAETQCWKEAEPDLLAVLRGLSEDFQKAEDASKFELCQLLPLFLPPTTVPPECYRDLQAGLARILGSKLSSWQRNPALKLAARLAHACGSDWIPAGSSGSKFLALLVNLACVEVRLALEETGTEVKEDVVTACYALMELGIQECTRCEQSLLKEPQKVQLVSVMKEAIGAVIHYLLQVGSEKQKEPFVFASVRILGAWLAEETSSLRKEVCQLLPFLVRYAKTLYEEAEEANDLSQQVANLAISPTTPGPTWPGDALRLLLPGWCHLTVEDGPREILIKEGAPSLLCKYFLQQWELTSPGHDTSVLPDSVEIGLQTCCHIFLNLVVTAPGLIKRDACFTSLMNTLMTSLPALVQQQGRLLLAANVATLGLLMARLLSTSPALQGTPASRGFFAAAILFLSQSHVARATPGSDQAVLALSPEYEGIWADLQELWFLGMQAFTGCVPLLPWLAPAALRSRWPQELLQLLGSVSPNSVKPEMVAAYQGVLVELARANRLCREAMRLQAGEETASHYRMAALEQCLSEP

SEQ ID NO: 56358 - protein, 729 aa, Homo sapiens; identical to SEQ ID NO: 56357
  Payload ID: 11069
  Gene Symbol: NCDN
  Gene Name: neurochondrin
  Uniprot ID: Q9UBB6
  ENSP ID: ENSP00000362340

SEQ ID NO: 56359 - protein, 712 aa, Homo sapiens
  Payload ID: 11069
  Gene Symbol: NCDN
  Gene Name: neurochondrin
  Uniprot ID: Q9UBB6
  ENSP ID: ENSP00000362350
MASDCEPALNQAEGRNPTLERYLGALREAKNDSEQFAALLLVTKAVKAGDIDAKTRRRIFDAVGFTFPNRLLTTKEAPDGCPDHVLRALGVALLACFCSDPELAAHPQVLNKIPILSTFLTARGDPDDAARRSMIDDTYQCLTAVAGTPRGPRHLIAGGTVSALCQAYLGHGYGFDQALALLVGLLAAAETQCWKEAEPDLLAVLRGLSEDFQKAEDASKFELCQLLPLFLPPTTVPPECYRDLQAGLARILGSKLSSWQRNPALKLAARLAHACGSDWIPAGSSGSKFLALLVNLACVEVRLALEETGTEVKEDVVTACYALMELGIQECTRCEQSLLKEPQKVQLVSVMKEAIGAVIHYLLQVGSEKQKEPFVFASVRILGAWLAEETSSLRKEVCQLLPFLVRYAKTLYEEAEEANDLSQQVANLAISPTTPGPTWPGDALRLLLPGWCHLTVEDGPREILIKEGAPSLLCKYFLQQWELTSPGHDTSVLPDSVEIGLQTCCHIFLNLVVTAPGLIKRDACFTSLMNTLMTSLPALVQQQGRLLLAANVATLGLLMARLLSTSPALQGTPASRGFFAAAILFLSQSHVARATPGSDQAVLALSPEYEGIWADLQELWFLGMQAFTGCVPLLPWLAPAALRSRWPQELLQLLGSVSPNSVKPEMVAAYQGVLVELARANRLCREAMRLQAGEETASHYRMAALEQCLSEP

SEQ ID NO: 56360 - protein, 244 aa, Homo sapiens
  Payload ID: 11069
  Gene Symbol: NCDN
  Gene Name: neurochondrin
  ENSP ID: ENSP00000406511
MASDCEPALNQAEGRNPTLERYLGALREAKNDSEQFAALLLVTKAVKAGDIDAKTRRRIFDAVGFTFPNRLLTTKEAPDGCPDHVLRALGVALLACFCSDPELAAHPQVLNKIPILSTFLTARGDPDDAARRSMIDDTYQCLTAVAGTPRGPRHLIAGGTVSALCQAYLGHGYGFDQALALLVGLLAAAETQCWKEAEPDLLAVLRGLSEDFQKAEDASKFELCQLLPLFLPPTTVPPECYRDL

SEQ ID NO: 56361 - protein, 193 aa, Homo sapiens
  Payload ID: 11069
  Gene Symbol: NCDN
  Gene Name: neurochondrin
  ENSP ID: ENSP00000407339
  MOD_RES (1)..(1): Any amino acid
XSSLRKEVCQLLPFLVRYAKTLYEEAEEANDLSQQVANLAISPTTPGPTWPGDALRLLLPGWCHLTVEDGPREILIKEGAPSLLCKYFLQQWELTSPGHDTSVLPDSVEIGLQTCCHIFLNLVVTAPGLIKRDACFTSLMNTLMTSLPALVQQQGRLLLAANVATLGLLMARLLSTSPGSISSQLPGAEHMPC

SEQ ID NO: 56362 - protein, 596 aa, Homo sapiens
  Payload ID: 11070
  Gene Symbol: NET1
  Gene Name: neuroepithelial cell transforming 1
  Uniprot ID: Q7Z628
  ENSP ID: ENSP00000347134
MEPELAAQKQPRPRRRSRRASGLSTEGATGPSADTSGSELDGRCSLRRGSSFTFLTPGPNWDFTLKRKRREKDDDVVSLSSLDLKEPSNKRVRPLARVTSLANLISPVRNGAVRRFGQTIQSFTLRGDHRSPASAQKFSSRSTVPTPAKRRSSALWSEMLDITMKESLTTREIRRQEAIYEMSRGEQDLIEDLKLARKAYHDPMLKLSIMSEEELTHIFGDLDSYIPLHEDLLTRIGEATKPDGTVEQIGHILVSWLPRLNAYRGYCSNQLAAKALLDQKKQDPRVQDFLQRCLESPFSRKLDLWSFLDIPRSRLVKYPLLLKEILKHTPKEHPDVQLLEDAILIIQGVLSDINLKKGESECQYYIDKLEYLDEKQRDPRIEASKVLLCHGELRSKSGHKLYIFLFQDILVLTRPVTRNERHSYQVYRQPIPVQELVLEDLQDGDVRMGGSFRGAFSNSEKAKNIFRIRFHDPSPAQSHTLQANDVFHKQQWFNCIRAAIAPFQSAGSPPELQGLPELHEECEGNHPSARKLTAQRRASTVSSVTQVEVDENAYRCGSGMQMAEDSKSLKTHQTQPGIRRARDKALSGGKRKETLV

SEQ ID NO: 56363 - protein, 542 aa, Homo sapiens
  Payload ID: 11070
  Gene Symbol: NET1
  Gene Name: neuroepithelial cell transforming 1
  Uniprot ID: Q7Z628
  ENSP ID: ENSP00000369717
MVAHDETGGLLPIKRTIRVLDVNNQSFREQEEPSNKRVRPLARVTSLANLISPVRNGAVRRFGQTIQSFTLRGDHRSPASAQKFSSRSTVPTPAKRRSSALWSEMLDITMKESLTTREIRRQEAIYEMSRGEQDLIEDLKLARKAYHDPMLKLSIMSEEELTHIFGDLDSYIPLHEDLLTRIGEATKPDGTVEQIGHILVSWLPRLNAYRGYCSNQLAAKALLDQKKQDPRVQDFLQRCLESPFSRKLDLWSFLDIPRSRLVKYPLLLKEILKHTPKEHPDVQLLEDAILIIQGVLSDINLKKGESECQYYIDKLEYLDEKQRDPRIEASKVLLCHGELRSKSGHKLYIFLFQDILVLTRPVTRNERHSYQVYRQPIPVQELVLEDLQDGDVRMGGSFRGAFSNSEKAKNIFRIRFHDPSPAQSHTLQANDVFHKQQWFNCIRAAIAPFQSAGSPPELQGLPELHEECEGNHPSARKLTAQRRASTVSSVTQVEVDENAYRCGSGMQMAEDSKSLKTHQTQPGIRRARDKALSGGKRKETLV

SEQ ID NO: 56364 - protein, 160 aa, Homo sapiens
  Payload ID: 11070
  Gene Symbol: NET1
  Gene Name: neuroepithelial cell transforming 1
  ENSP ID: ENSP00000403101
MVAHDETGGLLPIKRTIRVLDVNNQSFREQEELTHIFGDLDSYIPLHEDLLTRIGEATKPDGTVEQIGHILVSWLPRLNAYRGYCSNQLAAKALLDQKKQDPRVQDFLQRCLESPFSRKLDLWSFLDIPRSRLVKYPLLLKEILKHTPKEHPDVQLLEDA

SEQ ID NO: 56365 - protein, 1240 aa, Homo sapiens
  Payload ID: 11071
  Gene Symbol: NFASC
  Gene Name: neurofascin
  Uniprot ID: O94856
  ENSP ID: ENSP00000344786
MARQPPPPWVHAAFLLCLLSLGGAIEIPMDPSIQNELTQPPTITKQSAKDHIVDPRDNILIECEAKGNPAPSFHWTRNSRFFNIAKDPRVSMRRRSGTLVIDFRSGGRPEEYEGEYQCFARNKFGTALSNRIRLQVSKSPLWPKENLDPVVVQEGAPLTLQCNPPPGLPSPVIFWMSSSMEPITQDKRVSQGHNGDLYFSNVMLQDMQTDYSCNARFHFTHTIQQKNPFTLKVLTTRGVAERTPSFMYPQGTASSQMVLRGMDLLLECIASGVPTPDIAWYKKGGDLPSDKAKFENFNKALRITNVSEEDSGEYFCLASNKMGSIRHTISVRVKAAPYWLDEPKNLILAPGEDGRLVCRANGNPKPTVQWMVNGEPLQSAPPNPNREVAGDTIIFRDTQISSRAVYQCNTSNEHGYLLANAFVSVLDVPPRMLSPRNQLIRVILYNRTRLDCPFFGSPIPTLRWFKNGQGSNLDGGNYHVYENGSLEIKMIRKEDQGIYTCVATNILGKAENQVRLEVKDPTRIYRMPEDQVARRGTTVQLECRVKHDPSLKLTVSWLKDDEPLYIGNRMKKEDDSLTIFGVAERDQGSYTCVASTELDQDLAKAYLTVLADQATPTNRLAALPKGRPDRPRDLELTDLAERSVRLTWIPGDANNSPITDYVVQFEEDQFQPGVWHDHSKYPGSVNSAVLRLSPYVNYQFRVIAINEVGSSHPSLPSERYRTSGAPPESNPGDVKGEGTRKNNMEITWTPMNATSAFGPNLRYIVKWRRRETREAWNNVTVWGSRYVVGQTPVYVPYEIRVQAENDFGKGPEPESVIGYSGEDLPSAPRRFRVRQPNLETINLEWDHPEHPNGIMIGYTLKYVAFNGTKVGKQIVENFSPNQTKFTVQRTDPVSRYRFTLSARTQVGSGEAVTEESPAPPNEATPTAAPPTLPPTTVGATGAVSSTDATAIAATTEATTVPIIPTVAPTTIATTTTVATTTTTTAAATTTTESPPTTTSGTKIHESAPDEQSIWNVTVLPNSKWANITWKHNFGPGTDFVVEYIDSNHTKKTVPVKAQAQPIQLTDLYPGMTYTLRVYSRDNEGISSTVITFMTSTAYTNNQADIATQGWFIGLMCAIALLVLILLIVCFIKRSRGGKYPVREKKDVPLGPEDPKEEDGSFDYSDEDNKPLQGSQTSLDGTIKQQESDDSLVDYGEGGEGQFNEDGSFIGQYTVKKDKEETEGNESSEATSPVNAIYSLA

SEQ ID NO: 56366 - protein, 1169 aa, Homo sapiens
  Payload ID: 11071
  Gene Symbol: NFASC
  Gene Name: neurofascin
  Uniprot ID: O94856
  ENSP ID: ENSP00000353154
MARQPPPPWVHAAFLLCLLSLGGAIEIPMDLTQPPTITKQSAKDHIVDPRDNILIECEAKGNPAPSFHWTRNSRFFNIAKDPRVSMRRRSGTLVIDFRSGGRPEEYEGEYQCFARNKFGTALSNRIRLQVSKSPLWPKENLDPVVVQEGAPLTLQCNPPPGLPSPVIFWMSSSMEPITQDKRVSQGHNGDLYFSNVMLQDMQTDYSCNARFHFTHTIQQKNPFTLKVLTNHPYNDSSLRNHPDMYSARGVAERTPSFMYPQGTASSQMVLRGMDLLLECIASGVPTPDIAWYKKGGDLPSDKAKFENFNKALRITNVSEEDSGEYFCLASNKMGSIRHTISVRVKAAPYWLDEPKNLILAPGEDGRLVCRANGNPKPTVQWMVNGEPLQSAPPNPNREVAGDTIIFRDTQISSRAVYQCNTSNEHGYLLANAFVSVLDVPPRMLSPRNQLIRVILYNRTRLDCPFFGSPIPTLRWFKNGQGSNLDGGNYHVYENGSLEIKMIRKEDQGIYTCVATNILGKAENQVRLEVKDPTRIYRMPEDQVARRGTTVQLECRVKHDPSLKLTVSWLKDDEPLYIGNRMKKEDDSLTIFGVAERDQGSYTCVASTELDQDLAKAYLTVLGRPDRPRDLELTDLAERSVRLTWIPGDANNSPITDYVVQFEEDQFQPGVWHDHSKYPGSVNSAVLRLSPYVNYQFRVIAINEVGSSHPSLPSERYRTSGAPPESNPGDVKGEGTRKNNMEITWTPMNATSAFGPNLRYIVKWRRRETREAWNNVTVWGSRYVVGQTPVYVPYEIRVQAENDFGKGPEPESVIGYSGEDYPRAAPTEVKVRVMNSTAISLQWNRVYSDTVQGQLREYRAYYWRESSLLKNLWVSQKRQQASFPGDRLRGVVSRLFPYSNYKLEMVVVNGRGDGPRSETKEFTTPEGVPSAPRRFRVRQPNLETINLEWDHPEHPNGIMIGYTLKYVAFNGTKVGKQIVENFSPNQTKFTVQRTDPVSRYRFTLSARTQVGSGEAVTEESPAPPNEAYTNNQADIATQGWFIGLMCAIALLVLILLIVCFIKRSRGGKYPVREKKDVPLGPEDPKEEDGSFDYSDEDNKPLQGSQTSLDGTIKQQESDDSLVDYGEGGEGQFNEDGSFIGQYTVKKDKEETEGNESSEATSPVNAIYSLA

SEQ ID NO: 56367 - protein, 1041 aa, Homo sapiens
  Payload ID: 11071
  Gene Symbol: NFASC
  Gene Name: neurofascin
  ENSP ID: ENSP00000356141
  MOD_RES (1)..(1): Any amino acid
XSIQNELTQPPTITKQSAKDHIVDPRDNILIECEAKGNPAPSFHWTRNSRFFNIAKDPRVSMRRRSGTLVIDFRSGGRPEEYEGEYQCFARNKFGTALSNRIRLQVSKSPLWPKENLDPVVVQEGAPLTLQCNPPPGLPSPVIFWMSSSMEPITQDKRVSQGHNGDLYFSNVMLQDMQTDYSCNARFHFTHTIQQKNPFTLKVLTTRGVAERTPSFMYPQGTASSQMVLRGMDLLLECIASGVPTPDIAWYKKGGDLPSDKAKFENFNKALRITNVSEEDSGEYFCLASNKMGSIRHTISVRVKAAPYWLDEPKNLILAPGEDGRLVCRANGNPKPTVQWMVNGEPLQSAPPNPNREVAGDTIIFRDTQISSRAVYQCNTSNEHGYLLANAFVSVLDVPPRMLSPRNQLIRVILYNRTRLDCPFFGSPIPTLRWFKNGQGSNLDGGNYHVYENGSLEIKMIRKEDQGIYTCVATNILGKAENQVRLEVKDPTRIYRMPEDQVARRGTTVQLECRVKHDPSLKLTVSWLKDDEPLYIGNRMKKEDDSLTIFGVAERDQGSYTCVASTELDQDLAKAYLTVLADQATPTNRLAALPKGRPDRPRDLELTDLAERSVRLTWIPGDANNSPITDYVVQFEEDQFQPGVWHDHSKYPGSVNSAVLRLSPYVNYQFRVIAINEVGSSHPSLPSERYRTSGAPPESNPGDVKGEGTRKNNMEITWTPMNATSAFGPNLRYIVKWRRRETREAWNNVTVWGSRYVVGQTPVYVPYEIRVQAENDFGKGPEPESVIGYSGEDLPSAPRRFRVRQPNLETINLEWDHPEHPNGIMIGYTLKYVAFNGTKVGKQIVENFSPNQTKFTVQRTDPVSRYRFTLSARTQVGSGEAVTEESPAPPNEATPTAAYTNNQADIATQGWFIGLMCAIALLVLILLIVCFIKRSRGGKYPVREKKDVPLGPEDPKEEDGSFDYSDEDNKPLQGSQTSLDGTIKQQESDDSLVDYGEGGEGQFNEDGSFIGQYTVKKDKEETEGNESSEATSPVNAIYSLA

SEQ ID NO: 56368 - protein, 1174 aa, Homo sapiens
  Payload ID: 11071
  Gene Symbol: NFASC
  Gene Name: neurofascin
  Uniprot ID: O94856
  ENSP ID: ENSP00000384061
MARQPPPPWVHAAFLLCLLSLGGAIEIPMDLTQPPTITKQSAKDHIVDPRDNILIECEAKGNPAPSFHWTRNSRFFNIAKDPRVSMRRRSGTLVIDFRSGGRPEEYEGEYQCFARNKFGTALSNRIRLQVSKSPLWPKENLDPVVVQEGAPLTLQCNPPPGLPSPVIFWMSSSMEPITQDKRVSQGHNGDLYFSNVMLQDMQTDYSCNARFHFTHTIQQKNPFTLKVLTNHPYNDSSLRNHPDMYSARGVAERTPSFMYPQGTASSQMVLRGMDLLLECIASGVPTPDIAWYKKGGDLPSDKAKFENFNKALRITNVSEEDSGEYFCLASNKMGSIRHTISVRVKAAPYWLDEPKNLILAPGEDGRLVCRANGNPKPTVQWMVNGEPLQSAPPNPNREVAGDTIIFRDTQISSRAVYQCNTSNEHGYLLANAFVSVLDVPPRMLSPRNQLIRVILYNRTRLDCPFFGSPIPTLRWFKNGQGSNLDGGNYHVYENGSLEIKMIRKEDQGIYTCVATNILGKAENQVRLEVKDPTRIYRMPEDQVARRGTTVQLECRVKHDPSLKLTVSWLKDDEPLYIGNRMKKEDDSLTIFGVAERDQGSYTCVASTELDQDLAKAYLTVLGRPDRPRDLELTDLAERSVRLTWIPGDANNSPITDYVVQFEEDQFQPGVWHDHSKYPGSVNSAVLRLSPYVNYQFRVIAINEVGSSHPSLPSERYRTSGAPPESNPGDVKGEGTRKNNMEITWTPMNATSAFGPNLRYIVKWRRRETREAWNNVTVWGSRYVVGQTPVYVPYEIRVQAENDFGKGPEPESVIGYSGEDYPRAAPTEVKVRVMNSTAISLQWNRVYSDTVQGQLREYRAYYWRESSLLKNLWVSQKRQQASFPGDRLRGVVSRLFPYSNYKLEMVVVNGRGDGPRSETKEFTTPEGVPSAPRRFRVRQPNLETINLEWDHPEHPNGIMIGYTLKYVAFNGTKVGKQIVENFSPNQTKFTVQRTDPVSRYRFTLSARTQVGSGEAVTEESPAPPNEATPTAAYTNNQADIATQGWFIGLMCAIALLVLILLIVCFIKRSRGGKYPVREKKDVPLGPEDPKEEDGSFDYSDEDNKPLQGSQTSLDGTIKQQESDDSLVDYGEGGEGQFNEDGSFIGQYTVKKDKEETEGNESSEATSPVNAIYSLA

SEQ ID NO: 56369 - protein, 619 aa, Homo sapiens
  Payload ID: 11071
  Gene Symbol: NFASC
  Gene Name: neurofascin
  Uniprot ID: O94856
  ENSP ID: ENSP00000384875
MARQPPPPWVHAAFLLCLLSLGGAIEIPMDPSIQNELTQPPTITKQSAKDHIVDPRDNILIECEAKGNPAPSFHWTRNSRFFNIAKDPRVSMRRRSGTLVIDFRSGGRPEEYEGEYQCFARNKFGTALSNRIRLQVSKSPLWPKENLDPVVVQEGAPLTLQCNPPPGLPSPVIFWMSSSMEPITQDKRVSQGHNGDLYFSNVMLQDMQTDYSCNARFHFTHTIQQKNPFTLKVLTTRGVAERTPSFMYPQGTASSQMVLRGMDLLLECIASGVPTPDIAWYKKGGDLPSDKAKFENFNKALRITNVSEEDSGEYFCLASNKMGSIRHTISVRVKAAPYWLDEPKNLILAPGEDGRLVCRANGNPKPTVQWMVNGEPLQSAPPNPNREVAGDTIIFRDTQISSRAVYQCNTSNEHGYLLANAFVSVLDVPPRMLSPRNQLIRVILYNRTRLDCPFFGSPIPTLRWFKNGQGSNLDGGNYHVYENGSLEIKMIRKEDQGIYTCVATNILGKAENQVRLEVKDPTRIYRMPEDQVARRGTTVQLECRVKHDPSLKLTVSWLKDDEPLYIGNRMKKEDDSLTIFGVAERDQGSYTCVASTELDQDLAKAYLTVLGNCPCSPWH

SEQ ID NO: 56370 - protein, 1240 aa, Homo sapiens; identical to SEQ ID NO: 56365
  Payload ID: 11071
  Gene Symbol: NFASC
  Gene Name: neurofascin
  Uniprot ID: O94856
  ENSP ID: ENSP00000385637

SEQ ID NO: 56371 - protein, 1157 aa, Homo sapiens
  Payload ID: 11071
  Gene Symbol: NFASC
  Gene Name: neurofascin
  Uniprot ID: O94856
  ENSP ID: ENSP00000385676
MARQPPPPWVHAAFLLCLLSLGGAIEIPMDLTQPPTITKQSAKDHIVDPRDNILIECEAKGNPAPSFHWTRNSRFFNIAKDPRVSMRRRSGTLVIDFRSGGRPEEYEGEYQCFARNKFGTALSNRIRLQVSKSPLWPKENLDPVVVQEGAPLTLQCNPPPGLPSPVIFWMSSSMEPITQDKRVSQGHNGDLYFSNVMLQDMQTDYSCNARFHFTHTIQQKNPFTLKVLTTRGVAERTPSFMYPQGTASSQMVLRGMDLLLECIASGVPTPDIAWYKKGGDLPSDKAKFENFNKALRITNVSEEDSGEYFCLASNKMGSIRHTISVRVKAAPYWLDEPKNLILAPGEDGRLVCRANGNPKPTVQWMVNGEPLQSAPPNPNREVAGDTIIFRDTQISSRAVYQCNTSNEHGYLLANAFVSVLDVPPRMLSPRNQLIRVILYNRTRLDCPFFGSPIPTLRWFKNGQGSNLDGGNYHVYENGSLEIKMIRKEDQGIYTCVATNILGKAENQVRLEVKDPTRIYRMPEDQVARRGTTVQLECRVKHDPSLKLTVSWLKDDEPLYIGNRMKKEDDSLTIFGVAERDQGSYTCVASTELDQDLAKAYLTVLGRPDRPRDLELTDLAERSVRLTWIPGDANNSPITDYVVQFEEDQFQPGVWHDHSKYPGSVNSAVLRLSPYVNYQFRVIAINEVGSSHPSLPSERYRTSGAPPESNPGDVKGEGTRKNNMEITWTPMNATSAFGPNLRYIVKWRRRETREAWNNVTVWGSRYVVGQTPVYVPYEIRVQAENDFGKGPEPESVIGYSGEDYPRAAPTEVKVRVMNSTAISLQWNRVYSDTVQGQLREYRAYYWRESSLLKNLWVSQKRQQASFPGDRLRGVVSRLFPYSNYKLEMVVVNGRGDGPRSETKEFTTPEGVPSAPRRFRVRQPNLETINLEWDHPEHPNGIMIGYTLKYVAFNGTKVGKQIVENFSPNQTKFTVQRTDPVSRYRFTLSARTQVGSGEAVTEESPAPPNEATPTAAYTNNQADIATQGWFIGLMCAIALLVLILLIVCFIKRSRGGKYPVREKKDVPLGPEDPKEEDGSFDYSDEDNKPLQGSQTSLDGTIKQQESDDSLVDYGEGGEGQFNEDGSFIGQYTVKKDKEETEGNESSEATSPVNAIYSLA

SEQ ID NO: 56372 - protein, 237 aa, Homo sapiens
  Payload ID: 11071
  Gene Symbol: NFASC
  Gene Name: neurofascin
  ENSP ID: ENSP00000393290
  MOD_RES (1)..(1): Any amino acid
XENFSPNQTKFTVQRTDPVSRYRFTLSARTQVGSGEAVTEESPAPPNEATPTAAPDEQSIWNVTVLPNSKWANITWKHNFGPGTDFVVEYIDSNHTKKTVPVKAQAQPIQLTDLYPGMTYTLRVYSRDNEGISSTVITFMTSTAYTNNQADIATQGWFIGLMCAIALLVLILLIVCFIKRSRGGKYPVREKKDVPLGPEDPKEEDGSFDYSDEDNKPLQGSQTSLDGTIKQQESDDS

SEQ ID NO: 56373 - protein, 298 aa, Homo sapiens
  Payload ID: 11071
  Gene Symbol: NFASC
  Gene Name: neurofascin
  ENSP ID: ENSP00000395664
  MOD_RES (1)..(1): Any amino acid
XRETREAWNNVTVWGSRYVVGQTPVYVPYEIRVQAENDFGKGPEPESVIGYSGEDLPSAPRRFRVRQPNLETINLEWDHPEHPNGIMIGYTLKYVAFNGTKVGKQIVENFSPNQTKFTVQRTDPVSRYRFTLSARTQVGSGEAVTEESPAPPNEAYTNNQADIATQGWFIGLMCAIALLVLILLIVCFIKRSRGGKYPVREKKDVPLGPEDPKEEDGSFDYSDEDNKPLQGSQTSLDGTIKQQESDDSLVDYGEGGEGQFNEDGSFIGQYTVKKDKEETEGNESSEATSPVNAIYSLA

SEQ ID NO: 56374 - protein, 1165 aa, Homo sapiens
  Payload ID: 11071
  Gene Symbol: NFASC
  Gene Name: neurofascin
  ENSP ID: ENSP00000415031
IEIPMDLTQPPTITKQSAKDHIVDPRDNILIECEAKGNPAPSFHWTRNSRFFNIAKDPRVSMRRRSGTLVIDFRSGGRPEEYEGEYQCFARNKFGTALSNRIRLQVSKSPLWPKENLDPVVVQEGAPLTLQCNPPPGLPSPVIFWMSSSMEPITQDKRVSQGHNGDLYFSNVMLQDMQTDYSCNARFHFTHTIQQKNPFTLKVLTNHPYNDSSLRNHPDMYSARGVAERTPSFMYPQGTASSQMVLRGMDLLLECIASGVPTPDIAWYKKGGDLPSDKAKFENFNKALRITNVSEEDSGEYFCLASNKMGSIRHTISVRVKAAPYWLDEPKNLILAPGEDGRLVCRANGNPKPTVQWMVNGEPLQSAPPNPNREVAGDTIIFRDTQISSRAVYQCNTSNEHGYLLANAFVSVLDVPPRMLSPRNQLIRVILYNRTRLDCPFFGSPIPTLRWFKNGQGSNLDGGNYHVYENGSLEIKMIRKEDQGIYTCVATNILGKAENQVRLEVKDPTRIYRMPEDQVARRGTTVQLECRVKHDPSLKLTVSWLKDDEPLYIGNRMKKEDDSLTIFGVAERDQGSYTCVASTELDQDLAKAYLTVLADQATPTNRLAALPKGRPDRPRDLELTDLAERSVRLTWIPGDANNSPITDYVVQFEEDQFQPGVWHDHSKYPGSVNSAVLRLSPYVNYQFRVIAINEVGSSHPSLPSERYRTSGAPPESNPGDVKGEGTRKNNMEITWTPMNATSAFGPNLRYIVKWRRRETREAWNNVTVWGSRYVVGQTPVYVPYEIRVQAENDFGKGPEPESVIGYSGEDYPRAAPTEVKVRVMNSTAISLQWNRVYSDTVQGQLREYRAYYWRESSLLKNLWVSQKRQQASFPGDRLRGVVSRLFPYSNYKLEMVVVNGRGDGPRSETKEFTTPEGVPSAPRRFRVRQPNLETINLEWDHPEHPNGIMIGYTLKYVAFNGTKVGKQIVENFSPNQTKFTVQRTDPVSRYRFTLSARTQVGSGEAVTEESPAPPNEATPTAAYTNNQADIATQGWFIGLMCAIALLVLILLIVCFIKRSRGGKYPVREKKDVPLGPEDPKEEDGSFDYSDEDNKPLQGSQTSLDGTIKQQESDDSLVDYGEGGEGQFNEDGSFIGQYTVKKDKEETEGNESSEATSPVNAIYSLA

SEQ ID NO: 56375 - protein, 218 aa, Homo sapiens
  Payload ID: 11071
  Gene Symbol: NFASC
  Gene Name: neurofascin
  ENSP ID: ENSP00000416891
PPTTVGATGAVSSTDATAIAATTEATTVPIIPTVAPTTIATTTTVATTTTTTAAATTTTESPPTTTSGTKIHESAYTNNQADIATQGWFIGLMCAIALLVLILLIVCFIKRSRGGKYPVREKKDVPLGPEDPKEEDGSFDYSDEDNKPLQGSQTSLDGTIKQQESDDSLVDYGEGGEGQFNEDGSFIGQYTVKKDKEETEGNESSEATSPVNAIYSLA

SEQ ID NO: 56376 - protein, 486 aa, Homo sapiens
  Payload ID: 11071
  Gene Symbol: NFASC
  Gene Name: neurofascin
  ENSP ID: ENSP00000422524
MARQPPPPWVHAAFLLCLLSLGGAIEIPMDPSIQNELTQPPTITKQSAKDHIVDPRDNILIECEAKGNPAPSFHWTRNSRFFNIAKDPRVSMRRRSGTLVIDFRSGGRPEEYEGEYQCFARNKFGTALSNRIRLQVSKSPLWPKENLDPVVVQEGAPLTLQCNPPPGLPSPVIFWMSSSMEPITQDKRVSQGHNGDLYFSNVMLQDMQTDYSCNARFHFTHTIQQKNPFTLKVLTNHPYNDSSLRNHPDMYSARGVAERTPSFMYPQGTASSQMVLRGMDLLLECIASGVPTPDIAWYKKGGDLPSDKAKFENFNKALRITNVSEEDSGEYFCLASNKMGSIRHTISVRVKAAPYWLDEPKNLILAPGEDGRLVCRANGNPKPTVQWMVNGEPLQSAPPNPNREVAGDTIIFRDTQISSRAVYQCNTSNEHGYLLANAFVSVLDVPPRMLSPRNQLIRVILYNRTRLDCPFFGSPIPTLRCPHGLS

SEQ ID NO: 56377 - protein, 1169 aa, Homo sapiens; identical to SEQ ID NO: 56366
  Payload ID: 11071
  Gene Symbol: NFASC
  Gene Name: neurofascin
  Uniprot ID: O94856
  ENSP ID: ENSP00000425908

SEQ ID NO: 56378 - protein, 129 aa, Homo sapiens
  Payload ID: 11071
  Gene Symbol: NFASC
  Gene Name: neurofascin
  ENSP ID: ENSP00000427586
MARQPPPPWVHAAFLLCLLSLGGAIEIPMDPSIQNELTQPPTITKQSAKDHIVDPRDNILIECEAKGNPAPSFHWTRNSRFFNIAKDPRVSMRRRSGTLVIDFRSGGRPEEYEGEYQCFARNKFGTALS

SEQ ID NO: 56379 - protein, 1174 aa, Homo sapiens; identical to SEQ ID NO: 56368
  Payload ID: 11071
  Gene Symbol: NFASC
  Gene Name: neurofascin
  Uniprot ID: O94856
  ENSP ID: ENSP00000438614

SEQ ID NO: 56380 - protein, 2818 aa, Homo sapiens
  Payload ID: 11072
  Gene Symbol: NF1
  Gene Name: neurofibromin 1
  Uniprot ID: P21359
  ENSP ID: ENSP00000348498
MAAHRPVEWVQAVVSRFDEQLPIKTGQQNTHTKVSTEHNKECLINISKYKFSLVISGLTTILKNVNNMRIFGEAAEKNLYLSQLIILDTLEKCLAGQPKDTMRLDETMLVKQLLPEICHFLHTCREGNQHAAELRNSASGVLFSLSCNNFNAVFSRISTRLQELTVCSEDNVDVHDIELLQYINVDCAKLKRLLKETAFKFKALKKVAQLAVINSLEKAFWNWVENYPDEFTKLYQIPQTDMAECAEKLFDLVDGFAESTKRKAAVWPLQIILLILCPEIIQDISKDVVDENNMNKKLFLDSLRKALAGHGGSRQLTESAAIACVKLCKASTYINWEDNSVIFLLVQSMVVDLKNLLFNPSKPFSRGSQPADVDLMIDCLVSCFRISPHNNQHFKICLAQNSPSTFHYVLVNSLHRIITNSALDWWPKIDAVYCHSVELRNMFGETLHKAVQGCGAHPAIRMAPSLTFKEKVTSLKFKEKPTDLETRSYKYLLLSMVKLIHADPKLLLCNPRKQGPETQGSTAELITGLVQLVPQSHMPEIAQEAMEALLVLHQLDSIDLWNPDAPVETFWEISSQMLFYICKKLTSHQMLSSTEILKWLREILICRNKFLLKNKQADRSSCHFLLFYGVGCDIPSSGNTSQMSMDHEELLRTPGASLRKGKGNSSMDSAAGCSGTPPICRQAQTKLEVALYMFLWNPDTEAVLVAMSCFRHLCEEADIRCGVDEVSVHNLLPNYNTFMEFASVSNMMSTGRAALQKRVMALLRRIEHPTAGNTEAWEDTHAKWEQATKLILNYPKAKMEDGQAAESLHKTIVKRRMSHVSGGGSIDLSDTDSLQEWINMTGFLCALGGVCLQQRSNSGLATYSPPMGPVSERKGSMISVMSSEGNADTPVSKFMDRLLSLMVCNHEKVGLQIRTNVKDLVGLELSPALYPMLFNKLKNTISKFFDSQGQVLLTDTNTQFVEQTIAIMKNLLDNHTEGSSEHLGQASIETMMLNLVRYVRVLGNMVHAIQIKTKLCQLVEVMMARRDDLSFCQEMKFRNKMVEYLTDWVMGTSNQAADDDVKCLTRDLDQASMEAVVSLLAGLPLQPEEGDGVELMEAKSQLFLKYFTLFMNLLNDCSEVEDESAQTGGRKRGMSRRLASLRHCTVLAMSNLLNANVDSGLMHSIGLGYHKDLQTRATFMEVLTKILQQGTEFDTLAETVLADRFERLVELVTMMGDQGELPIAMALANVVPCSQWDELARVLVTLFDSRHLLYQLLWNMFSKEVELADSMQTLFRGNSLASKIMTFCFKVYGATYLQKLLDPLLRIVITSSDWQHVSFEVDPTRLEPSESLEENQRNLLQMTEKFFHAIISSSSEFPPQLRSVCHCLYQVVSQRFPQNSIGAVGSAMFLRFINPAIVSPYEAGILDKKPPPRIERGLKLMSKILQSIANHVLFTKEEHMRPFNDFVKSNFDAARRFFLDIASDCPTSDAVNHSLSFISDGNVLALHRLLWNNQEKIGQYLSSNRDHKAVGRRPFDKMATLLAYLGPPEHKPVADTHWSSLNLTSSKFEEFMTRHQVHEKEEFKALKTLSIFYQAGTSKAGNPIFYYVARRFKTGQINGDLLIYHVLLTLKPYYAKPYEIVVDLTHTGPSNRFKTDFLSKWFVVFPGFAYDNVSAVYIYNCNSWVREYTKYHERLLTGLKGSKRLVFIDCPGKLAEHIEHEQQKLPAATLALEEDLKVFHNALKLAHKDTKVSIKVGSTAVQVTSAERTKVLGQSVFLNDIYYASEIEEICLVDENQFTLTIANQGTPLTFMHQECEAIVQSIIHIRTRWELSQPDSIPQHTKIRPKDVPGTLLNIALLNLGSSDPSLRSAAYNLLCALTCTFNLKIEGQLLETSGLCIPANNTLFIVSISKTLAANEPHLTLEFLEECISGFSKSSIELKHLCLEYMTPWLSNLVRFCKHNDDAKRQRVTAILDKLITMTINEKQMYPSIQAKIWGSLGQITDLLDVVLDSFIKTSATGGLGSIKAEVMADTAVALASGNVKLVSSKVIGRMCKIIDKTCLSPTPTLEQHLMWDDIAILARYMLMLSFNNSLDVAAHLPYLFHVVTFLVATGPLSLRASTHGLVINIIHSLCTCSQLHFSEETKQVLRLSLTEFSLPKFYLLFGISKVKSAAVIAFRSSYRDRSFSPGSYERETFALTSLETVTEALLEIMEACMRDIPTCKWLDQWTELAQRFAFQYNPSLQPRALVVFGCISKRVSHGQIKQIIRILSKALESCLKGPDTYNSQVLIEATVIALTKLQPLLNKDSPLHKALFWVAVAVLQLDEVNLYSAGTALLEQNLHTLDSLRIFNDKSPEEVFMAIRNPLEWHCKQMDHFVGLNFNSNFNFALVGHLLKGYRHPSPAIVARTVRILHTLLTLVNKHRNCDKFEVNTQSVAYLAALLTVSEEVRSRCSLKHRKSLLLTDISMENVPMDTYPIHHGDPSYRTLKETQPWSSPKGSEGYLAATYPTVGQTSPRARKSMSLDMGQPSQANTKKLLGTRKSFDHLISDTKAPKRQEMESGITTPPKMRRVAETDYEMETQRISSSQQHPHLRKVSVSESNVLLDEEVLTDPKIQALLLTVLATLVKYTTDEFDQRILYEYLAEASVVFPKVFPVVHNLLDSKINTLLSLCQDPNLLNPIHGIVQSVVYHEESPPQYQTSYLQSFGFNGLWRFAGPFSKQTQIPDYAELIVKFLDALIDTYLPGIDEETSEESLLTPTSPYPPALQSQLSITANLNLSNSMTSLATSQHSPGIDKENVELSPTTGHCNSGRTRHGSASQVQKQRSAGSFKRNSIKKIV

SEQ ID NO: 56381 - protein, 2839 aa, Homo sapiens
  Payload ID: 11072
  Gene Symbol: NF1
  Gene Name: neurofibromin 1
  Uniprot ID: P21359
  ENSP ID: ENSP00000351015
MAAHRPVEWVQAVVSRFDEQLPIKTGQQNTHTKVSTEHNKECLINISKYKFSLVISGLTTILKNVNNMRIFGEAAEKNLYLSQLIILDTLEKCLAGQPKDTMRLDETMLVKQLLPEICHFLHTCREGNQHAAELRNSASGVLFSLSCNNFNAVFSRISTRLQELTVCSEDNVDVHDIELLQYINVDCAKLKRLLKETAFKFKALKKVAQLAVINSLEKAFWNWVENYPDEFTKLYQIPQTDMAECAEKLFDLVDGFAESTKRKAAVWPLQIILLILCPEIIQDISKDVVDENNMNKKLFLDSLRKALAGHGGSRQLTESAAIACVKLCKASTYINWEDNSVIFLLVQSMVVDLKNLLFNPSKPFSRGSQPADVDLMIDCLVSCFRISPHNNQHFKICLAQNSPSTFHYVLVNSLHRIITNSALDWWPKIDAVYCHSVELRNMFGETLHKAVQGCGAHPAIRMAPSLTFKEKVTSLKFKEKPTDLETRSYKYLLLSMVKLIHADPKLLLCNPRKQGPETQGSTAELITGLVQLVPQSHMPEIAQEAMEALLVLHQLDSIDLWNPDAPVETFWEISSQMLFYICKKLTSHQMLSSTEILKWLREILICRNKFLLKNKQADRSSCHFLLFYGVGCDIPSSGNTSQMSMDHEELLRTPGASLRKGKGNSSMDSAAGCSGTPPICRQAQTKLEVALYMFLWNPDTEAVLVAMSCFRHLCEEADIRCGVDEVSVHNLLPNYNTFMEFASVSNMMSTGRAALQKRVMALLRRIEHPTAGNTEAWEDTHAKWEQATKLILNYPKAKMEDGQAAESLHKTIVKRRMSHVSGGGSIDLSDTDSLQEWINMTGFLCALGGVCLQQRSNSGLATYSPPMGPVSERKGSMISVMSSEGNADTPVSKFMDRLLSLMVCNHEKVGLQIRTNVKDLVGLELSPALYPMLFNKLKNTISKFFDSQGQVLLTDTNTQFVEQTIAIMKNLLDNHTEGSSEHLGQASIETMMLNLVRYVRVLGNMVHAIQIKTKLCQLVEVMMARRDDLSFCQEMKFRNKMVEYLTDWVMGTSNQAADDDVKCLTRDLDQASMEAVVSLLAGLPLQPEEGDGVELMEAKSQLFLKYFTLFMNLLNDCSEVEDESAQTGGRKRGMSRRLASLRHCTVLAMSNLLNANVDSGLMHSIGLGYHKDLQTRATFMEVLTKILQQGTEFDTLAETVLADRFERLVELVTMMGDQGELPIAMALANVVPCSQWDELARVLVTLFDSRHLLYQLLWNMFSKEVELADSMQTLFRGNSLASKIMTFCFKVYGATYLQKLLDPLLRIVITSSDWQHVSFEVDPTRLEPSESLEENQRNLLQMTEKFFHAIISSSSEFPPQLRSVCHCLYQATCHSLLNKATVKEKKENKKSVVSQRFPQNSIGAVGSAMFLRFINPAIVSPYEAGILDKKPPPRIERGLKLMSKILQSIANHVLFTKEEHMRPFNDFVKSNFDAARRFFLDIASDCPTSDAVNHSLSFISDGNVLALHRLLWNNQEKIGQYLSSNRDHKAVGRRPFDKMATLLAYLGPPEHKPVADTHWSSLNLTSSKFEEFMTRHQVHEKEEFKALKTLSIFYQAGTSKAGNPIFYYVARRFKTGQINGDLLIYHVLLTLKPYYAKPYEIVVDLTHTGPSNRFKTDFLSKWFVVFPGFAYDNVSAVYIYNCNSWVREYTKYHERLLTGLKGSKRLVFIDCPGKLAEHIEHEQQKLPAATLALEEDLKVFHNALKLAHKDTKVSIKVGSTAVQVTSAERTKVLGQSVFLNDIYYASEIEEICLVDENQFTLTIANQGTPLTFMHQECEAIVQSIIHIRTRWELSQPDSIPQHTKIRPKDVPGTLLNIALLNLGSSDPSLRSAAYNLLCALTCTFNLKIEGQLLETSGLCIPANNTLFIVSISKTLAANEPHLTLEFLEECISGFSKSSIELKHLCLEYMTPWLSNLVRFCKHNDDAKRQRVTAILDKLITMTINEKQMYPSIQAKIWGSLGQITDLLDVVLDSFIKTSATGGLGSIKAEVMADTAVALASGNVKLVSSKVIGRMCKIIDKTCLSPTPTLEQHLMWDDIAILARYMLMLSFNNSLDVAAHLPYLFHVVTFLVATGPLSLRASTHGLVINIIHSLCTCSQLHFSEETKQVLRLSLTEFSLPKFYLLFGISKVKSAAVIAFRSSYRDRSFSPGSYERETFALTSLETVTEALLEIMEACMRDIPTCKWLDQWTELAQRFAFQYNPSLQPRALVVFGCISKRVSHGQIKQIIRILSKALESCLKGPDTYNSQVLIEATVIALTKLQPLLNKDSPLHKALFWVAVAVLQLDEVNLYSAGTALLEQNLHTLDSLRIFNDKSPEEVFMAIRNPLEWHCKQMDHFVGLNFNSNFNFALVGHLLKGYRHPSPAIVARTVRILHTLLTLVNKHRNCDKFEVNTQSVAYLAALLTVSEEVRSRCSLKHRKSLLLTDISMENVPMDTYPIHHGDPSYRTLKETQPWSSPKGSEGYLAATYPTVGQTSPRARKSMSLDMGQPSQANTKKLLGTRKSFDHLISDTKAPKRQEMESGITTPPKMRRVAETDYEMETQRISSSQQHPHLRKVSVSESNVLLDEEVLTDPKIQALLLTVLATLVKYTTDEFDQRILYEYLAEASVVFPKVFPVVHNLLDSKINTLLSLCQDPNLLNPIHGIVQSVVYHEESPPQYQTSYLQSFGFNGLWRFAGPFSKQTQIPDYAELIVKFLDALIDTYLPGIDEETSEESLLTPTSPYPPALQSQLSITANLNLSNSMTSLATSQHSPGIDKENVELSPTTGHCNSGRTRHGSASQVQKQRSAGSFKRNSIKKIV

SEQ ID NO: 56382 - protein, 2502 aa, Homo sapiens
  Payload ID: 11072
  Gene Symbol: NF1
  Gene Name: neurofibromin 1
  ENSP ID: ENSP00000389907
NWEDNSVIFLLVQSMVVDLKNLLFNPSKPFSRGSQPADVDLMIDCLVSCFRISPHNNQHFKICLAQNSPSTFHYVLVNSLHRIITNSALDWWPKIDAVYCHSVELRNMFGETLHKAVQGCGAHPAIRMAPSLTFKEKVTSLKFKEKPTDLETRSYKYLLLSMVKLIHADPKLLLCNPRKQGPETQGSTAELITGLVQLVPQSHMPEIAQEAMEALLVLHQLDSIDLWNPDAPVETFWEISSQMLFYICKKLTSHQMLSSTEILKWLREILICRNKFLLKNKQADRSSCHFLLFYGVGCDIPSSGNTSQMSMDHEELLRTPGASLRKGKGNSSMDSAAGCSGTPPICRQAQTKLEVALYMFLWNPDTEAVLVAMSCFRHLCEEADIRCGVDEVSVHNLLPNYNTFMEFASVSNMMSTGRAALQKRVMALLRRIEHPTAGNTEAWEDTHAKWEQATKLILNYPKAKMEDGQAAESLHKTIVKRRMSHVSGGGSIDLSDTDSLQEWINMTGFLCALGGVCLQQRSNSGLATYSPPMGPVSERKGSMISVMSSEGNADTPVSKFMDRLLSLMVCNHEKVGLQIRTNVKDLVGLELSPALYPMLFNKLKNTISKFFDSQGQVLLTDTNTQFVEQTIAIMKNLLDNHTEGSSEHLGQASIETMMLNLVRYVRVLGNMVHAIQIKTKLCQLVEVMMARRDDLSFCQEMKFRNKMVEYLTDWVMGTSNQAADDDVKCLTRDLDQASMEAVVSLLAGLPLQPEEGDGVELMEAKSQLFLKYFTLFMNLLNDCSEVEDESAQTGGRKRGMSRRLASLRHCTVLAMSNLLNANVDSGLMHSIGLGYHKDLQTRATFMEVLTKILQQGTEFDTLAETVLADRFERLVELVTMMGDQGELPIAMALANVVPCSQWDELARVLVTLFDSRHLLYQLLWNMFSKEVELADSMQTLFRGNSLASKIMTFCFKVYGATYLQKLLDPLLRIVITSSDWQHVSFEVDPTRLEPSESLEENQRNLLQMTEKFFHAIISSSSEFPPQLRSVCHCLYQVVSQRFPQNSIGAVGSAMFLRFINPAIVSPYEAGILDKKPPPRIERGLKLMSKILQSIANHVLFTKEEHMRPFNDFVKSNFDAARRFFLDIASDCPTSDAVNHSLSFISDGNVLALHRLLWNNQEKIGQYLSSNRDHKAVGRRPFDKMATLLAYLGPPEHKPVADTHWSSLNLTSSKFEEFMTRHQVHEKEEFKALKTLSIFYQAGTSKAGNPIFYYVARRFKTGQINGDLLIYHVLLTLKPYYAKPYEIVVDLTHTGPSNRFKTDFLSKWFVVFPGFAYDNVSAVYIYNCNSWVREYTKYHERLLTGLKGSKRLVFIDCPGKLAEHIEHEQQKLPAATLALEEDLKVFHNALKLAHKDTKVSIKVGSTAVQVTSAERTKVLGQSVFLNDIYYASEIEEICLVDENQFTLTIANQGTPLTFMHQECEAIVQSIIHIRTRWELSQPDSIPQHTKIRPKDVPGTLLNIALLNLGSSDPSLRSAAYNLLCALTCTFNLKIEGQLLETSGLCIPANNTLFIVSISKTLAANEPHLTLEFLEECISGFSKSSIELKHLCLEYMTPWLSNLVRFCKHNDDAKRQRVTAILDKLITMTINEKQMYPSIQAKIWGSLGQITDLLDVVLDSFIKTSATGGLGSIKAEVMADTAVALASGNVKLVSSKVIGRMCKIIDKTCLSPTPTLEQHLMWDDIAILARYMLMLSFNNSLDVAAHLPYLFHVVTFLVATGPLSLRASTHGLVINIIHSLCTCSQLHFSEETKQVLRLSLTEFSLPKFYLLFGISKVKSAAVIAFRSSYRDRSFSPGSYERETFALTSLETVTEALLEIMEACMRDIPTCKWLDQWTELAQRFAFQYNPSLQPRALVVFGCISKRVSHGQIKQIIRILSKALESCLKGPDTYNSQVLIEATVIALTKLQPLLNKDSPLHKALFWVAVAVLQLDEVNLYSAGTALLEQNLHTLDSLRIFNDKSPEEVFMAIRNPLEWHCKQMDHFVGLNFNSNFNFALVGHLLKGYRHPSPAIVARTVRILHTLLTLVNKHRNCDKFEVNTQSVAYLAALLTVSEEVRSRCSLKHRKSLLLTDISMENVPMDTYPIHHGDPSYRTLKETQPWSSPKGSEGYLAATYPTVGQTSPRARKSMSLDMGQPSQANTKKLLGTRKSFDHLISDTKAPKRQEMESGITTPPKMRRVAETDYEMETQRISSSQQHPHLRKVSVSESNVLLDEEVLTDPKIQALLLTVLATLVKYTTDEFDQRILYEYLAEASVVFPKVFPVVHNLLDSKINTLLSLCQDPNLLNPIHGIVQSVVYHEESPPQYQTSYLQSFGFNGLWRFAGPFSKQTQIPDYAELIVKFLDALIDTYLPGIDEETSEESLLTPTSPYPPALQSQLSITANLNLSNSMTSLATSQHSPASLPCSKSAVFMQLFPHQGIDKENVELSPTTGHCNSGRTRHGSASQVQKQRSAGSFKRNSIKKIV

SEQ ID NO: 56383 - protein, 593 aa, Homo sapiens
  Payload ID: 11072
  Gene Symbol: NF1
  Gene Name: neurofibromin 1
  Uniprot ID: P21359
  ENSP ID: ENSP00000412921
MAAHRPVEWVQAVVSRFDEQLPIKTGQQNTHTKVSTEHNKECLINISKYKFSLVISGLTTILKNVNNMRIFGEAAEKNLYLSQLIILDTLEKCLAGQPKDTMRLDETMLVKQLLPEICHFLHTCREGNQHAAELRNSASGVLFSLSCNNFNAVFSRISTRLQELTVCSEDNVDVHDIELLQYINVDCAKLKRLLKETAFKFKALKKVAQLAVINSLEKAFWNWVENYPDEFTKLYQIPQTDMAECAEKLFDLVDGFAESTKRKAAVWPLQIILLILCPEIIQDISKDVVDENNMNKKLFLDSLRKALAGHGGSRQLTESAAIACVKLCKASTYINWEDNSVIFLLVQSMVVDLKNLLFNPSKPFSRGSQPADVDLMIDCLVSCFRISPHNNQHFKICLAQNSPSTFHYVLVNSLHRIITNSALDWWPKIDAVYCHSVELRNMFGETLHKAVQGCGAHPAIRMAPSLTFKEKVTSLKFKEKPTDLETRSYKYLLLSMVKLIHADPKLLLCNPRKQGPETQGSTAELITGLVQLVPQSHMPEIAQEAMEALLVLHQLDSIDLWNPDAPVETFWEIRYMYFYFLNSTFKFYFVFLS

SEQ ID NO: 56384 - protein, 206 aa, Homo sapiens
  Payload ID: 11072
  Gene Symbol: NF1
  Gene Name: neurofibromin 1
  ENSP ID: ENSP00000462157
  MOD_RES (1)..(1): Any amino acid
XRATFMEVLTKILQQGTEFDTLAETVLADRFERLVELVTMMGDQGELPIAMALANVVPCSQWDELARVLVTLFDSRHLLYQLLWNMFSKEVELADSMQTLFRGNSLASKIMTFCFKVYGATYLQKLLDPLLRIVITSSDWQHVSFEVDPTRLEPSESLEENQRNLLQMTEKFFHAIISSSSEFPPQLRSVCHCLYQVPKNSHPSMV

SEQ ID NO: 56385 - protein, 1656 aa, Homo sapiens
  Payload ID: 11072
  Gene Symbol: NF1
  Gene Name: neurofibromin 1
  ENSP ID: ENSP00000462408
SLPLPSPQPPLPALFPAQGAGPPFPPPPPGRGEDMAAHRPVEWVQAVVSRFDEQLPIKTGQQNTHTKVSTEHNKECLINISKYKFSLVISGLTTILKNVNNMRIFGEAAEKNLYLSQLIILDTLEKCLAGQPKDTMRLDETMLVKQLLPEICHFLHTCREGNQHAAELRNSASGVLFSLSCNNFNAVFSRISTRLQELTVCSEDNVDVHDIELLQYINVDCAKLKRLLKETAFKFKALKKVAQLAVINSLEKAFWNWVENYPDEFTKLYQIPQTDMAECAEKLFDLVDGFAESTKRKAAVWPLQIILLILCPEIIQDISKDVVDENNMNKKLFLDSLRKALAGHGGSRQLTESAAIACVKLCKASTYINWEDNSVIFLLVQSMVVDLKNLLFNPSKPFSRGSQPADVDLMIDCLVSCFRISPHNNQHFKICLAQNSPSTFHYVLVNSLHRIITNSALDWWPKIDAVYCHSVELRNMFGETLHKAVQGCGAHPAIRMAPSLTFKEKVTSLKFKEKPTDLETRSYKYLLLSMVKLIHADPKLLLCNPRKQGPETQGSTAELITGLVQLVPQSHMPEIAQEAMEALLVLHQLDSIDLWNPDAPVETFWEISSQMLFYICKKLTSHQMLSSTEILKWLREILICRNKFLLKNKQADRSSCHFLLFYGVGCDIPSSGNTSQMSMDHEELLRTPGASLRKGKGNSSMDSAAGCSGTPPICRQAQTKLEVALYMFLWNPDTEAVLVAMSCFRHLCEEADIRCGVDEVSVHNLLPNYNTFMEFASVSNMMSTGRAALQKRVMALLRRIEHPTAGNTEAWEDTHAKWEQATKLILNYPKAKMEDGQAAESLHKTIVKRRMSHVSGGGSIDLSDTDSLQEWINMTGFLCALGGVCLQQRSNSGLATYSPPMGPVSERKGSMISVMSSEGNADTPVSKFMDRLLSLMVCNHEKVGLQIRTNVKDLVGLELSPALYPMLFNKLKNTISKFFDSQGQVLLTDTNTQFVEQTIAIMKNLLDNHTEGSSEHLGQASIETMMLNLVRYVRVLGNMVHAIQIKTKLCQLVEVMMARRDDLSFCQEMKFRNKMVEYLTDWVMGTSNQAADDDVKCLTRDLDQASMEAVVSLLAGLPLQPEEGDGVELMEAKSQLFLKYFTLFMNLLNDCSEVEDESAQTGGRKRGMSRRLASLRHCTVLAMSNLLNANVDSGLMHSIGLGYHKDLQTRATFMEVLTKILQQGTEFDTLAETVLADRFERLVELVTMMGDQGELPIAMALANVVPCSQWDELARVLVTLFDSRHLLYQLLWNMFSKEVELADSMQTLFRGNSLASKIMTFCFKVYGATYLQKLLDPLLRIVITSSDWQHVSFEVDPTRLEPSESLEENQRNLLQMTEKFFHAIISSSSEFPPQLRSVCHCLYQVVSQRFPQNSIGAVGSAMFLRFINPAIVSPYEAGILDKKPPPRIERGLKLMSKILQSIANHVLFTKEEHMRPFNDFVKSNFDAARRFFLDIASDCPTSDAVNHSLSFISDGNVLALHRLLWNNQEKIGQYLSSNRDHKAVGRRPFDKMATLLAYLGPPEHKPVADTHWSSLNLTSSKFEEFMTRHQVHEKEEFKALKTLSIFYQAGTSKAGNPIFYYVARRIYYPNIVKGITKHLPRNSYPTLISGFSFPLL

SEQ ID NO: 56386 - protein, 206 aa, Homo sapiens
  Payload ID: 11072
  Gene Symbol: NF1
  Gene Name: neurofibromin 1
  ENSP ID: ENSP00000462700
  MOD_RES (1)..(1): Any amino acid
XGMHERYSNVQVAGPVDRTSSKDSPLHKALFWVAVAVLQLDEVNLYSAGTALLEQNLHTLDSLRIFNDKSPEEVFMAIRNPLEWHCKQMDHFVGLNFNSNFNFALVGHLLKGYRHPSPAIVARTVRILHTLLTLVNKHRNCDKFEVNTQSVAYLAALLTVSEEVRSRCSLKHRKSLLLTDISMENVPMDTYPIHHGDPSYRNKEKF

SEQ ID NO: 56387 - protein, 124 aa, Homo sapiens
  Payload ID: 11072
  Gene Symbol: NF1
  Gene Name: neurofibromin 1
  ENSP ID: ENSP00000463682
  MOD_RES (1)..(1): Any amino acid
XECLINISKYKFSLVISGLTTILKNVNNMRIFGEAAEKNLYLSQLIILDTLEKCLAGQPKDTMRLDETMLVKQLLPEICHFLHTCREGNQHAAELRNSASGVLFSLSCNNFNAVFSRISTRNSI

SEQ ID NO: 56388 - protein, 227 aa, Homo sapiens
  Payload ID: 11072
  Gene Symbol: NF1
  Gene Name: neurofibromin 1
  ENSP ID: ENSP00000463819
  MOD_RES (1)..(1): Any amino acid
XRATFMEVLTKILQQGTEFDTLAETVLADRFERLVELVTMMGDQGELPIAMALANVVPCSQWDELARVLVTLFDSRHLLYQLLWNMFSKEVELADSMQTLFRGNSLASKIMTFCFKVYGATYLQKLLDPLLRIVITSSDWQHVSFEVDPTRLEPSESLEENQRNLLQMTEKFFHAIISSSSEFPPQLRSVCHCLYQATCHSLLNKATVKEKKENKKSVPKNSHPSMV

SEQ ID NO: 56389 - protein, 640 aa, Homo sapiens
  Payload ID: 11072
  Gene Symbol: NF1
  Gene Name: neurofibromin 1
  ENSP ID: ENSP00000464678
  MOD_RES (1)..(1): Any amino acid
XGMHERYSNVQVAGPVDRTSSKFCGSFNCRFAFQYNPSLQPRALVVFGCISKRVSHGQIKQIIRILSKALESCLKGPDTYNSQVLIEATVIALTKLQPLLNKDSPLHKALFWVAVAVLQLDEVNLYSAGTALLEQNLHTLDSLRIFNDKSPEEVFMAIRNPLEWHCKQMDHFVGLNFNSNFNFALVGHLLKGYRHPSPAIVARTVRILHTLLTLVNKHRNCDKFEVNTQSVAYLAALLTVSEEVRSRCSLKHRKSLLLTDISMENVPMDTYPIHHGDPSYRTLKETQPWSSPKGSEGYLAATYPTVGQTSPRARKSMSLDMGQPSQANTKKLLGTRKSFDHLISDTKAPKRQEMESGITTPPKMRRVAETDYEMETQRISSSQQHPHLRKVSVSESNVLLDEEVLTDPKIQALLLTVLATLVKYTTDEFDQRILYEYLAEASVVFPKVFPVVHNLLDSKINTLLSLCQDPNLLNPIHGIVQSVVYHEESPPQYQTSYLQSFGFNGLWRFAGPFSKQTQIPDYAELIVKFLDALIDTYLPGIDEETSEESLLTPTSPYPPALQSQLSITANLNLSNSMTSLATSQHSPGIDKENVELSPTTGHCNSGRTRHGSASQVQKQRSAGSFKLALLNLLTAHQNSL

SEQ ID NO: 56390 - protein, 115 aa, Homo sapiens
  Payload ID: 11072
  Gene Symbol: NF1
  Gene Name: neurofibromin 1
  ENSP ID: ENSP00000464702
  MOD_RES (1)..(1): Any amino acid
XIHGIVQSVVYHEESPPQYQTSYLQSFGFNGLWRFAGPFSKQTQIPDYAELIVKFLDALIDTYLPGIDEETSEESLLTPTSPYPPALQSQLSITANLNLSNSMTSLATSQHSPGQ

SEQ ID NO: 56391 - protein, 13 aa, Homo sapiens
  Payload ID: 11072
  Gene Symbol: NF1
  Gene Name: neurofibromin 1
  ENSP ID: ENSP00000465138
  MOD_RES (1)..(1): Any amino acid
XLLNLLTAHQNSL

SEQ ID NO: 56392 - protein, 81 aa, Homo sapiens
  Payload ID: 11072
  Gene Symbol: NF1
  Gene Name: neurofibromin 1
  ENSP ID: ENSP00000467080
  MOD_RES (1)..(1): Any amino acid
XCTFNLKIEGQLLETSGLCIPANNTLFIVSISKTLAANEPHLTLEFLEECISGFSKSRLFFLRLYKNIFAKCLFSRPDSRY

SEQ ID NO: 56393 - protein, 117 aa, Homo sapiens
  Payload ID: 11072
  Gene Symbol: NF1
  Gene Name: neurofibromin 1
  ENSP ID: ENSP00000467284
MRIFGEAAEKNLYLSQLIILDTLEKCLAGQPKDTMRLDETMLVKQLLPEICHFLHTCREGNQHAAELRNSASGVLFSLSCNNFNAVFSRISTRLQELTVCSEDNVDVHDIELLQYIN

SEQ ID NO: 56394 - protein, 507 aa, Homo sapiens
  Payload ID: 11073
  Gene Symbol: NF2
  Gene Name: neurofibromin 2 (merlin)
  Uniprot ID: P35240
  ENSP ID: ENSP00000335652
MAGAIASRMSFSSLKRKQPKTFTVRIVTMDAEMEFNCEVKKQILDEKIYCPPEASVLLASYAVQAKYGDYDPSVHKRGFLAQEELLPKRVINLYQMTPEMWEERITAWYAEHRGRARDEAEMEYLKIAQDLEMYGVNYFAIRNKKGTELLLGVDALGLHIYDPENRLTPKISFPWNEIRNISYSDKEFTIKPLDKKIDVFKFNSSKLRVNKLILQLCIGNHDLFMRRRKADSLEVQQMKAQAREEKARKQMERQRLAREKQMREEAERTRDELERRLLQMKEEATMANEALMRSEETADLLAEKAQITEEEAKLLAQKAAEAEQEMQRIKATAIRTEEEKRLMEQKVLEAEVLALKMAEESERRAKEADQLKQDLQEAREAERRAKQKLLEIATKPTYPPMNPIPAPLPPDIPSFNLIGDSLSFDFKDTDMKRLSMEIEKEKVEYMEKSKHLQEQLNELKTEIEALKLKERETALDILHNENSDRGGSSKHNTIKKPQAQGRRPICI

SEQ ID NO: 56395 - protein, 507 aa, Homo sapiens; identical to SEQ ID NO: 56394
  Payload ID: 11073
  Gene Symbol: NF2
  Gene Name: neurofibromin 2 (merlin)
  Uniprot ID: P35240
  ENSP ID: ENSP00000340626

SEQ ID NO: 56396 - protein, 595 aa, Homo sapiens
  Payload ID: 11073
  Gene Symbol: NF2
  Gene Name: neurofibromin 2 (merlin)
  Uniprot ID: P35240
  ENSP ID: ENSP00000344666
MAGAIASRMSFSSLKRKQPKTFTVRIVTMDAEMEFNCEMKWKGKDLFDLVCRTLGLRETWFFGLQYTIKDTVAWLKMDKKVLDHDVSKEEPVTFHFLAKFYPENAEEELVQEITQHLFFLQVKKQILDEKIYCPPEASVLLASYAVQAKYGDYDPSVHKRGFLAQEELLPKRVINLYQMTPEMWEERITAWYAEHRGRARDEAEMEYLKIAQDLEMYGVNYFAIRNKKGTELLLGVDALGLHIYDPENRLTPKISFPWNEIRNISYSDKEFTIKPLDKKIDVFKFNSSKLRVNKLILQLCIGNHDLFMRRRKADSLEVQQMKAQAREEKARKQMERQRLAREKQMREEAERTRDELERRLLQMKEEATMANEALMRSEETADLLAEKAQITEEEAKLLAQKAAEAEQEMQRIKATAIRTEEEKRLMEQKVLEAEVLALKMAEESERRAKEADQLKQDLQEAREAERRAKQKLLEIATKPTYPPMNPIPAPLPPDIPSFNLIGDSLSFDFKDTDMKRLSMEIEKEKVEYMEKSKHLQEQLNELKTEIEALKLKERETALDILHNENSDRGGSSKHNTIKKLTLQSAKSRVAFFEEL

SEQ ID NO: 56397 - protein, 590 aa, Homo sapiens
  Payload ID: 11073
  Gene Symbol: NF2
  Gene Name: neurofibromin 2 (merlin)
  Uniprot ID: P35240
  ENSP ID: ENSP00000354529
MAGAIASRMSFSSLKRKQPKTFTVRIVTMDAEMEFNCEMKWKGKDLFDLVCRTLGLRETWFFGLQYTIKDTVAWLKMDKKVLDHDVSKEEPVTFHFLAKFYPENAEEELVQEITQHLFFLQVKKQILDEKIYCPPEASVLLASYAVQAKYGDYDPSVHKRGFLAQEELLPKRVINLYQMTPEMWEERITAWYAEHRGRARDEAEMEYLKIAQDLEMYGVNYFAIRNKKGTELLLGVDALGLHIYDPENRLTPKISFPWNEIRNISYSDKEFTIKPLDKKIDVFKFNSSKLRVNKLILQLCIGNHDLFMRRRKADSLEVQQMKAQAREEKARKQMERQRLAREKQMREEAERTRDELERRLLQMKEEATMANEALMRSEETADLLAEKAQITEEEAKLLAQKAAEAEQEMQRIKATAIRTEEEKRLMEQKVLEAEVLALKMAEESERRAKEADQLKQDLQEAREAERRAKQKLLEIATKPTYPPMNPIPAPLPPDIPSFNLIGDSLSFDFKDTDMKRLSMEIEKEKVEYMEKSKHLQEQLNELKTEIEALKLKERETALDILHNENSDRGGSSKHNTIKKPQAQGRRPICI

SEQ ID NO: 56398 - protein, 549 aa, Homo sapiens
  Payload ID: 11073
  Gene Symbol: NF2
  Gene Name: neurofibromin 2 (merlin)
  Uniprot ID: P35240
  ENSP ID: ENSP00000354897
MAGAIASRMSFSSLKRKQPKTFTVRIVTMDAEMEFNCEMKWKGKDLFDLVCRTLGLRETWFFGLQYTIKDTVAWLKMDKKVKKQILDEKIYCPPEASVLLASYAVQAKYGDYDPSVHKRGFLAQEELLPKRVINLYQMTPEMWEERITAWYAEHRGRARDEAEMEYLKIAQDLEMYGVNYFAIRNKKGTELLLGVDALGLHIYDPENRLTPKISFPWNEIRNISYSDKEFTIKPLDKKIDVFKFNSSKLRVNKLILQLCIGNHDLFMRRRKADSLEVQQMKAQAREEKARKQMERQRLAREKQMREEAERTRDELERRLLQMKEEATMANEALMRSEETADLLAEKAQITEEEAKLLAQKAAEAEQEMQRIKATAIRTEEEKRLMEQKVLEAEVLALKMAEESERRAKEADQLKQDLQEAREAERRAKQKLLEIATKPTYPPMNPIPAPLPPDIPSFNLIGDSLSFDFKDTDMKRLSMEIEKEKVEYMEKSKHLQEQLNELKTEIEALKLKERETALDILHNENSDRGGSSKHNTIKKPQAQGRRPICI

SEQ ID NO: 56399 - protein, 548 aa, Homo sapiens
  Payload ID: 11073
  Gene Symbol: NF2
  Gene Name: neurofibromin 2 (merlin)
  Uniprot ID: P35240
  ENSP ID: ENSP00000355183
MAGAIASRMSFSSLKRKQPKTFTVRIVTMDAEMEFNCEVLDHDVSKEEPVTFHFLAKFYPENAEEELVQEITQHLFFLQVKKQILDEKIYCPPEASVLLASYAVQAKYGDYDPSVHKRGFLAQEELLPKRVINLYQMTPEMWEERITAWYAEHRGRARDEAEMEYLKIAQDLEMYGVNYFAIRNKKGTELLLGVDALGLHIYDPENRLTPKISFPWNEIRNISYSDKEFTIKPLDKKIDVFKFNSSKLRVNKLILQLCIGNHDLFMRRRKADSLEVQQMKAQAREEKARKQMERQRLAREKQMREEAERTRDELERRLLQMKEEATMANEALMRSEETADLLAEKAQITEEEAKLLAQKAAEAEQEMQRIKATAIRTEEEKRLMEQKVLEAEVLALKMAEESERRAKEADQLKQDLQEAREAERRAKQKLLEIATKPTYPPMNPIPAPLPPDIPSFNLIGDSLSFDFKDTDMKRLSMEIEKEKVEYMEKSKHLQEQLNELKTEIEALKLKERETALDILHNENSDRGGSSKHNTIKKPQAQGRRPICI

SEQ ID NO: 56400 - protein, 590 aa, Homo sapiens; identical to SEQ ID NO: 56397
  Payload ID: 11073
  Gene Symbol: NF2
  Gene Name: neurofibromin 2 (merlin)
  Uniprot ID: P35240
  ENSP ID: ENSP00000380891

SEQ ID NO: 56401 - protein, 561 aa, Homo sapiens
  Payload ID: 11073
  Gene Symbol: NF2
  Gene Name: neurofibromin 2 (merlin)
  Uniprot ID: P35240
  ENSP ID: ENSP00000384029
MAGAIASRMSFSSLKRKQPKTFTVRIVTMDAEMEFNCEMKWKGKDLFDLVCRTLGLRETWFFGLQYTIKDTVAWLKMDKKVLDHDVSKEEPVTFHFLAKFYPENAEEELVQEITQHLFFLQVKKQILDEKIYCPPEASVLLASYAVQAKYGDYDPSVHKRGFLAQEELLPKRVINLYQMTPEMWEERITAWYAEHRGRARDEAEMEYLKIAQDLEMYGVNYFAIRNKKGTELLLGVDALGLHIYDPENRLTPKISFPWNEIRNISYSDKEFTIKPLDKKIDVFKFNSSKLRVNKLILQLCIGNHDLFMRRRKADSLEVQQMKAQAREEKARKQMKEEATMANEALMRSEETADLLAEKAQITEEEAKLLAQKAAEAEQEMQRIKATAIRTEEEKRLMEQKVLEAEVLALKMAEESERRAKEADQLKQDLQEAREAERRAKQKLLEIATKPTYPPMNPIPAPLPPDIPSFNLIGDSLSFDFKDTDMKRLSMEIEKEKVEYMEKSKHLQEQLNELKTEIEALKLKERETALDILHNENSDRGGSSKHNTIKKPQAQGRRPICI

SEQ ID NO: 56402 - protein, 590 aa, Homo sapiens; identical to SEQ ID NO: 56397
  Payload ID: 11073
  Gene Symbol: NF2
  Gene Name: neurofibromin 2 (merlin)
  Uniprot ID: P35240
  ENSP ID: ENSP00000384797

SEQ ID NO: 56403 - protein, 220 aa, Homo sapiens
  Payload ID: 11073
  Gene Symbol: NF2
  Gene Name: neurofibromin 2 (merlin)
  Uniprot ID: P35240
  ENSP ID: ENSP00000395885
MAGAIASRMSFSSLKRKQPKTFTVRIVTMDAEMEFNCEVKKQILDEKIYCPPEASVLLASYAVQAKNKKGTELLLGVDALGLHIYDPENRLTPKISFPWNEIRNISYSDKEFTIKPLDKKIDVFKFNSSKLRVNKLILQLCIGNHDLFMRRRKADSLEVQQMKAQAREEKARKQGQRGRSAEAGPAGSTRGGAKSQAEAPGDCHQAHVPAHEPNSSTVAS

SEQ ID NO: 56404 - protein, 165 aa, Homo sapiens
  Payload ID: 11073
  Gene Symbol: NF2
  Gene Name: neurofibromin 2 (merlin)
  Uniprot ID: P35240
  ENSP ID: ENSP00000409921
MAGAIASRMSFSSLKRKQPKTFTVRIVTMDAEMEFNCEMKWKGKDLFDLVCRTLGLRETWFFGLQYTIKDTVAWLKMDKKVLDHDVSKEEPVTFHFLAKFYPENAEEELVQEITQHLFFLQVKKQILDEKIYCPPEASVLLASYAVQAKLTLQSAKSRVAFFEEL

SEQ ID NO: 56405 - protein, 1020 aa, Homo sapiens
  Payload ID: 11074
  Gene Symbol: NEFH
  Gene Name: neurofilament, heavy polypeptide
  Uniprot ID: P12036
  ENSP ID: ENSP00000311997
MMSFGGADALLGAPFAPLHGGGSLHYALARKGGAGGTRSAAGSSSGFHSWTRTSVSSVSASPSRFRGAGAASSTDSLDTLSNGPEGCMVAVATSRSEKEQLQALNDRFAGYIDKVRQLEAHNRSLEGEAAALRQQQAGRSAMGELYEREVREMRGAVLRLGAARGQLRLEQEHLLEDIAHVRQRLDDEARQREEAEAAARALARFAQEAEAARVDLQKKAQALQEECGYLRRHHQEEVGELLGQIQGSGAAQAQMQAETRDALKCDVTSALREIRAQLEGHAVQSTLQSEEWFRVRLDRLSEAAKVNTDAMRSAQEEITEYRRQLQARTTELEALKSTKDSLERQRSELEDRHQADIASYQEAIQQLDAELRNTKWEMAAQLREYQDLLNVKMALDIEIAAYRKLLEGEECRIGFGPIPFSLPEGLPKIPSVSTHIKVKSEEKIKVVEKSEKETVIVEEQTEETQVTEEVTEEEEKEAKEEEGKEEEGGEEEEAEGGEEETKSPPAEEAASPEKEAKSPVKEEAKSPAEAKSPEKEEAKSPAEVKSPEKAKSPAKEEAKSPPEAKSPEKEEAKSPAEVKSPEKAKSPAKEEAKSPAEAKSPEKAKSPVKEEAKSPAEAKSPVKEEAKSPAEVKSPEKAKSPTKEEAKSPEKAKSPEKEEAKSPEKAKSPVKAEAKSPEKAKSPVKAEAKSPEKAKSPVKEEAKSPEKAKSPVKEEAKSPEKAKSPVKEEAKTPEKAKSPVKEEAKSPEKAKSPEKAKTLDVKSPEAKTPAKEEARSPADKFPEKAKSPVKEEVKSPEKAKSPLKEDAKAPEKEIPKKEEVKSPVKEEEKPQEVKVKEPPKKAEEEKAPATPKTEEKKDSKKEEAPKKEAPKPKVEEKKEPAVEKPKESKVEAKKEEAEDKKKVPTPEKEAPAKVEVKEDAKPKEKTEVAKKEPDDAKAKEPSKPAEKKEAAPEKKDTKEEKAKKPEEKPKTEAKAKEDDKTLSKEPSKPKAEKAEKSSSTDQKDSKPPEKATEDKAAKGK

SEQ ID NO: 56406 - protein, 543 aa, Homo sapiens
  Payload ID: 11075
  Gene Symbol: NEFL
  Gene Name: neurofilament, light polypeptide
  Uniprot ID: P07196
  ENSP ID: ENSP00000482169
MSSFSYEPYYSTSYKRRYVETPRVHISSVRSGYSTARSAYSSYSAPVSSSLSVRRSYSSSSGSLMPSLENLDLSQVAAISNDLKSIRTQEKAQLQDLNDRFASFIERVHELEQQNKVLEAELLVLRQKHSEPSRFRALYEQEIRDLRLAAEDATNEKQALQGEREGLEETLRNLQARYEEEVLSREDAEGRLMEARKGADEAALARAELEKRIDSLMDEISFLKKVHEEEIAELQAQIQYAQISVEMDVTKPDLSAALKDIRAQYEKLAAKNMQNAEEWFKSRFTVLTESAAKNTDAVRAAKDEVSESRRLLKAKTLEIEACRGMNEALEKQLQELEDKQNADISAMQDTINKLENELRTTKSEMARYLKEYQDLLNVKMALDIEIAAYRKLLEGEETRLSFTSVGSITSGYSQSSQVFGRSAYGGLQTSSYLMSTRSFPSYYTSHVQEEQIEVEETIEAAKAEEAKDEPPSEGEAEEEEKDKEEAEEEEAAEEEEAAKEESEEAKEEEEGGEGEEGEETKEAEEEEKKVEGAGEEQAAKKKD

SEQ ID NO: 56407 - protein, 284 aa, Homo sapiens
  Payload ID: 11075
  Gene Symbol: NEFL
  Gene Name: neurofilament, light polypeptide
  ENSP ID: ENSP00000483690
MSSFSYEPYYSTSYKRRYVETPRVHISSVRSGYSTARSAYSSYSAPVSSSLSVRRSYSSSSGSLMPSLENLDLSQVAAISNDLKSIRTQEKAQLQDLNDRFASFIERVHELEQQNKVLEAELLVLRQKHSEPSRFRALYEQEIRDLRLAAEDATNEKQALQGEREGLEETLRNLQARYEEEVLSREDAEGRLMEARKAAKNTDAVRAAKDEVSESRRLLKAKTLEIEACRGMNEALEKQLQELEDKQNADISAMQDTINKLENELRTTKSEMARYLKEYQDLLT

SEQ ID NO: 56408 - protein, 916 aa, Homo sapiens
  Payload ID: 11076
  Gene Symbol: NEFM
  Gene Name: neurofilament, medium polypeptide
  Uniprot ID: P07197
  ENSP ID: ENSP00000221166
MSYTLDSLGNPSAYRRVTETRSSFSRVSGSPSSGFRSQSWSRGSPSTVSSSYKRSMLAPRLAYSSAMLSSAESSLDFSQSSSLLNGGSGPGGDYKLSRSNEKEQLQGLNDRFAGYIEKVHYLEQQNKEIEAEIQALRQKQASHAQLGDAYDQEIRELRATLEMVNHEKAQVQLDSDHLEEDIHRLKERFEEEARLRDDTEAAIRALRKDIEEASLVKVELDKKVQSLQDEVAFLRSNHEEEVADLLAQIQASHITVERKDYLKTDISTALKEIRSQLESHSDQNMHQAEEWFKCRYAKLTEAAEQNKEAIRSAKEEIAEYRRQLQSKSIELESVRGTKESLERQLSDIEERHNHDLSSYQDTIQQLENELRGTKWEMARHLREYQDLLNVKMALDIEIAAYRKLLEGEETRFSTFAGSITGPLYTHRPPITISSKIQKPKVEAPKLKVQHKFVEEIIEETKVEDEKSEMEEALTAITEELAVSMKEEKKEAAEEKEEEPEAEEEEVAAKKSPVKATAPEVKEEEGEKEEEEGQEEEEEEDEGAKSDQAEEGGSEKEGSSEKEEGEQEEGETEAEAEGEEAEAKEEKKVEEKSEEVATKEELVADAKVEKPEKAKSPVPKSPVEEKGKSPVPKSPVEEKGKSPVPKSPVEEKGKSPVPKSPVEEKGKSPVSKSPVEEKAKSPVPKSPVEEAKSKAEVGKGEQKEEEEKEVKEAPKEEKVEKKEEKPKDVPEKKKAESPVKEEAVAEVVTITKSVKVHLEKETKEEGKPLQQEKEKEKAGGEGGSEEEGSDKGAKGSRKEDIAVNGEVEGKEEVEQETKEKGSGREEEKGVVTNGLDLSPADEKKGGDKSEEKVVVTKTVEKITSEGGDGATKYITKSVTVTQKVEEHEETFEEKLVSTKKVEKVTSHAIVKEVTQSD

SEQ ID NO: 56409 - protein, 877 aa, Homo sapiens
  Payload ID: 11076
  Gene Symbol: NEFM
  Gene Name: neurofilament, medium polypeptide
  ENSP ID: ENSP00000410137
MSYTLDSLGNPSAYRRVTETRSSFSRVSGSPSSGFRSQSWSRGSPSTVSSSYKRSMLAPRLAYSSAMLSSAESSLDFSQSSSLLNGGSGPGGDYKLSRSNEKEQLQGLNDRFAGYIEKVHYLEQQNKEIEAEIQALRQKQASHAQLGDAYDQEIRELRATLEMVNHEKAQVQLDSDHLEEDIHRLKERFEEEARLRDDTEAAIRALRKDIEEASLVKVELDKKVQSLQDEVAFLRSNHEEEVADLLAQIQASHITVERKDYLKTDISTALKEIRSQLESHSDQNMHQAEEWFKCRYAKLTEAAEQNKEAIRSAKEEIAEYRRQLQSKSIELESVRGTKESLERQLSDIEERHNHDLSSYQDTIQQLENELRGTKWEMARHLREYQDLLNVKMALDIEIAAYRKLLEGEETRFSTFAGSITGPLYTHRPPITISSKIQKPKVEAPKLKVQHKFVEEIIEETKVEDEKSEMEEALTAITEELAVSMKEEKKEAAEEKEEEPEAEEEEVAAKKSPVKATAPEVKEEEGEKEEEEGQEEEEEEDEGAKSDQAEEGGSEKEGSSEKEEGEQEEGETEAEAEGEEAEAKEEKKVEEKSEEVATKEELVADAKVEKPEKAKSPVPKSPVEEKGKSPVSKSPVEEKAKSPVPKSPVEEAKSKAEVGKGEQKEEEEKEVKEAPKEEKVEKKEEKPKDVPEKKKAESPVKEEAVAEVVTITKSVKVHLEKETKEEGKPLQQEKEKEKAGGEGGSEEEGSDKGAKGSRKEDIAVNGEVEGKEEVEQETKEKGSGREEEKGVVTNGLDLSPADEKKGGDKSEEKVVVTKTVEKITSEGGDGATKYITKSVTVTQKVEEHEETFEEKLVSTKKVEKVTSHAIVKEVTQSD

SEQ ID NO: 56410 - protein, 540 aa, Homo sapiens
  Payload ID: 11076
  Gene Symbol: NEFM
  Gene Name: neurofilament, medium polypeptide
  Uniprot ID: P07197
  ENSP ID: ENSP00000412295
MARHLREYQDLLNVKMALDIEIAAYRKLLEGEETRFSTFAGSITGPLYTHRPPITISSKIQKPKVEAPKLKVQHKFVEEIIEETKVEDEKSEMEEALTAITEELAVSMKEEKKEAAEEKEEEPEAEEEEVAAKKSPVKATAPEVKEEEGEKEEEEGQEEEEEEDEGAKSDQAEEGGSEKEGSSEKEEGEQEEGETEAEAEGEEAEAKEEKKVEEKSEEVATKEELVADAKVEKPEKAKSPVPKSPVEEKGKSPVPKSPVEEKGKSPVPKSPVEEKGKSPVPKSPVEEKGKSPVSKSPVEEKAKSPVPKSPVEEAKSKAEVGKGEQKEEEEKEVKEAPKEEKVEKKEEKPKDVPEKKKAESPVKEEAVAEVVTITKSVKVHLEKETKEEGKPLQQEKEKEKAGGEGGSEEEGSDKGAKGSRKEDIAVNGEVEGKEEVEQETKEKGSGREEEKGVVTNGLDLSPADEKKGGDKSEEKVVVTKTVEKITSEGGDGATKYITKSVTVTQKVEEHEETFEEKLVSTKKVEKVTSHAIVKEVTQSD

SEQ ID NO: 56411 - protein, 698 aa, Homo sapiens
  Payload ID: 11076
  Gene Symbol: NEFM
  Gene Name: neurofilament, medium polypeptide
  ENSP ID: ENSP00000427872
MSYTLDSLGNPSAYRRVTETRSSFSRVSGSPSSGFRSQSWSRGSPSTVSSSYKRSMLAPRLAYSSAMLSSAESSLDFSQSSSLLNGGSGPGGDYKLSRSNEKEQLQGLNDRFAGYIEKVHYLEQQNKEIEAEIQALRQKQASHAQLGDAYDQEIRELRATLEMVNHEKAQVQLDSDHLEEDIHRLKERFEEEARLRDDTEAAIRALRKDIEEASLVKVELDKKVQSLQDEVAFLRSNHEEEVADLLAQIQASHITVERKDYLKTDISTALKEIRSQLESHSDQNMHQAEEWFKCRYAKLTEAAEQNKEAIRSAKEEIAEYRRQLQSKSIELESVRGTKESLERQLSDIEERHNHDLSSYQDTIQQLENELRGTKWEMARHLREYQDLLNVKMALDIEIAAYRKLLEGEETRFSTFAGSITGPLYTHRPPITISSKIQKPKVEAPKLKVQHKFVEEIIEETKVEDEKSEMEEALTAITEELAVSMKEEKKEAAEEKEEEPEAEEEEVAAKKSPVKATAPEVKEEEGEKEEEEGQEEEEEEDEGAKSDQAEEGGSEKEGSSEKEEGEQEEGETEAEAEGEEAEAKEEKKVEGKEEVEQETKEKGSGREEEKGVVTNGLDLSPADEKKGGDKSEEKVVVTKTVEKITSEGGDGATKYITKSVTVTQKVEEHEETFEEKLVSTKKVEKVTSHAIVKEVTQSD

SEQ ID NO: 56412 - protein, 237 aa, Homo sapiens
  Payload ID: 11077
  Gene Symbol: NEUROG1
  Gene Name: neurogenin 1
  Uniprot ID: Q92886
  ENSP ID: ENSP00000317580
MPARLETCISDLDCASSSGSDLSGFLTDEEDCARLQQAASASGPPAPARRGAPNISRASEVPGAQDDEQERRRRRGRTRVRSEALLHSLRRSRRVKANDRERNRMHNLNAALDALRSVLPSFPDDTKLTKIETLRFAYNYIWALAETLRLADQGLPGGGARERLLPPQCVPCLPGPPSPASDAESWGSGAAAASPLSDPSSPAASEDFTYRPGDPVFSFPSLPKDLLHTTPCFIPYH

SEQ ID NO: 56413 - protein, 272 aa, Homo sapiens
  Payload ID: 11078
  Gene Symbol: NEUROG2
  Gene Name: neurogenin 2
  Uniprot ID: Q9H2A3
  ENSP ID: ENSP00000317333
MFVKSETLELKEEEDVLVLLGSASPALAALTPLSSSADEEEEEEPGASGGARRQRGAEAGQGARGGVAAGAEGCRPARLLGLVHDCKRRPSRARAVSRGAKTAETVQRIKKTRRLKANNRERNRMHNLNAALDALREVLPTFPEDAKLTKIETLRFAHNYIWALTETLRLADHCGGGGGGLPGALFSEAVLLSPGGASAALSSSGDSPSPASTWSCTNSPAPSSSVSSNSTSPYSCTLSPASPAGSDMDYWQPPPPDKHRYAPHLPIARDCI

SEQ ID NO: 56414 - protein, 214 aa, Homo sapiens
  Payload ID: 11079
  Gene Symbol: NEUROG3
  Gene Name: neurogenin 3
  Uniprot ID: Q9Y4Z2
  ENSP ID: ENSP00000242462
MTPQPSGAPTVQVTRETERSFPRASEDEVTCPTSAPPSPTRTRGNCAEAEEGGCRGAPRKLRARRGGRSRPKSELALSKQRRSRRKKANDRERNRMHNLNSALDALRGVLPTFPDDAKLTKIETLRFAHNYIWALTQTLRIADHSLYALEPPAPHCGELGSPGGSPGDWGSLYSPVSQAGSLSPAASLEERPGLLGATFSACLSPGSLAFSDFL

SEQ ID NO: 56415 - protein, 151 aa, Homo sapiens
  Payload ID: 11080
  Gene Symbol: NGB
  Gene Name: neuroglobin
  Uniprot ID: Q9NPG2
  ENSP ID: ENSP00000298352
MERPEPELIRQSWRAVSRSPLEHGTVLFARLFALEPDLLPLFQYNCRQFSSPEDCLSSPEFLDHIRKVMLVIDAAVTNVEDLSSLEEYLASLGRKHRAVGVKLSSFSTVGESLLYMLEKCLGPAFTPATRAAWSQLYGAVVQAMSRGWDGE

SEQ ID NO: 56416 - protein, 78 aa, Homo sapiens
  Payload ID: 11081
  Gene Symbol: NRGN
  Gene Name: neurogranin (protein kinase C substrate, RC3)
  Uniprot ID: Q92686
  ENSP ID: ENSP00000284292
MDCCTENACSKPDDDILDIPLDDPGANAAAAKIQASFRGHMARKKIKSGERGRKGPGPGGPGGAGVARGGAGGGPSGD

SEQ ID NO: 56417 - protein, 78 aa, Homo sapiens; identical to SEQ ID NO: 56416
  Payload ID: 11081
  Gene Symbol: NRGN
  Gene Name: neurogranin (protein kinase C substrate, RC3)
  Uniprot ID: Q92686
  ENSP ID: ENSP00000399591

SEQ ID NO: 56418 - protein, 311 aa, Homo sapiens
  Payload ID: 11082
  Gene Symbol: NGDN
  Gene Name: neuroguidin, EIF4E binding protein
  Uniprot ID: Q8NEJ9
  ENSP ID: ENSP00000380340
MAALGVLESDLPSAVTLLKNLQEQVMAVTAQVKSLTQKVQAGAYPTEKGLSFLEVKDQLLLMYLMDLTHLILDKASGGSLQGHDAVLRLVEIRTVLEKLRPLDQKLKYQIDKLIKTAVTGSLSENDPLRFKPHPSNMMSKLSSEDEEEDEAEDDQSEASGKKSVKGVSKKYVPPRLVPVHYDETEAEREKKRLERAKRRALSSSVIRELKEQYSDAPEEIRDARHPHVTRQSQEDQHRINYEESMMVRLSVSKREKGRRKRANVMSSQLHSLTHFSDISALTGGTVHLDEDQNPIKKRKKIPQKGRKKKGQ

SEQ ID NO: 56419 - protein, 315 aa, Homo sapiens
  Payload ID: 11082
  Gene Symbol: NGDN
  Gene Name: neuroguidin, EIF4E binding protein
  Uniprot ID: Q8NEJ9
  ENSP ID: ENSP00000386134
MAALGVLESDLPSAVTLLKNLQEQVMAVTAQVKSLTQKVQAGAYPTEKGLSFLEVKDQLLLMYLMDLTHLILDKASGGSLQGHDAVLRLVEIRTVLEKLRPLDQKLKYQIDKLIKTAVTGSLSENDPLRFKPHPSNMMSKLSSEDEEEDEAEDDQSEASGKKSVKGVSKKYVPPRLVPVHYDETEAEREKKRLERAKRRALSSSVIRELKEQYSDAPEEIRDARHPHVTRQSQEDQHRINYEESMMVRLSVSKREKGRRKRANVMSSQLHSLTHFSDISALTGGTVHLDEDQNPIKKRKKIPQKGRKKKGFRRRR

SEQ ID NO: 56420 - protein, 263 aa, Homo sapiens
  Payload ID: 11082
  Gene Symbol: NGDN
  Gene Name: neuroguidin, EIF4E binding protein
  ENSP ID: ENSP00000450659
  MOD_RES (1)..(1): Any amino acid
XESDLPSAVTLLKNLQEQVMAVTAQVKSLTQKVQAGAYPTEKGLSFLEVKDQLLLMYLMDLTHLILDKASGGSLQGHDAVLRLVEIRTLSSEDEEEDEAEDDQSEASGKKSVKGVSKKYVPPRLVPVHYDETEAEREKKRLERAKRRALSSSVIRELKEQYSDAPEEIRDARHPHVTRQSQEDQHRINYEESMMVRLSVSKREKGRRKRANVMSSQLHSLTHFSDISALTGGTVHLDEDQNPIKKRKKIPQKGRKKKGFRRRR

SEQ ID NO: 56421 - protein, 141 aa, Homo sapiens
  Payload ID: 11082
  Gene Symbol: NGDN
  Gene Name: neuroguidin, EIF4E binding protein
  ENSP ID: ENSP00000451779
MAVTAQVKSLTQKVQAGAYPTEKGLSFLEVKDQLLLMYLMDLTHLILDKASGGSLQGHDAVLRLVEIRTVLEKLRPLDQKLKYQIDKLIKTAVTGSLSENDPLRFKPHPSNMMSKLSSEDEEEDEAEDDQSEASGKKSVKG

SEQ ID NO: 56422 - protein, 74 aa, Homo sapiens
  Payload ID: 11082
  Gene Symbol: NGDN
  Gene Name: neuroguidin, EIF4E binding protein
  ENSP ID: ENSP00000451942
ESMMVRLSVSKREKGRRKRANVMSSQLHSLTHFSDISALTGGTVHLDEDQNPIKKRKKIPQKGRKKKALECLCY

SEQ ID NO: 56423 - protein, 823 aa, Homo sapiens
  Payload ID: 11083
  Gene Symbol: NLGN1
  Gene Name: neuroligin 1
  Uniprot ID: Q8N2Q7
  ENSP ID: ENSP00000354541
MALPRCTWPNYVWRAVMACLVHRGLGAPLTLCMLGCLLQAGHVLSQKLDDVDPLVATNFGKIRGIKKELNNEILGPVIQFLGVPYAAPPTGERRFQPPEPPSPWSDIRNATQFAPVCPQNIIDGRLPEVMLPVWFTNNLDVVSSYVQDQSEDCLYLNIYVPTEDDIRDSGGPKPVMVYIHGGSYMEGTGNLYDGSVLASYGNVIVITVNYRLGVLGFLSTGDQAAKGNYGLLDLIQALRWTSENIGFFGGDPLRITVFGSGAGGSCVNLLTLSHYSEGNRWSNSTKGLFQRAIAQSGTALSSWAVSFQPAKYARMLATKVGCNVSDTVELVECLQKKPYKELVDQDIQPARYHIAFGPVIDGDVIPDDPQILMEQGEFLNYDIMLGVNQGEGLKFVENIVDSDDGISASDFDFAVSNFVDNLYGYPEGKDVLRETIKFMYTDWADRHNPETRRKTLLALFTDHQWVAPAVATADLHSNFGSPTYFYAFYHHCQTDQVPAWADAAHGDEVPYVLGIPMIGPTELFPCNFSKNDVMLSAVVMTYWTNFAKTGDPNQPVPQDTKFIHTKPNRFEEVAWTRYSQKDQLYLHIGLKPRVKEHYRANKVNLWLELVPHLHNLNDISQYTSTTTKVPSTDITFRPTRKNSVPVTSAFPTAKQDDPKQQPSPFSVDQRDYSTELSVTIAVGASLLFLNILAFAALYYKKDKRRHDVHRRCSPQRTTTNDLTHAQEEEIMSLQMKHTDLDHECESIHPHEVVLRTACPPDYTLAMRRSPDDVPLMTPNTITMIPNTIPGIQPLHTFNTFTGGQNNTLPHPHPHPHSHSTTRV

SEQ ID NO: 56424 - protein, 608 aa, Homo sapiens
  Payload ID: 11083
  Gene Symbol: NLGN1
  Gene Name: neuroligin 1
  ENSP ID: ENSP00000385750
GFLSTGDQAAKGNYGLLDLIQALRWTSENIGFFGGDPLRITVFGSGAGGSCVNLLTLSHYSEGNRWSNSTKGLFQRAIAQSGTALSSWAVSFQPAKYARMLATKVGCNVSDTVELVECLQKKPYKELVDQDIQPARYHIAFGPVIDGDVIPDDPQILMEQGEFLNYDIMLGVNQGEGLKFVENIVDSDDGISASDFDFAVSNFVDNLYGYPEGKDVLRETIKFMYTDWADRHNPETRRKTLLALFTDHQWVAPAVATADLHSNFGSPTYFYAFYHHCQTDQVPAWADAAHGDEVPYVLGIPMIGPTELFPCNFSKNDVMLSAVVMTYWTNFAKTGDPNQPVPQDTKFIHTKPNRFEEVAWTRYSQKDQLYLHIGLKPRVKEHYRANKVNLWLELVPHLHNLNDISQYTSTTTKVPSTDITFRPTRKNSVPVTSAFPTAKQDDPKQQPSPFSVDQRDYSTELSVTIAVGASLLFLNILAFAALYYKKDKRRHDVHRRCSPQRTTTNDLTHAQEEEIMSLQMKHTDLDHECESIHPHEVVLRTACPPDYTLAMRRSPDDVPLMTPNTITMIPNTIPGIQPLHTFNTFTGGQNNTLPHPHPHPHSHSTTRV

SEQ ID NO: 56425 - protein, 823 aa, Homo sapiens; identical to SEQ ID NO: 56423
  Payload ID: 11083
  Gene Symbol: NLGN1
  Gene Name: neuroligin 1
  Uniprot ID: Q8N2Q7
  ENSP ID: ENSP00000392500

SEQ ID NO: 56426 - protein, 10 aa, Homo sapiens
  Payload ID: 11083
  Gene Symbol: NLGN1
  Gene Name: neuroligin 1
  ENSP ID: ENSP00000401843
MALPRCTWPN

SEQ ID NO: 56427 - protein, 13 aa, Homo sapiens
  Payload ID: 11083
  Gene Symbol: NLGN1
  Gene Name: neuroligin 1
  ENSP ID: ENSP00000407255
MALPRCTWPNYVW

SEQ ID NO: 56428 - protein, 367 aa, Homo sapiens
  Payload ID: 11083
  Gene Symbol: NLGN1
  Gene Name: neuroligin 1
  ENSP ID: ENSP00000410374
MALPRCTWPNYVWRAVMACLVHRGLGAPLTLCMLGCLLQAGHVLSQKLDDVDPLVATNFGKIRGIKKELNNEILGPVIQFLGVPYAAPPTGERRFQPPEPPSPWSDIRNATQFAPVCPQNIIDGRLPEVMLPVWFTNNLDVVSSYVQDQSEDCLYLNIYVPTEDVKRISKECARKPGKKICRKGGPLTKKQTDDLGDNDGAEDEDIRDSGGPKPVMVYIHGGSYMEGTGNLYDGSVLASYGNVIVITVNYRLGVLGFLSTGDQAAKGNYGLLDLIQALRWTSENIGFFGGDPLRITVFGSGAGGSCVNLLTLSHYSEGNRWSNSTKGLFQRAIAQSGTALSSWAVSFQPAKYARMLATKVGCNVSDT

SEQ ID NO: 56429 - protein, 835 aa, Homo sapiens
  Payload ID: 11084
  Gene Symbol: NLGN2
  Gene Name: neuroligin 2
  Uniprot ID: Q8NFZ4
  ENSP ID: ENSP00000305288
MWLLALCLVGLAGAQRGGGGPGGGAPGGPGLGLGSLGEERFPVVNTAYGRVRGVRRELNNEILGPVVQFLGVPYATPPLGARRFQPPEAPASWPGVRNATTLPPACPQNLHGALPAIMLPVWFTDNLEAAATYVQNQSEDCLYLNLYVPTEDGPLTKKRDEATLNPPDTDIRDPGKKPVMLFLHGGSYMEGTGNMFDGSVLAAYGNVIVATLNYRLGVLGFLSTGDQAAKGNYGLLDQIQALRWLSENIAHFGGDPERITIFGSGAGASCVNLLILSHHSEGLFQKAIAQSGTAISSWSVNYQPLKYTRLLAAKVGCDREDSAEAVECLRRKPSRELVDQDVQPARYHIAFGPVVDGDVVPDDPEILMQQGEFLNYDMLIGVNQGEGLKFVEDSAESEDGVSASAFDFTVSNFVDNLYGYPEGKDVLRETIKFMYTDWADRDNGEMRRKTLLALFTDHQWVAPAVATAKLHADYQSPVYFYTFYHHCQAEGRPEWADAAHGDELPYVFGVPMVGATDLFPCNFSKNDVMLSAVVMTYWTNFAKTGDPNQPVPQDTKFIHTKPNRFEEVVWSKFNSKEKQYLHIGLKPRVRDNYRANKVAFWLELVPHLHNLHTELFTTTTRLPPYATRWPPRPPAGAPGTRRPPPPATLPPEPEPEPGPRAYDRFPGDSRDYSTELSVTVAVGASLLFLNILAFAALYYKRDRRQELRCRRLSPPGGSGSGVPGGGPLLPAAGRELPPEEELVSLQLKRGGGVGADPAEALRPACPPDYTLALRRAPDDVPLLAPGALTLLPSGLGPPPPPPPPSLHPFGPFPPPPPTATSHNNTLPHPHSTTRV

SEQ ID NO: 56430 - protein, 194 aa, Homo sapiens
  Payload ID: 11084
  Gene Symbol: NLGN2
  Gene Name: neuroligin 2
  ENSP ID: ENSP00000461092
  MOD_RES (1)..(1): Any amino acid
XAATYVQNQSEDCLYLNLYVPTEDDIRDPGKKPVMLFLHGGSYMEGTGNMFDGSVLAAYGNVIVATLNYRLGVLGFLSTGDQAAKGNYGLLDQIQALRWLSENIAHFGGDPERITIFGSGAGASCVNLLILSHHSEGLFQKAIAQSGTAISSWSVNYQPLKYTRLLAAKVGCDREDSAEAVECLRRKPSRELVD

SEQ ID NO: 56431 - protein, 835 aa, Homo sapiens; identical to SEQ ID NO: 56429
  Payload ID: 11084
  Gene Symbol: NLGN2
  Gene Name: neuroligin 2
  Uniprot ID: Q8NFZ4
  ENSP ID: ENSP00000461168

SEQ ID NO: 56432 - protein, 848 aa, Homo sapiens
  Payload ID: 11085
  Gene Symbol: NLGN3
  Gene Name: neuroligin 3
  Uniprot ID: Q9NZ94
  ENSP ID: ENSP00000351591
MWLRLGPPSLSLSPKPTVGRSLCLTLWFLSLALRASTQAPAPTVNTHFGKLRGARVPLPSEILGPVDQYLGVPYAAPPIGEKRFLPPEPPPSWSGIRNATHFPPVCPQNIHTAVPEVMLPVWFTANLDIVATYIQEPNEDCLYLNVYVPTEDVKRISKECARKPNKKICRKGGSGAKKQGEDLADNDGDEDEDIRDSGAKPVMVYIHGGSYMEGTGNMIDGSILASYGNVIVITLNYRVGVLGFLSTGDQAAKGNYGLLDQIQALRWVSENIAFFGGDPRRITVFGSGIGASCVSLLTLSHHSEGLFQRAIIQSGSALSSWAVNYQPVKYTSLLADKVGCNVLDTVDMVDCLRQKSAKELVEQDIQPARYHVAFGPVIDGDVIPDDPEILMEQGEFLNYDIMLGVNQGEGLKFVEGVVDPEDGVSGTDFDYSVSNFVDNLYGYPEGKDTLRETIKFMYTDWADRDNPETRRKTLVALFTDHQWVEPSVVTADLHARYGSPTYFYAFYHHCQSLMKPAWSDAAHGDEVPYVFGVPMVGPTDLFPCNFSKNDVMLSAVVMTYWTNFAKTGDPNKPVPQDTKFIHTKANRFEEVAWSKYNPRDQLYLHIGLKPRVRDHYRATKVAFWKHLVPHLYNLHDMFHYTSTTTKVPPPDTTHSSHITRRPNGKTWSTKRPAISPAYSNENAQGSWNGDQDAGPLLVENPRDYSTELSVTIAVGASLLFLNVLAFAALYYRKDKRRQEPLRQPSPQRGAGAPELGAAPEEELAALQLGPTHHECEAGPPHDTLRLTALPDYTLTLRRSPDDIPLMTPNTITMIPNSLVGLQTLHPYNTFAAGFNSTGLPHSHSTTRV

SEQ ID NO: 56433 - protein, 828 aa, Homo sapiens
  Payload ID: 11085
  Gene Symbol: NLGN3
  Gene Name: neuroligin 3
  Uniprot ID: Q9NZ94
  ENSP ID: ENSP00000363163
MWLRLGPPSLSLSPKPTVGRSLCLTLWFLSLALRASTQAPAPTVNTHFGKLRGARVPLPSEILGPVDQYLGVPYAAPPIGEKRFLPPEPPPSWSGIRNATHFPPVCPQNIHTAVPEVMLPVWFTANLDIVATYIQEPNEDCLYLNVYVPTEDGSGAKKQGEDLADNDGDEDEDIRDSGAKPVMVYIHGGSYMEGTGNMIDGSILASYGNVIVITLNYRVGVLGFLSTGDQAAKGNYGLLDQIQALRWVSENIAFFGGDPRRITVFGSGIGASCVSLLTLSHHSEGLFQRAIIQSGSALSSWAVNYQPVKYTSLLADKVGCNVLDTVDMVDCLRQKSAKELVEQDIQPARYHVAFGPVIDGDVIPDDPEILMEQGEFLNYDIMLGVNQGEGLKFVEGVVDPEDGVSGTDFDYSVSNFVDNLYGYPEGKDTLRETIKFMYTDWADRDNPETRRKTLVALFTDHQWVEPSVVTADLHARYGSPTYFYAFYHHCQSLMKPAWSDAAHGDEVPYVFGVPMVGPTDLFPCNFSKNDVMLSAVVMTYWTNFAKTGDPNKPVPQDTKFIHTKANRFEEVAWSKYNPRDQLYLHIGLKPRVRDHYRATKVAFWKHLVPHLYNLHDMFHYTSTTTKVPPPDTTHSSHITRRPNGKTWSTKRPAISPAYSNENAQGSWNGDQDAGPLLVENPRDYSTELSVTIAVGASLLFLNVLAFAALYYRKDKRRQEPLRQPSPQRGAGAPELGAAPEEELAALQLGPTHHECEAGPPHDTLRLTALPDYTLTLRRSPDDIPLMTPNTITMIPNSLVGLQTLHPYNTFAAGFNSTGLPHSHSTTRV

SEQ ID NO: 56434 - protein, 513 aa, Homo sapiens
  Payload ID: 11085
  Gene Symbol: NLGN3
  Gene Name: neuroligin 3
  ENSP ID: ENSP00000379196
MWLRLGPPSLSLSPKPTVGRSLCLTLWFLSLALRASTQAPAPTVNTHFGKLRGARVPLPSEILGPVDQYLGVPYAAPPIGEKRFLPPEPPPSWSGIRNATHFPPVCPQNIHTAVPEVMLPVWFTANLDIVATYIQEPNEDCLYLNVYVPTEDDIRDSGAKPVMVYIHGGSYMEGTGNMIDGSILASYGNVIVITLNYRVGVLGFLSTGDQAAKGNYGLLDQIQALRWVSENIAFFGGDPRRITVFGSGIGASCVSLLTLSHHSEGLFQRAIIQSGSALSSWAVNYQPVKYTSLLADKVGCNVLDTVDMVDCLRQKSAKELVEQDIQPARYHVAFGPVIDGDVIPDDPEILMEQGEFLNYDIMLGVNQGEGLKFVEGVVDPEDGVSGTDFDYSVSNFVDNLYGYPEGKDTLRETIKFMYTDWADRDNPETRRKTLVALFTDHQWVEPSVVTADLHARYGSPTYFYAFYHHCQSLMKPAWSDAAHGDEVPYVFGVPMVGPTDLFPCNFSKNDVML

SEQ ID NO: 56435 - protein, 808 aa, Homo sapiens
  Payload ID: 11085
  Gene Symbol: NLGN3
  Gene Name: neuroligin 3
  Uniprot ID: Q9NZ94
  ENSP ID: ENSP00000445298
MWLRLGPPSLSLSPKPTVGRSLCLTLWFLSLALRASTQAPAPTVNTHFGKLRGARVPLPSEILGPVDQYLGVPYAAPPIGEKRFLPPEPPPSWSGIRNATHFPPVCPQNIHTAVPEVMLPVWFTANLDIVATYIQEPNEDCLYLNVYVPTEDDIRDSGAKPVMVYIHGGSYMEGTGNMIDGSILASYGNVIVITLNYRVGVLGFLSTGDQAAKGNYGLLDQIQALRWVSENIAFFGGDPRRITVFGSGIGASCVSLLTLSHHSEGLFQRAIIQSGSALSSWAVNYQPVKYTSLLADKVGCNVLDTVDMVDCLRQKSAKELVEQDIQPARYHVAFGPVIDGDVIPDDPEILMEQGEFLNYDIMLGVNQGEGLKFVEGVVDPEDGVSGTDFDYSVSNFVDNLYGYPEGKDTLRETIKFMYTDWADRDNPETRRKTLVALFTDHQWVEPSVVTADLHARYGSPTYFYAFYHHCQSLMKPAWSDAAHGDEVPYVFGVPMVGPTDLFPCNFSKNDVMLSAVVMTYWTNFAKTGDPNKPVPQDTKFIHTKANRFEEVAWSKYNPRDQLYLHIGLKPRVRDHYRATKVAFWKHLVPHLYNLHDMFHYTSTTTKVPPPDTTHSSHITRRPNGKTWSTKRPAISPAYSNENAQGSWNGDQDAGPLLVENPRDYSTELSVTIAVGASLLFLNVLAFAALYYRKDKRRQEPLRQPSPQRGAGAPELGAAPEEELAALQLGPTHHECEAGPPHDTLRLTALPDYTLTLRRSPDDIPLMTPNTITMIPNSLVGLQTLHPYNTFAAGFNSTGLPHSHSTTRV

SEQ ID NO: 56436 - protein, 351 aa, Homo sapiens
  Payload ID: 11085
  Gene Symbol: NLGN3
  Gene Name: neuroligin 3
  ENSP ID: ENSP00000479877
MLPVWFTANLDIVATYIQEPNEDCLYLNVYVPTEDGSGAKKQGEDLADNDGDEDEDIRDSGAKPVMVYIHGGSYMEGTGNMIDGSILASYGNVIVITLNYRVGVLGFLSTGDQAAKGNYGLLDQIQALRWVSENIAFFGGDPRRITVFGSGIGASCVSLLTLSHHSEGLFQRAIIQSGSALSSWAVNYQPVKYTSLLADKVGCNVLDTVDMVDCLRQKSAKELVEQDIQPARYHVAFGPVIDGDVIPDDPEILMEQGEFLNYDIMLGVNQGEGLKFVEGVVDPEDGVSGTDFDYSVSILWTICMAILRVRTPCERPSSSCIQTGQTVTTLRPAVKHWWHSSLTTSGWSPQW

SEQ ID NO: 56437 - protein, 816 aa, Homo sapiens
  Payload ID: 11086
  Gene Symbol: NLGN4X
  Gene Name: neuroligin 4, X-linked
  Uniprot ID: Q8N0W4
  ENSP ID: ENSP00000275857
MSRPQGLLWLPLLFTPVCVMLNSNVLLWLTALAIKFTLIDSQAQYPVVNTNYGKIRGLRTPLPNEILGPVEQYLGVPYASPPTGERRFQPPEPPSSWTGIRNTTQFAAVCPQHLDERSLLHDMLPIWFTANLDTLMTYVQDQNEDCLYLNIYVPTEDDIHDQNSKKPVMVYIHGGSYMEGTGNMIDGSILASYGNVIVITINYRLGILGFLSTGDQAAKGNYGLLDQIQALRWIEENVGAFGGDPKRVTIFGSGAGASCVSLLTLSHYSEGLFQKAIIQSGTALSSWAVNYQPAKYTRILADKVGCNMLDTTDMVECLRNKNYKELIQQTITPATYHIAFGPVIDGDVIPDDPQILMEQGEFLNYDIMLGVNQGEGLKFVDGIVDNEDGVTPNDFDFSVSNFVDNLYGYPEGKDTLRETIKFMYTDWADKENPETRRKTLVALFTDHQWVAPAVATADLHAQYGSPTYFYAFYHHCQSEMKPSWADSAHGDEVPYVFGIPMIGPTELFSCNFSKNDVMLSAVVMTYWTNFAKTGDPNQPVPQDTKFIHTKPNRFEEVAWSKYNPKDQLYLHIGLKPRVRDHYRATKVAFWLELVPHLHNLNEIFQYVSTTTKVPPPDMTSFPYGTRRSPAKIWPTTKRPAITPANNPKHSKDPHKTGPEDTTVLIETKRDYSTELSVTIAVGASLLFLNILAFAALYYKKDKRRHETHRRPSPQRNTTNDIAHIQNEEIMSLQMKQLEHDHECESLQAHDTLRLTCPPDYTLTLRRSPDDIPLMTPNTITMIPNTLTGMQPLHTFNTFSGGQNSTNLPHGHSTTRV

SEQ ID NO: 56438 - protein, 816 aa, Homo sapiens; identical to SEQ ID NO: 56437
  Payload ID: 11086
  Gene Symbol: NLGN4X
  Gene Name: neuroligin 4, X-linked
  Uniprot ID: Q8N0W4
  ENSP ID: ENSP00000370482

SEQ ID NO: 56439 - protein, 816 aa, Homo sapiens; identical to SEQ ID NO: 56437
  Payload ID: 11086
  Gene Symbol: NLGN4X
  Gene Name: neuroligin 4, X-linked
  Uniprot ID: Q8N0W4
  ENSP ID: ENSP00000370483

SEQ ID NO: 56440 - protein, 816 aa, Homo sapiens; identical to SEQ ID NO: 56437
  Payload ID: 11086
  Gene Symbol: NLGN4X
  Gene Name: neuroligin 4, X-linked
  Uniprot ID: Q8N0W4
  ENSP ID: ENSP00000370485

SEQ ID NO: 56441 - protein, 817 aa, Homo sapiens
  Payload ID: 11086
  Gene Symbol: NLGN4X
  Gene Name: neuroligin 4, X-linked
  ENSP ID: ENSP00000439203
MLNSNVLLWLTALAIKFTLIDSQAQYPVVNTNYGKIRGLRTPLPNEILGPVEQYLGVPYASPPTGERRFQPPEPPSSWTGIRNTTQFAAVCPQHLDERSLLHDMLPIWFTANLDTLMTYVQDQNEDCLYLNIYVPTEDGANTKKNADDITSNDRGEDEDIHDQNSKKPVMVYIHGGSYMEGTGNMIDGSILASYGNVIVITINYRLGILGFLSTGDQAAKGNYGLLDQIQALRWIEENVGAFGGDPKRVTIFGSGAGASCVSLLTLSHYSEGLFQKAIIQSGTALSSWAVNYQPAKYTRILADKVGCNMLDTTDMVECLRNKNYKELIQQTITPATYHIAFGPVIDGDVIPDDPQILMEQGEFLNYDIMLGVNQGEGLKFVDGIVDNEDGVTPNDFDFSVSNFVDNLYGYPEGKDTLRETIKFMYTDWADKENPETRRKTLVALFTDHQWVAPAVATADLHAQYGSPTYFYAFYHHCQSEMKPSWADSAHGDEVPYVFGIPMIGPTELFSCNFSKNDVMLSAVVMTYWTNFAKTGDPNQPVPQDTKFIHTKPNRFEEVAWSKYNPKDQLYLHIGLKPRVRDHYRATKVAFWLELVPHLHNLNEIFQYVSTTTKVPPPDMTSFPYGTRRSPAKIWPTTKRPAITPANNPKHSKDPHKTGPEDTTVLIETKRDYSTELSVTIAVGASLLFLNILAFAALYYKKDKRRHETHRRPSPQRNTTNDIAHIQNEEIMSLQMKQLEHDHECESLQAHDTLRLTCPPDYTLTLRRSPDDIPLMTPNTITMIPNTLTGMQPLHTFNTFSGGQNSTNLPHGHSTTRV

SEQ ID NO: 56442 - protein, 256 aa, Homo sapiens
  Payload ID: 11087
  Gene Symbol: NLGN4Y
  Gene Name: neuroligin 4, Y-linked
  Uniprot ID: Q8NFZ3
  ENSP ID: ENSP00000297967
MLRPQGLLWLPLLFTSVCVMLNSNVLLWITALAIKFTLIDSQAQYPVVNTNYGKIQGLRTPLPSEILGPVEQYLGVPYASPPTGERRFQPPESPSSWTGIRNATQFSAVCPQHLDERFLLHDMLPIWFTTSLDTLMTYVQDQNEDCLYLNIYVPMEDGTNIKRNADDITSNDHGEDKDIHEQNSKKPVMVYIHGGSYMEGTGNMIDGSILASYGNVIVITINYRLGILGMQEARLCGSSKMFNYFKSPFTNLINFF

SEQ ID NO: 56443 - protein, 816 aa, Homo sapiens
  Payload ID: 11087
  Gene Symbol: NLGN4Y
  Gene Name: neuroligin 4, Y-linked
  Uniprot ID: Q8NFZ3
  ENSP ID: ENSP00000342535
MLRPQGLLWLPLLFTSVCVMLNSNVLLWITALAIKFTLIDSQAQYPVVNTNYGKIQGLRTPLPSEILGPVEQYLGVPYASPPTGERRFQPPESPSSWTGIRNATQFSAVCPQHLDERFLLHDMLPIWFTTSLDTLMTYVQDQNEDCLYLNIYVPMEDDIHEQNSKKPVMVYIHGGSYMEGTGNMIDGSILASYGNVIVITINYRLGILGFLSTGDQAAKGNYGLLDQIQALRWIEENVGAFGGDPKRVTIFGSGAGASCVSLLTLSHYSEGLFQKAIIQSGTALSSWAVNYQPAKYTRILADKVGCNMLDTTDMVECLKNKNYKELIQQTITPATYHIAFGPVIDGDVIPDDPQILMEQGEFLNYDIMLGVNQGEGLKFVDGIVDNEDGVTPNDFDFSVSNFVDNLYGYPEGKDTLRETIKFMYTDWADKENPETRRKTLVALFTDHQWVAPAVATADLHAQYGSPTYFYAFYHHCQSEMKPSWADSAHGDEVPYVFGIPMIGPTELFSCNFSKNDVMLSAVVMTYWTNFAKTGDPNQPVPQDTKFIHTKPNRFEEVAWSKYNPKDQLYLHIGLKPRVRDHYRATKVAFWLELVPHLHNLNEIFQYVSTTTKVPPPDMTSFPYGTRRSPAKIWPTTKRPAITPANNPKHSKDPHKTGPEDTTVLIETKRDYSTELSVTIAVGASLLFLNILAFAALYYKKDKRRHETHRHPSPQRNTTNDITHIQNEEIMSLQMKQLEHDHECESLQAHDTLRLTCPPDYTLTLRRSPDDIPFMTPNTITMIPNTLMGMQPLHTFKTFSGGQNSTNLPHGHSTTRV

SEQ ID NO: 56444 - protein, 816 aa, Homo sapiens; identical to SEQ ID NO: 56443
  Payload ID: 11087
  Gene Symbol: NLGN4Y
  Gene Name: neuroligin 4, Y-linked
  Uniprot ID: Q8NFZ3
  ENSP ID: ENSP00000348169

SEQ ID NO: 56445 - protein, 873 aa, Homo sapiens
  Payload ID: 11087
  Gene Symbol: NLGN4Y
  Gene Name: neuroligin 4, Y-linked
  ENSP ID: ENSP00000372320
MLRPQGLLWLPLLFTSVCVMLNSNVLLWITALAIKFTLIDSQAQYPVVNTNYGKIQGLRTPLPSEILGPVEQYLGVPYASPPTGERRFQPPESPSSWTGIRNATQFSAVCPQHLDERFLLHDMLPIWFTTSLDTLMTYVQDQNEDCLYLNIYVPMEDGTNIKRNADDITSNDHGEDKDIHEQNSKKPVMVYIHGGSYMEGTGNMIDGSILASYGNVIVITINYRLGILAQNTLAHGNCKHRCQLHLQAPRDCKSAYPFRNEDEIRGFLSTGDQAAKGNYGLLDQIQALRWIEENVGAFGGDPKRVTIFGSGAGASCVSLLTLSHYSEGLFQKAIIQSGTALSSWAVNYQPAKYTRILADKVGCNMLDTTDMVECLKNKNYKELIQQTITPATYHIAFGPVIDGDVIPDDPQILMEQGEFLNYDIMLGVNQGEGLKFVDGIVDNEDGVTPNDFDFSVSNFVDNLYGYPEGKDTLRETIKFMYTDWADKENPETRRKTLVALFTDHQWVAPAVATADLHAQYGSPTYFYAFYHHCQSEMKPSWADSAHGDEVPYVFGIPMIGPTELFSCNFSKNDVMLSAVVMTYWTNFAKTGDPNQPVPQDTKFIHTKPNRFEEVAWSKYNPKDQLYLHIGLKPRVRDHYRATKVAFWLELVPHLHNLNEIFQYVSTTTKVPPPDMTSFPYGTRRSPAKIWPTTKRPAITPANNPKHSKDPHKTGPEDTTVLIETKRDYSTELSVTIAVGASLLFLNILAFAALYYKKDKRRHETHRHPSPQRNTTNDITHIQNEEIMSLQMKQLEHDHECESLQAHDTLRLTCPPDYTLTLRRSPDDIPFMTPNTITMIPNTLMGMQPLHTFKTFSGGQNSTNLPHGHSTTRV

SEQ ID NO: 56446 - protein, 648 aa, Homo sapiens
  Payload ID: 11087
  Gene Symbol: NLGN4Y
  Gene Name: neuroligin 4, Y-linked
  Uniprot ID: Q8NFZ3
  ENSP ID: ENSP00000372325
MVYIHGGSYMEGTGNMIDGSILASYGNVIVITINYRLGILGFLSTGDQAAKGNYGLLDQIQALRWIEENVGAFGGDPKRVTIFGSGAGASCVSLLTLSHYSEGLFQKAIIQSGTALSSWAVNYQPAKYTRILADKVGCNMLDTTDMVECLKNKNYKELIQQTITPATYHIAFGPVIDGDVIPDDPQILMEQGEFLNYDIMLGVNQGEGLKFVDGIVDNEDGVTPNDFDFSVSNFVDNLYGYPEGKDTLRETIKFMYTDWADKENPETRRKTLVALFTDHQWVAPAVATADLHAQYGSPTYFYAFYHHCQSEMKPSWADSAHGDEVPYVFGIPMIGPTELFSCNFSKNDVMLSAVVMTYWTNFAKTGDPNQPVPQDTKFIHTKPNRFEEVAWSKYNPKDQLYLHIGLKPRVRDHYRATKVAFWLELVPHLHNLNEIFQYVSTTTKVPPPDMTSFPYGTRRSPAKIWPTTKRPAITPANNPKHSKDPHKTGPEDTTVLIETKRDYSTELSVTIAVGASLLFLNILAFAALYYKKDKRRHETHRHPSPQRNTTNDITHIQNEEIMSLQMKQLEHDHECESLQAHDTLRLTCPPDYTLTLRRSPDDIPFMTPNTITMIPNTLMGMQPLHTFKTFSGGQNSTNLPHGHSTTRV

SEQ ID NO: 56447 - protein, 236 aa, Homo sapiens
  Payload ID: 11087
  Gene Symbol: NLGN4Y
  Gene Name: neuroligin 4, Y-linked
  ENSP ID: ENSP00000412638
  MOD_RES (1)..(1): Any amino acid
XNSNVLLWITALAIKFTLIDSQAQYPVVNTNYGKIQGLRTPLPSEILGPVEQYLGVPYASPPTGERRFQPPESPSSWTGIRNATQFSAVCPQHLDERFLLHDMLPIWFTTSLDTLMTYVQDQNEDCLYLNIYVPMEDGTNIKRNADDITSNDHGEDKDIHEQNSKKPVMVYIHGGSYMEGTGNMIDGSILASYGNVIVITINYRLGILGMQEARLCGSSKMFNYFKSPFTNLINFF

SEQ ID NO: 56448 - protein, 704 aa, Homo sapiens
  Payload ID: 11088
  Gene Symbol: NLN
  Gene Name: neurolysin (metallopeptidase M3 family)
  Uniprot ID: Q9BYT8
  ENSP ID: ENSP00000370372
MIARCLLAVRSLRRVGGSRILLRMTLGREVMSPLQAMSSYTVAGRNVLRWDLSPEQIKTRTEELIVQTKQVYDAVGMLGIEEVTYENCLQALADVEVKYIVERTMLDFPQHVSSDKEVRAASTEADKRLSRFDIEMSMRGDIFERIVHLQETCDLGKIKPEARRYLEKSIKMGKRNGLHLPEQVQNEIKSMKKRMSELCIDFNKNLNEDDTFLVFSKAELGALPDDFIDSLEKTDDDKYKITLKYPHYFPVMKKCCIPETRRRMEMAFNTRCKEENTIILQQLLPLRTKVAKLLGYSTHADFVLEMNTAKSTSRVTAFLDDLSQKLKPLGEAEREFILNLKKKECKDRGFEYDGKINAWDLYYYMTQTEELKYSIDQEFLKEYFPIEVVTEGLLNTYQELLGLSFEQMTDAHVWNKSVTLYTVKDKATGEVLGQFYLDLYPREGKYNHAACFGLQPGCLLPDGSRMMAVAALVVNFSQPVAGRPSLLRHDEVRTYFHEFGHVMHQICAQTDFARFSGTNVETDFVEVPSQMLENWVWDVDSLRRLSKHYKDGSPIADDLLEKLVASRLVNTGLLTLRQIVLSKVDQSLHTNTSLDAASEYAKYCSEILGVAATPGTNMPATFGHLAGGYDGQYYGYLWSEVFSMDMFYSCFKKEGIMNPEVGMKYRNLILKPGGSLDGMDMLHNFLKREPNQKAFLMSRGLHAP

SEQ ID NO: 56449 - protein, 48 aa, Homo sapiens
  Payload ID: 11088
  Gene Symbol: NLN
  Gene Name: neurolysin (metallopeptidase M3 family)
  ENSP ID: ENSP00000422822
MIARCLLAVRSLRRWSLALLPRLVCSGVILAHCSLCLPGSSDSPASAT

SEQ ID NO: 56450 - protein, 600 aa, Homo sapiens
  Payload ID: 11088
  Gene Symbol: NLN
  Gene Name: neurolysin (metallopeptidase M3 family)
  ENSP ID: ENSP00000423214
MLDFPQHVSSDKEVRAASTEADKRLSRFDIEMSMRGDIFERIVHLQETCDLGKIKPEARRYLEKSIKMGKRNGLHLPEQVQNEIKSMKKRMSELCIDFNKNLNEDDTFLVFSKAELGALPDDFIDSLEKTDDDKYKITLKYPHYFPVMKKCCIPETRRRMEMAFNTRCKEENTIILQQLLPLRTKVAKLLGYSTHADFVLEMNTAKSTSRVTAFLDDLSQKLKPLGEAEREFILNLKKKECKDRGFEYDGKINAWDLYYYMTQTEELKYSIDQEFLKEYFPIEVVTEGLLNTYQELLGLSFEQMTDAHVWNKSVTLYTVKDKATGEVLGQFYLDLYPREGKYNHAACFGLQPGCLLPDGSRMMAVAALVVNFSQPVAGRPSLLRHDEVRTYFHEFGHVMHQICAQTDFARFSGTNVETDFVEVPSQMLENWVWDVDSLRRLSKHYKDGSPIADDLLEKLVASRLVNTGLLTLRQIVLSKVDQSLHTNTSLDAASEYAKYCSEILGVAATPGTNMPATFGHLAGGYDGQYYGYLWSEVFSMDMFYSCFKKEGIMNPEVGMKYRNLILKPGGSLDGMDMLHNFLKREPNQKAFLMSRGLHAP

SEQ ID NO: 56451 - protein, 283 aa, Homo sapiens
  Payload ID: 11088
  Gene Symbol: NLN
  Gene Name: neurolysin (metallopeptidase M3 family)
  ENSP ID: ENSP00000426959
GLSFEQMTDAHVWNKSVTLYTVKDKATGEVLGQFYLDLYPREGKYNHAACFGLQPGCLLPDGSRMMAVAALVVNFSQPVAGRPSLLRHDEVRTYFHEFGHVMHQICAQTDFARFSGTNVETDFVEVPSQMLENWVWDVDSLRRLSKHYKDGSPIADDLLEKLVASRLVNTGLLTLRQIVLSKVDQSLHTNTSLDAASEYAKYCSEILGVAATPGTNMPATFGHLAGGYDGQYYGYLWSEVFSMDMFYSCFKKEGIMNPETSKHHGISLIMFHYSKGEVDLVPF

SEQ ID NO: 56452 - protein, 414 aa, Homo sapiens
  Payload ID: 11088
  Gene Symbol: NLN
  Gene Name: neurolysin (metallopeptidase M3 family)
  ENSP ID: ENSP00000427417
KEENTIILQQLLPLRTKVAKLLGYSTHADFVLEMNTAKSTSRVTAFLDDLSQKLKPLGEAEREFILNLKKKECKDRGFEYDGKINAWDLYYYMTQTEELKYSIDQEFLKEYFPIEVVTEGLLNTYQELLGLSFEQMTDAHVWNKSVTLYTVKDKATGEVLGQFYLDLYPREGKYNHAACFGLQPGCLLPDGSRMMAVAALVVNFSQPVAGRPSLLRHDETDFARFSGTNVETDFVEVPSQMLENWVWDVDSLRRLSKHYKDGSPIADDLLEKLVASRLVNTGLLTLRQIVLSKVDQSLHTNTSLDAASEYAKYCSEILGVAATPGTNMPATFGHLAGGYDGQYYGYLWSEVFSMDMFYSCFKKEGIMNPEVGMKYRNLILKPGGSLDGMDMLHNFLKREPNQKAFLMSRGLHAP

SEQ ID NO: 56453 - protein, 121 aa, Homo sapiens
  Payload ID: 11089
  Gene Symbol: NMB
  Gene Name: neuromedin B
  Uniprot ID: P08949
  ENSP ID: ENSP00000353664
MARRAGGARMFGSLLLFALLAAGVAPLSWDLPEPRSRASKIRVHSRGNLWATGHFMGKKSLEPSSPSPLGTAPHTSLRDQRLQLSHDLLGILLLKKALGVSLSRPAPQIQYRRLLVQILQK

SEQ ID NO: 56454 - protein, 154 aa, Homo sapiens
  Payload ID: 11089
  Gene Symbol: NMB
  Gene Name: neuromedin B
  Uniprot ID: P08949
  ENSP ID: ENSP00000378089
MARRAGGARMFGSLLLFALLAAGVAPLSWDLPEPRSRASKIRVHSRGNLWATGHFMGKKSLEPSSPSPLGTAPHTSLRDQRLQLSHDLLGILLLKKALGVSLSRPAPQIQEAAGTNTAEMTPIMGQTQQRGLDCAHPGKVLNGTLLMAPSGCKS

SEQ ID NO: 56455 - protein, 390 aa, Homo sapiens
  Payload ID: 11090
  Gene Symbol: NMBR
  Gene Name: neuromedin B receptor
  Uniprot ID: P28336
  ENSP ID: ENSP00000258042
MPSKSLSNLSVTTGANESGSVPEGWERDFLPASDGTTTELVIRCVIPSLYLLIITVGLLGNIMLVKIFITNSAMRSVPNIFISNLAAGDLLLLLTCVPVDASRYFFDEWMFGKVGCKLIPVIQLTSVGVSVFTLTALSADRYRAIVNPMDMQTSGALLRTCVKAMGIWVVSVLLAVPEAVFSEVARISSLDNSSFTACIPYPQTDELHPKIHSVLIFLVYFLIPLAIISIYYYHIAKTLIKSAHNLPGEYNEHTKKQMETRKRLAKIVLVFVGCFIFCWFPNHILYMYRSFNYNEIDPSLGHMIVTLVARVLSFGNSCVNPFALYLLSESFRRHFNSQLCCGRKSYQERGTSYLLSSSAVRMTSLKSNAKNMVTNSVLLNGHSMKQEMAL

SEQ ID NO: 56456 - protein, 153 aa, Homo sapiens
  Payload ID: 11091
  Gene Symbol: NMS
  Gene Name: neuromedin S
  Uniprot ID: Q5H8A3
  ENSP ID: ENSP00000366061
MKHLRPQFPLILAIYCFCMLQIPSSGFPQPLADPSDGLDIVQLEQLAYCLSQWAPLSRQPKDNQDIYKRFLFHYSRTQEATHPVKTGFPPVHPLMHLAAKLANRRMKRILQRGSGTAAVDFTKKDHTATWGRPFFLFRPRNGRNIEDEAQIQW

SEQ ID NO: 56457 - protein, 174 aa, Homo sapiens
  Payload ID: 11092
  Gene Symbol: NMU
  Gene Name: neuromedin U
  Uniprot ID: P48645
  ENSP ID: ENSP00000264218
MLRTESCRPRSPAGQVAAASPLLLLLLLLAWCAGACRGAPILPQGLQPEQQLQLWNEIDDTCSSFLSIDSQPQASNALEELCFMIMGMLPKPQEQDEKDNTKRFLFHYSKTQKLGKSNVVSSVVHPLLQLVPHLHERRMKRFRVDEEFQSPFASQSRGYFLFRPRNGRRSAGFI

SEQ ID NO: 56458 - protein, 158 aa, Homo sapiens
  Payload ID: 11092
  Gene Symbol: NMU
  Gene Name: neuromedin U
  ENSP ID: ENSP00000422399
MLRTESCRPRSPAGQVAAASPLLLLLLLLAWCAGACRGAPILPQGLQPEQQLQLWNEASNALEELCFMIMGMLPKPQEQDEKDNTKRFLFHYSKTQKLGKSNVVSSVVHPLLQLVPHLHERRMKRFRVDEEFQSPFASQSRGYFLFRPRNGRRSAGFI

SEQ ID NO: 56459 - protein, 149 aa, Homo sapiens
  Payload ID: 11092
  Gene Symbol: NMU
  Gene Name: neuromedin U
  ENSP ID: ENSP00000422870
MLRTESCRPRSPAGQVAAASPLLLLLLLLAWCAGACRGAPILPQGLQPEQQLQLWNEIDDTCSSFLSIDSQPQASNALEELCFMIMGMLPKPQEQDEKDNTKRFLFHYSKTQKLGKSNVVEEFQSPFASQSRGYFLFRPRNGRRSAGFI

SEQ ID NO: 56460 - protein, 147 aa, Homo sapiens
  Payload ID: 11092
  Gene Symbol: NMU
  Gene Name: neuromedin U
  ENSP ID: ENSP00000424246
MLRTESCRPRSPAGQVAAASPLLLLLLLLAWCAGACRGAPILPQGLQPEQQLQLWNEIDDTCSSFLSIDSQPQASNALEELCFMIMGMLPKPQSSVVHPLLQLVPHLHERRMKRFRVDEEFQSPFASQSRGYFLFRPRNGRRSAGFI

SEQ ID NO: 56461 - protein, 426 aa, Homo sapiens
  Payload ID: 11093
  Gene Symbol: NMUR1
  Gene Name: neuromedin U receptor 1
  Uniprot ID: Q9HB89
  ENSP ID: ENSP00000305877
MTPLCLNCSVLPGDLYPGGARNPMACNGSAARGHFDPEDLNLTDEALRLKYLGPQQTELFMPICATYLLIFVVGAVGNGLTCLVILRHKAMRTPTNYYLFSLAVSDLLVLLVGLPLELYEMWHNYPFLLGVGGCYFRTLLFEMVCLASVLNVTALSVERYVAVVHPLQARSMVTRAHVRRVLGAVWGLAMLCSLPNTSLHGIRQLHVPCRGPVPDSAVCMLVRPRALYNMVVQTTALLFFCLPMAIMSVLYLLIGLRLRRERLLLMQEAKGRGSAAARSRYTCRLQQHDRGRRQVTKMLFVLVVVFGICWAPFHADRVMWSVVSQWTDGLHLAFQHVHVISGIFFYLGSAANPVLYSLMSSRFRETFQEALCLGACCHRLRPRHSSHSLSRMTTGSTLCDVGSLGSWVHPLAGNDGPEAQQETDPS

SEQ ID NO: 56462 - protein, 415 aa, Homo sapiens
  Payload ID: 11094
  Gene Symbol: NMUR2
  Gene Name: neuromedin U receptor 2
  Uniprot ID: Q9GZQ4
  ENSP ID: ENSP00000255262
MSGMEKLQNASWIYQQKLEDPFQKHLNSTEEYLAFLCGPRRSHFFLPVSVVYVPIFVVGVIGNVLVCLVILQHQAMKTPTNYYLFSLAVSDLLVLLLGMPLEVYEMWRNYPFLFGPVGCYFKTALFETVCFASILSITTVSVERYVAILHPFRAKLQSTRRRALRILGIVWGFSVLFSLPNTSIHGIKFHYFPNGSLVPGSATCTVIKPMWIYNFIIQVTSFLFYLLPMTVISVLYYLMALRLKKDKSLEADEGNANIQRPCRKSVNKMLFVLVLVFAICWAPFHIDRLFFSFVEEWSESLAAVFNLVHVVSGVFFYLSSAVNPIIYNLLSRRFQAAFQNVISSFHKQWHSQHDPQLPPAQRNIFLTECHFVELTEDIGPQFPCQSSMHNSHLPAALSSEQMSRTNYQSFHFNKT

SEQ ID NO: 56463 - protein, 1483 aa, Homo sapiens
  Payload ID: 11095
  Gene Symbol: NAV1
  Gene Name: neuron navigator 1
  Uniprot ID: Q8NEY1
  ENSP ID: ENSP00000356264
MLHLPLPRSGRTVNFPRSWDESSSISSGLSDASDNLSSEEFNASSSLNSLPSTPTASRRNSTIVLRTDSEKRSLAESGLSWFSESEEKAPKKLEYDSGSLKMEPGTSKWRRERPESCDDSSKGGELKKPISLGHPGSLKKGKTPPVAVTSPITHTAQSALKVAGKPEGKATDKGKLAVKNTGLQRSSSDAGRDRLSDAKKPPSGIARPSTSGSFGYKKPPPATGTATVMQTGGSATLSKIQKSSGIPVKPVNGRKTSLDVSNSAEPGFLAPGARSNIQYRSLPRPAKSSSMSVTGGRGGPRPVSSSIDPSLLSTKQGGLTPSRLKEPTKVASGRTTPAPVNQTDREKEKAKAKAVALDSDNISLKSIGSPESTPKNQASHPTATKLAELPPTPLRATAKSFVKPPSLANLDKVNSNSLDLPSSSDTTHASKVPDLHATSSASGGPLPSCFTPSPAPILNINSASFSQGLELMSGFSVPKETRMYPKLSGLHRSMESLQMPMSLPSAFPSSTPVPTPPAPPAAPTEEETEELTWSGSPRAGQLDSNQRDRNTLPKKGLRYQLQSQEETKERRHSHTIGGLPESDDQSELPSPPALPMSLSAKGQLTNIVSPTAATTPRITRSNSIPTHEAAFELYSGSQMGSTLSLAERPKGMIRSGSFRDPTDDVHGSVLSLASSASSTYSSAEERMQSEQIRKLRRELESSQEKVATLTSQLSANANLVAAFEQSLVNMTSRLRHLAETAEEKDTELLDLRETIDFLKKKNSEAQAVIQGALNASETTPKELRIKRQNSSDSISSLNSITSHSSIGSSKDADAKKKKKKSWLRSSFNKAFSIKKGPKSASSYSDIEEIATPDSSAPSSPKLQHGSTETASPSIKSSTSSSVGTDVTEGPAHPAPHTRLFHANEEEEPEKKEVSELRSELWEKEMKLTDIRLEALNSAHQLDQLRETMHNMQLEVDLLKAENDRLKVAPGPSSGSTPGQVPGSSALSSPRRSLGLALTHSFGPSLADTDLSPMDGISTCGPKEEVTLRVVVRMPPQHIIKGDLKQQEFFLGCSKVSGKVDWKMLDEAVFQVFKDYISKMDPASTLGLSTESIHGYSISHVKRVLDAEPPEMPPCRRGVNNISVSLKGLKEKCVDSLVFETLIPKPMMQHYISLLLKHRRLVLSGPSGTGKTYLTNRLAEYLVERSGREVTEGIVSTFNMHQQSCKDLQLYLSNLANQIDRETGIGDVPLVILLDDLSEAGSISELVNGALTCKYHKCPYIIGTTNQPVKMTPNHGLHLSFRMLTFSNNVEPANGFLVRYLRRKLVESDSDINANKEELLRVLDWVPKLWYHLHTFLEKHSTSDFLIGPCFFLSCPIGIEDFRTWFIDLWNNSIIPYLQEGAKDGIKVHGQKAAWEDPVEWVRDTLPWPSAQQDQSKLYHLPPPTVGPHSIASPPEDRTVKDSTPSSLDSDPLMAMLLKLQEAANYIESPDRETILDPNLQATL

SEQ ID NO: 56464 - protein, 1877 aa, Homo sapiens
  Payload ID: 11095
  Gene Symbol: NAV1
  Gene Name: neuron navigator 1
  Uniprot ID: Q8NEY1
  ENSP ID: ENSP00000356265
MLGSSVKSVQPEVELSSGGGDEGADEPRGAGRKAAAADGRGMLPKRAKAPGGGGGMAKASAAELKVFKSGSVDSRVPGGPPASNLRKQKSLTNLSFLTDSEKKLQLYEPEWSDDMAKAPKGLGKVGSKGREAPLMSKTLSKSEHSLFQAKGSPAGGAKTPLAPLAPNLGKPSRIPRGPYAEVKPLSKAPEAAVSEDGKSDDELLSSKAKAQKSSGPVPSAKGQEERAFLKVDPELVVTVLGDLEQLLFSQMLDPESQRKRTVQNVLDLRQNLEETMSSLRGSQVTHSSLEMTCYDSDDANPRSVSSLSNRSSPLSWRYGQSSPRLQAGDAPSVGGSCRSEGTPAWYMHGERAHYSHTMPMRSPSKLSHISRLELVESLDSDEVDLKSGYMSDSDLMGKTMTEDDDITTGWDESSSISSGLSDASDNLSSEEFNASSSLNSLPSTPTASRRNSTIVLRTDSEKRSLAESGLSWFSESEEKAPKKLEYDSGSLKMEPGTSKWRRERPESCDDSSKGGELKKPISLGHPGSLKKGKTPPVAVTSPITHTAQSALKVAGKPEGKATDKGKLAVKNTGLQRSSSDAGRDRLSDAKKPPSGIARPSTSGSFGYKKPPPATGTATVMQTGGSATLSKIQKSSGIPVKPVNGRKTSLDVSNSAEPGFLAPGARSNIQYRSLPRPAKSSSMSVTGGRGGPRPVSSSIDPSLLSTKQGGLTPSRLKEPTKVASGRTTPAPVNQTDREKEKAKAKAVALDSDNISLKSIGSPESTPKNQASHPTATKLAELPPTPLRATAKSFVKPPSLANLDKVNSNSLDLPSSSDTTHASKVPDLHATSSASGGPLPSCFTPSPAPILNINSASFSQGLELMSGFSVPKETRMYPKLSGLHRSMESLQMPMSLPSAFPSSTPVPTPPAPPAAPTEEETEELTWSGSPRAGQLDSNQRDRNTLPKKGLRYQLQSQEETKERRHSHTIGGLPESDDQSELPSPPALPMSLSAKGQLTNIVSPTAATTPRITRSNSIPTHEAAFELYSGSQMGSTLSLAERPKGMIRSGSFRDPTDDVHGSVLSLASSASSTYSSAEERMQSEQIRKLRRELESSQEKVATLTSQLSANANLVAAFEQSLVNMTSRLRHLAETAEEKDTELLDLRETIDFLKKKNSEAQAVIQGALNASETTPKELRIKRQNSSDSISSLNSITSHSSIGSSKDADAKKKKKKSWVYELRSSFNKAFSIKKGPKSASSYSDIEEIATPDSSAPSSPKLQHGSTETASPSIKSSTSSSVGTDVTEGPAHPAPHTRLFHANEEEEPEKKEVSELRSELWEKEMKLTDIRLEALNSAHQLDQLRETMHNMQLEVDLLKAENDRLKVAPGPSSGSTPGQVPGSSALSSPRRSLGLALTHSFGPSLADTDLSPMDGISTCGPKEEVTLRVVVRMPPQHIIKGDLKQQEFFLGCSKVSGKVDWKMLDEAVFQVFKDYISKMDPASTLGLSTESIHGYSISHVKRVLDAEPPEMPPCRRGVNNISVSLKGLKEKCVDSLVFETLIPKPMMQHYISLLLKHRRLVLSGPSGTGKTYLTNRLAEYLVERSGREVTEGIVSTFNMHQQSCKDLQLYLSNLANQIDRETGIGDVPLVILLDDLSEAGSISELVNGALTCKYHKCPYIIGTTNQPVKMTPNHGLHLSFRMLTFSNNVEPANGFLVRYLRRKLVESDSDINANKEELLRVLDWVPKLWYHLHTFLEKHSTSDFLIGPCFFLSCPIGIEDFRTWFIDLWNNSIIPYLQEGAKDGIKVHGQKAAWEDPVEWVRDTLPWPSAQQDQSKLYHLPPPTVGPHSIASPPEDRTVKDSTPSSLDSDPLMAMLLKLQEAANYIESPDRETILDPNLQATL

SEQ ID NO: 56465 - protein, 1830 aa, Homo sapiens
  Payload ID: 11095
  Gene Symbol: NAV1
  Gene Name: neuron navigator 1
  ENSP ID: ENSP00000356271
MDARIVHALLAGRMLGSSVKSVQPEVELSSGGGDEGADEPRGAGRKAAAADGRGMLPKRAKAPGGGGGMAKASAAELKVFKSGSVDSRVPGGPPASNLRKQKSLTNLSFLTDSEKKLQLYEPEWSDDMAKAPKGLGKVGSKGREAPLMSKTLSKSEHSLFQAKGSPAGGAKTPLAPLAPNLGKPSRIPRGPYAEVKPLSKAPEAAVSEDGKSDDELLSSKAKAQKSSGPVPSAKGQEERAFLKVDPELVVTVLGDLEQLLFSQMLDPESQRKRTVQNVLDLRQNLEETMSSLRGSQVTHSSLEMTCYDSDDANPRSVSSLSNRSSPLSWRYGQSSPRLQAGDAPSVGGSCRSEGTPAWYMHGERAHYSHTMPMRSPSKLSHISRLELVESLDSDEVDLKSGYMSDSDLMGKTMTEDDDITTGWDESSSISSGLSDASDNLSSEEFNASSSLNSLPSTPTASRRNSTIVLRTDSEKRSLAESGLSWFSESEEKAPKKLEYDSGSLKMEPGTSKWRRERPESCDDSSKGGELKKPISLGHPGSLKKGKTPPVAVTSPITHTAQSALKVAGKPEGKATDKGKLAVKNTGLQRSSSDAGRDRLSDAKKPPSGIARPSTSGSFGYKKPPPATGTATVMQTGGSATLSKIQKSSGIPVKPVNGRKTSLDVSNSAEPGFLAPGARSNIQYRSLPRPAKSSSMSVTGGRGGPRPVSSSIDPSLLSTKQGGLTPSRLKEPTKVASGRTTPAPVNQTDREKEKAKAKAVALDSDNISLKSIGSPESTPKNQASHPTATKLAELPPTPLRATAKSFVKPPSLANLDKVNSNSLDLPSSSDTTHASKVPDLHATSSASGGPLPSCFTPSPAPILNINSASFSQGLELMSGFSVPKETRMYPKLSGLHRSMESLQMPMSLPSAFPSSTPVPTPPAPPAAPTEEETEELTWSGSPRAGQLDSNQRDRNTLPKKGLRYQLQSQEETKERRHSHTIGGLPESDDQSELPSPPALPMSLSAKGQLTNIVHGSVLSLASSASSTYSSAEERMQSEQIRKLRRELESSQEKVATLTSQLSANANLVAAFEQSLVNMTSRLRHLAETAEEKDTELLDLRETIDFLKKKNSEAQAVIQGALNASETTPKELRIKRQNSSDSISSLNSITSHSSIGSSKDADAKKKKKKSWLRSSFNKAFSIKKGPKSASSYSDIEEIATPDSSAPSSPKLQHGSTETASPSIKSSTSSSVGTDVTEGPAHPAPHTRLFHANEEEEPEKKEVSELRSELWEKEMKLTDIRLEALNSAHQLDQLRETMHNMQLEVDLLKAENDRLKVAPGPSSGSTPGQVPGSSALSSPRRSLGLALTHSFGPSLADTDLSPMDGISTCGPKEEVTLRVVVRMPPQHIIKGDLKQQEFFLGCSKVSGKVDWKMLDEAVFQVFKDYISKMDPASTLGLSTESIHGYSISHVKRVLDAEPPEMPPCRRGVNNISVSLKGLKEKCVDSLVFETLIPKPMMQHYISLLLKHRRLVLSGPSGTGKTYLTNRLAEYLVERSGREVTEGIVSTFNMHQQSCKDLQLYLSNLANQIDRETGIGDVPLVILLDDLSEAGSISELVNGALTCKYHKCPYIIGTTNQPVKMTPNHGLHLSFRMLTFSNNVEPANGFLVRYLRRKLVESDSDINANKEELLRVLDWVPKLWYHLHTFLEKHSTSDFLIGPCFFLSCPIGIEDFRTWFIDLWNNSIIPYLQEGAKDGIKVHGQKAAWEDPVEWVRDTLPWPSAQQDQSKLYHLPPPTVGPHSIASPPEDRTVKDSTPSSLDSDPLMAMLLKLQEAANYIESPDRETILDPNLQATL

SEQ ID NO: 56466 - protein, 227 aa, Homo sapiens
  Payload ID: 11095
  Gene Symbol: NAV1
  Gene Name: neuron navigator 1
  ENSP ID: ENSP00000389123
  MOD_RES (1)..(1): Any amino acid
XSQEETKERRHSHTIGGLPESDDQSELPSPPALPMSLSAKGQLTNIVHGSVLSLASSASSTYSSQIRKLRRELESSQEKVATLTSQLSANANLVAAFEQSLVNMTSRLRHLAETAEEKDTELLDLRETIDFLKKKNSEAQAVIQGALNASETTPKELRIKRQNSSDSISSLNSITSHSSIGSSKDADAKKKKKKSWLRSSFNKAFSIKKGPKSASSYSDIEEIATPD

SEQ ID NO: 56467 - protein, 755 aa, Homo sapiens
  Payload ID: 11095
  Gene Symbol: NAV1
  Gene Name: neuron navigator 1
  ENSP ID: ENSP00000405437
  MOD_RES (1)..(1): Any amino acid
XTPTASRRNSTIVLRTDSEKRSLAESGLSWFSESEEKAPKKLEYDSGSLKMEPGTSKWRRERPESCDDSSKGGELKKPISLGHPGSLKKGKTPPVAVTSPITHTAQSALKVAGKPEGKATDKGKLAVKNTGLQRSSSDAGRDRLSDAKKPPSGIARPSTSGSFGYKKPPPATGTATVMQTGGSATLSKIQKSSGIPVKPVNGRKTSLDVSNSAEPGFLAPGARSNIQYRSLPRPAKSSSMSVTGGRGGPRPVSSSIDPSLLSTKQGGLTPSRLKEPTKVASGRTTPAPVNQTDREKEKAKAKAVALDSDNISLKSIGSPESTPKNQASHPTATKLAELPPTPLRATAKSFVKPPSLANLDKVNSNSLDLPSSSDTTHASKVPDLHATSSASGGPLPSCFTPSPAPILNINSASFSQGLELMSGFSVPKETRMYPKLSGLHRSMESLQMPMSLPSAFPSSTPVPTPPAPPAAPTEEETEELTWSGSPRAGQLDSNQRDRNTLPKKGLRYQLQSQEETKERRHSHTIGGLPESDDQSELPSPPALPMSLSAKGQLTNIVSPTAATTPRITRSNSIPTHEAAFELYSGSQMGSTLSLAERPKGMIRSGSFRDPTDDVHGSVLSLASSASSTYSSQIRKLRRELESSQEKVATLTSQLSANANLVAAFEQSLVNMTSRLRHLAETAEEKDTELLDLRETIDFLKKKNSEAQAVIQGALNASETTPKELRIKRQNSSDSISSLNSITSHSSIGSSKDADA

SEQ ID NO: 56468 - protein, 26 aa, Homo sapiens
  Payload ID: 11095
  Gene Symbol: NAV1
  Gene Name: neuron navigator 1
  ENSP ID: ENSP00000426436
SAKGQLTNIGLYGQIRHPPACMEAEE

SEQ ID NO: 56469 - protein, 241 aa, Homo sapiens
  Payload ID: 11095
  Gene Symbol: NAV1
  Gene Name: neuron navigator 1
  Uniprot ID: M0R1G4
  ENSP ID: ENSP00000471857
MNGMANVNPASRPHYASAIPVPRASSQTRIPTPGASPQLRPRQAGLALSPQRAASPRLGKAAGPSRNSSPRAFRGRGSPKFAGAVRESAEDGEGPFSSPWNSPRTTPKAALSSRAGSGRIGERQGTQGKKKKAQEGTPVCQTRGRSPSRTSFHGETQIPGAPEGRKPPSCPGKDQRDINYKSSGTPRSLEPDEGAASWASSPVCSPVQGKRPSPSPGAISFSSVHQQSQPVTATVAPFQYR

SEQ ID NO: 56470 - protein, 2429 aa, Homo sapiens
  Payload ID: 11096
  Gene Symbol: NAV2
  Gene Name: neuron navigator 2
  Uniprot ID: Q8IVL1
  ENSP ID: ENSP00000309577
MPAILVASKMKSGLPKPVHSAAPILHVPPARAGPQPCYLKLGSKVEVSKTTYPSQIPLKSQVLQGLQEPAGEGLPLRKSGSVENGFDTQIYTDWANHYLAKSGHKRLIRDLQQDVTDGVLLAQIIQVVANEKIEDINGCPKNRSQMIENIDACLNFLAAKGINIQGLSAEEIRNGNLKAILGLFFSLSRYKQQQQQPQKQHLSSPLPPAVSQVAGAPSQCQAGTPQQQVPVTPQAPCQPHQPAPHQQSKAQAEMQSRLPGPTARVSAAGSEAKTRGGSTTANNRRSQSFNNYDKSKPVTSPPPPPSSHEKEPLASSASSHPGMSDNAPASLESGSSSTPTNCSTSSAIPQPGAATKPWRSKSLSVKHSATVSMLSVKPPGPEAPRPTPEAMKPAPNNQKSMLEKLKLFNSKGGSKAGEGPGSRDTSCERLETLPSFEESEELEAASRMLTTVGPASSSPKIALKGIAQRTFSRALTNKKSSLKGNEKEKEKQQREKDKEKSKDLAKRASVTERLDLKEEPKEDPSGAAVPEMPKKSSKIASFIPKGGKLNSAKKEPMAPSHSGIPKPGMKSMPGKSPSAPAPSKEGERSRSGKLSSGLPQQKPQLDGRHSSSSSSLASSEGKGPGGTTLNHSISSQTVSGSVGTTQTTGSNTVSVQLPQPQQQYNHPNTATVAPFLYRSQTDTEGNVTAESSSTGVSVEPSHFTKTGQPALEELTGEDPEARRLRTVKNIADLRQNLEETMSSLRGTQVTHSTLETTFDTNVTTEMSGRSILSLTGRPTPLSWRLGQSSPRLQAGDAPSMGNGYPPRANASRFINTESGRYVYSAPLRRQLASRGSSVCHVDVSDKAGDEMDLEGISMDAPGYMSDGDVLSKNIRTDDITSGYMTDGGLGLYTRRLNRLPDGMAVVRETLQRNTSLGLGDADSWDDSSSVSSGISDTIDNLSTDDINTSSSISSYANTPASSRKNLDVQTDAEKHSQVERNSLWSGDDVKKSDGGSDSGIKMEPGSKWRRNPSDVSDESDKSTSGKKNPVISQTGSWRRGMTAQVGITMPRTKPSAPAGALKTPGTGKTDDAKVSEKGRLSPKASQVKRSPSDAGRSSGDESKKPLPSSSRTPTANANSFGFKKQSGSAAGLAMITASGVTVTSRSATLGKIPKSSALVSRSAGRKSSMDGAQNQDDGYLALSSRTNLQYRSLPRPSKSNSRNGAGNRSSTSSIDSNISSKSAGLPVPKLREPSKTALGSSLPGLVNQTDKEKGISSDNESVASCNSVKVNPAAQPVSSPAQTSLQPGAKYPDVASPTLRRLFGGKPTKQVPIATAENMKNSVVISNPHATMTQQGNLDSPSGSGVLSSGSSSPLYSKNVDLNQSPLASSPSSAHSAPSNSLTWGTNASSSSAVSKDGLGFQSVSSLHTSCESIDISLSSGGVPSHNSSTGLIASSKDDSLTPFVRTNSVKTTLSESPLSSPAASPKFCRSTLPRKQDSDPHLDRNTLPKKGLRYTPTSQLRTQEDAKEWLRSHSAGGLQDTAANSPFSSGSSVTSPSGTRFNFSQLASPTTVTQMSLSNPTMLRTHSLSNADGQYDPYTDSRFRNSSMSLDEKSRTMSRSGSFRDGFEEVHGSSLSLVSSTSSVYSTPEEKCQSEIRKLRRELDASQEKVSALTTQLTANAHLVAAFEQSLGNMTIRLQSLTMTAEQKDSELNELRKTIELLKKQNAAAQAAINGVINTPELNCKGNGTAQSADLRIRRQHSSDSVSSINSATSHSSVGSNIESDSKKKKRKNWLRSSFKQAFGKKKSPKSASSHSDIEEMTDSSLPSSPKLPHNGSTGSTPLLRNSHSNSLISECMDSEAETVMQLRNELRDKEMKLTDIRLEALSSAHQLDQLREAMNRMQSEIEKLKAENDRLKSESQGSGCSRAPSQVSISASPRQSMGLSQHSLNLTESTSLDMLLDDTGECSARKEGGRHVKIVVSFQEEMKWKEDSRPHLFLIGCIGVSGKTKWDVLDGVVRRLFKEYIIHVDPVSQLGLNSDSVLGYSIGEIKRSNTSETPELLPCGYLVGENTTISVTVKGLAENSLDSLVFESLIPKPILQRYVSLLIEHRRIILSGPSGTGKTYLANRLSEYIVLREGRELTDGVIATFNVDHKSSKELRQYLSNLADQCNSENNAVDMPLVIILDNLHHVSSLGEIFNGLLNCKYHKCPYIIGTMNQATSSTPNLQLHHNFRWVLCANHTEPVKGFLGRFLRRKLMETEISGRVRNMELVKIIDWIPKVWHHLNRFLEAHSSSDVTIGPRLFLSCPIDVDGSRVWFTDLWNYSIIPYLLEAVREGLQLYGRRAPWEDPAKWVMDTYPWAASPQQHEWPPLLQLRPEDVGFDGYSMPREGSTSKQMPPSDAEGDPLMNMLMRLQEAANYSSPQSYDSDSNSNSHHDDILDSSLESTL

SEQ ID NO: 56471 - protein, 2365 aa, Homo sapiens
  Payload ID: 11096
  Gene Symbol: NAV2
  Gene Name: neuron navigator 2
  Uniprot ID: Q8IVL1
  ENSP ID: ENSP00000353871
MESVSESSQQQKRKPVIHGLEDQKRIYTDWANHYLAKSGHKRLIRDLQQDVTDGVLLAQIIQVVANEKIEDINGCPKNRSQMIENIDACLNFLAAKGINIQGLSAEEIRNGNLKAILGLFFSLSRYKQQQQQPQKQHLSSPLPPAVSQVAGAPSQCQAGTPQQQVPVTPQAPCQPHQPAPHQQSKAQAEMQSRLPGPTARVSAAGSEAKTRGGSTTANNRRSQSFNNYDKSKPVTSPPPPPSSHEKEPLASSASSHPGMSDNAPASLESGSSSTPTNCSTSSAIPQPGAATKPWRSKSLSVKHSATVSMLSVKPPGPEAPRPTPEAMKPAPNNQKSMLEKLKLFNSKGGSKAGEGPGSRDTSCERLETLPSFEESEELEAASRMLTTVGPASSSPKIALKGIAQRTFSRALTNKKSSLKGNEKEKEKQQREKDKEKSKDLAKRASVTERLDLKEEPKEDPSGAAVPEMPKKSSKIASFIPKGGKLNSAKKEPMAPSHSGIPKPGMKSMPGKSPSAPAPSKEGERSRSGKLSSGLPQQKPQLDGRHSSSSSSLASSEGKGPGGTTLNHSISSQTVSGSVGTTQTTGSNTVSVQLPQPQQQYNHPNTATVAPFLYRSQTDTEGNVTAESSSTGVSVEPSHFTKTGQPALEELTGEDPEARRLRTVKNIADLRQNLEETMSSLRGTQVTHSTLETTFDTNVTTEMSGRSILSLTGRPTPLSWRLGQSSPRLQAGDAPSMGNGYPPRANASRFINTESGRYVYSAPLRRQLASRGSSVCHVDVSDKAGDEMDLEGISMDAPGYMSDGDVLSKNIRTDDITSGYMTDGGLGLYTRRLNRLPDGMAVVRETLQRNTSLGLGDADSWDDSSSVSSGISDTIDNLSTDDINTSSSISSYANTPASSRKNLDVQTDAEKHSQVERNSLWSGDDVKKSDGGSDSGIKMEPGSKWRRNPSDVSDESDKSTSGKKNPVISQTGSWRRGMTAQVGITMPRTKPSAPAGALKTPGTGKTDDAKVSEKGRLSPKASQVKRSPSDAGRSSGDESKKPLPSSSRTPTANANSFGFKKQSGSAAGLAMITASGVTVTSRSATLGKIPKSSALVSRSAGRKSSMDGAQNQDDGYLALSSRTNLQYRSLPRPSKSNSRNGAGNRSSTSSIDSNISSKSAGLPVPKLREPSKTALGSSLPGLVNQTDKEKGISSDNESVASCNSVKVNPAAQPVSSPAQTSLQPGAKYPDVASPTLRRLFGGKPTKQVPIATAENMKNSVVISNPHATMTQQGNLDSPSGSGVLSSGSSSPLYSKNVDLNQSPLASSPSSAHSAPSNSLTWGTNASSSSAVSKDGLGFQSVSSLHTSCESIDISLSSGGVPSHNSSTGLIASSKDDSLTPFVRTNSVKTTLSESPLSSPAASPKFCRSTLPRKQDSDPHLDRNTLPKKGLRYTPTSQLRTQEDAKEWLRSHSAGGLQDTAANSPFSSGSSVTSPSGTRFNFSQLASPTTVTQMSLSNPTMLRTHSLSNADGQYDPYTDSRFRNSSMSLDEKSRTMSRSGSFRDGFEEVHGSSLSLVSSTSSVYSTPEEKCQSEIRKLRRELDASQEKVSALTTQLTANAHLVAAFEQSLGNMTIRLQSLTMTAEQKDSELNELRKTIELLKKQNAAAQAAINGVINTPELNCKGNGTAQSADLRIRRQHSSDSVSSINSATSHSSVGSNIESDSKKKKRKNWLRSSFKQAFGKKKSPKSASSHSDIEEMTDSSLPSSPKLPHNGSTGSTPLLRNSHSNSLISECMDSEAETVMQLRNELRDKEMKLTDIRLEALSSAHQLDQLREAMNRMQSEIEKLKAENDRLKSESQGSGCSRAPSQVSISASPRQSMGLSQHSLNLTESTSLDMLLDDTGECSARKEGGRHVKIVVSFQEEMKWKEDSRPHLFLIGCIGVSGKTKWDVLDGVVRRLFKEYIIHVDPVSQLGLNSDSVLGYSIGEIKRSNTSETPELLPCGYLVGENTTISVTVKGLAENSLDSLVFESLIPKPILQRYVSLLIEHRRIILSGPSGTGKTYLANRLSEYIVLREGRELTDGVIATFNVDHKSSKELRQYLSNLADQCNSENNAVDMPLVIILDNLHHVSSLGEIFNGLLNCKYHKCPYIIGTMNQATSSTPNLQLHHNFRWVLCANHTEPVKGFLGRFLRRKLMETEISGRVRNMELVKIIDWIPKVWHHLNRFLEAHSSSDVTIGPRLFLSCPIDVDGSRVWFTDLWNYSIIPYLLEAVREGLQLYGRRAPWEDPAKWVMDTYPWAASPQQHEWPPLLQLRPEDVGFDGYSMPREGSTSKQMPPSDAEGDPLMNMLMRLQEAANYSSPQSYDSDSNSNSHHDDILDSSLESTL

SEQ ID NO: 56472 - protein, 2432 aa, Homo sapiens
  Payload ID: 11096
  Gene Symbol: NAV2
  Gene Name: neuron navigator 2
  Uniprot ID: Q8IVL1
  ENSP ID: ENSP00000379394
MPAILVASKMKSGLPKPVHSAAPILHVPPARAGPQPCYLKLGSKVEVSKTTYPSQIPLKSQVLQGLQEPAGEGLPLRKSGSVENGFDTQIYTDWANHYLAKSGHKRLIRDLQQDVTDGVLLAQIIQVVANEKIEDINGCPKNRSQMIENIDACLNFLAAKGINIQGLSAEEIRNGNLKAILGLFFSLSRYKQQQQQPQKQHLSSPLPPAVSQVAGAPSQCQAGTPQQQVPVTPQAPCQPHQPAPHQQSKAQAEMQSRLPGPTARVSAAGSEAKTRGGSTTANNRRSQSFNNYDKSKPVTSPPPPPSSHEKEPLASSASSHPGMSDNAPASLESGSSSTPTNCSTSSAIPQPGAATKPWRSKSLSVKHSATVSMLSVKPPGPEAPRPTPEAMKPAPNNQKSMLEKLKLFNSKGGSKAGEGPGSRDTSCERLETLPSFEESEELEAASRMLTTVGPASSSPKIALKGIAQRTFSRALTNKKSSLKGNEKEKEKQQREKDKEKSKDLAKRASVTERLDLKEEPKEDPSGAAVPEMPKKSSKIASFIPKGGKLNSAKKEPMAPSHSGIPKPGMKSMPGKSPSAPAPSKEGERSRSGKLSSGLPQQKPQLDGRHSSSSSSLASSEGKGPGGTTLNHSISSQTVSGSVGTTQTTGSNTVSVQLPQPQQQYNHPNTATVAPFLYRSQTDTEGNVTAESSSTGVSVEPSHFTKTGQPALEELTGEDPEARRLRTVKNIADLRQNLEETMSSLRGTQVTHSTLETTFDTNVTTEMSGRSILSLTGRPTPLSWRLGQSSPRLQAGDAPSMGNGYPPRANASRFINTESGRYVYSAPLRRQLASRGSSVCHVDVSDKAGDEMDLEGISMDAPGYMSDGDVLSKNIRTDDITSGYMTDGGLGLYTRRLNRLPDGMAVVRETLQRNTSLGLGDADSWDDSSSVSSGISDTIDNLSTDDINTSSSISSYANTPASSRKNLDVQTDAEKHSQVERNSLWSGDDVKKSDGGSDSGIKMEPGSKWRRNPSDVSDESDKSTSGKKNPVISQTGSWRRGMTAQVGITMPRTKPSAPAGALKTPGTGKTDDAKVSEKGRLSPKASQVKRSPSDAGRSSGDESKKPLPSSSRTPTANANSFGFKKQSGSAAGLAMITASGVTVTSRSATLGKIPKSSALVSRSAGRKSSMDGAQNQDDGYLALSSRTNLQYRSLPRPSKSNSRNGAGNRSSTSSIDSNISSKSAGLPVPKLREPSKTALGSSLPGLVNQTDKEKGISSDNESVASCNSVKVNPAAQPVSSPAQTSLQPGAKYPDVASPTLRRLFGGKPTKQVPIATAENMKNSVVISNPHATMTQQGNLDSPSGSGVLSSGSSSPLYSKNVDLNQSPLASSPSSAHSAPSNSLTWGTNASSSSAVSKDGLGFQSVSSLHTSCESIDISLSSGGVPSHNSSTGLIASSKDDSLTPFVRTNSVKTTLSESPLSSPAASPKFCRSTLPRKQDSDPHLDRNTLPKKGLRYTPTSQLRTQEDAKEWLRSHSAGGLQDTAANSPFSSGSSVTSPSGTRFNFSQLASPTTVTQMSLSNPTMLRTHSLSNADGQYDPYTDSRFRNSSMSLDEKSRTMSRSGSFRDGFEEVHGSSLSLVSSTSSVYSTPEEKCQSEIRKLRRELDASQEKVSALTTQLTANAHLVAAFEQSLGNMTIRLQSLTMTAEQKDSELNELRKTIELLKKQNAAAQAAINGVINTPELNCKGNGTAQSADLRIRRQHSSDSVSSINSATSHSSVGSNIESDSKKKKRKNWVNELRSSFKQAFGKKKSPKSASSHSDIEEMTDSSLPSSPKLPHNGSTGSTPLLRNSHSNSLISECMDSEAETVMQLRNELRDKEMKLTDIRLEALSSAHQLDQLREAMNRMQSEIEKLKAENDRLKSESQGSGCSRAPSQVSISASPRQSMGLSQHSLNLTESTSLDMLLDDTGECSARKEGGRHVKIVVSFQEEMKWKEDSRPHLFLIGCIGVSGKTKWDVLDGVVRRLFKEYIIHVDPVSQLGLNSDSVLGYSIGEIKRSNTSETPELLPCGYLVGENTTISVTVKGLAENSLDSLVFESLIPKPILQRYVSLLIEHRRIILSGPSGTGKTYLANRLSEYIVLREGRELTDGVIATFNVDHKSSKELRQYLSNLADQCNSENNAVDMPLVIILDNLHHVSSLGEIFNGLLNCKYHKCPYIIGTMNQATSSTPNLQLHHNFRWVLCANHTEPVKGFLGRFLRRKLMETEISGRVRNMELVKIIDWIPKVWHHLNRFLEAHSSSDVTIGPRLFLSCPIDVDGSRVWFTDLWNYSIIPYLLEAVREGLQLYGRRAPWEDPAKWVMDTYPWAASPQQHEWPPLLQLRPEDVGFDGYSMPREGSTSKQMPPSDAEGDPLMNMLMRLQEAANYSSPQSYDSDSNSNSHHDDILDSSLESTL

SEQ ID NO: 56473 - protein, 2488 aa, Homo sapiens
  Payload ID: 11096
  Gene Symbol: NAV2
  Gene Name: neuron navigator 2
  Uniprot ID: Q8IVL1
  ENSP ID: ENSP00000379396
MPAILVASKMKSGLPKPVHSAAPILHVPPARAGPQPCYLKLGSKVEVSKTTYPSQIPLKSQVLQGLQEPAGEGLPLRKSGSVENGFDTQIYTDWANHYLAKSGHKRLIRDLQQDVTDGVLLAQIIQVVANEKIEDINGCPKNRSQMIENIDACLNFLAAKGINIQGLSAEEIRNGNLKAILGLFFSLSRYKQQQQQPQKQHLSSPLPPAVSQVAGAPSQCQAGTPQQQVPVTPQAPCQPHQPAPHQQSKAQAEMQSSASSKDSSQSKIIRFTLGQKKISRLPGPTARVSAAGSEAKTRGGSTTANNRRSQSFNNYDKSKPVTSPPPPPSSHEKEPLASSASSHPGMSDNAPASLESGSSSTPTNCSTSSAIPQPGAATKPWRSKSLSVKHSATVSMLSVKPPGPEAPRPTPEAMKPAPNNQKSMLEKLKLFNSKGGSKAGEGPGSRDTSCERLETLPSFEESEELEAASRMLTTVGPASSSPKIALKGIAQRTFSRALTNKKSSLKGNEKEKEKQQREKDKEKSKDLAKRASVTERLDLKEEPKEDPSGAAVPEMPKKSSKIASFIPKGGKLNSAKKEPMAPSHSGIPKPGMKSMPGKSPSAPAPSKEGERSRSGKLSSGLPQQKPQLDGRHSSSSSSLASSEGKGPGGTTLNHSISSQTVSGSVGTTQTTGSNTVSVQLPQPQQQYNHPNTATVAPFLYRSQTDTEGNVTAESSSTGVSVEPSHFTKTGQPALEELTGEDPEARRLRTVKNIADLRQNLEETMSSLRGTQVTHSTLETTFDTNVTTEMSGRSILSLTGRPTPLSWRLGQSSPRLQAGDAPSMGNGYPPRANASRFINTESGRYVYSAPLRRQLASRGSSVCHVDVSDKAGDEMDLEGISMDAPGYMSDGDVLSKNIRTDDITSGYMTDGGLGLYTRRLNRLPDGMAVVRETLQRNTSLGLGDADSWDDSSSVSSGISDTIDNLSTDDINTSSSISSYANTPASSRKNLDVQTDAEKHSQVERNSLWSGDDVKKSDGGSDSGIKMEPGSKWRRNPSDVSDESDKSTSGKKNPVISQTGSWRRGMTAQVGITMPRTKPSAPAGALKTPGTGKTDDAKVSEKGRLSPKASQVKRSPSDAGRSSGDESKKPLPSSSRTPTANANSFGFKKQSGSAAGLAMITASGVTVTSRSATLGKIPKSSALVSRSAGRKSSMDGAQNQDDGYLALSSRTNLQYRSLPRPSKSNSRNGAGNRSSTSSIDSNISSKSAGLPVPKLREPSKTALGSSLPGLVNQTDKEKGISSDNESVASCNSVKVNPAAQPVSSPAQTSLQPGAKYPDVASPTLRRLFGGKPTKQVPIATAENMKNSVVISNPHATMTQQGNLDSPSGSGVLSSGSSSPLYSKNVDLNQSPLASSPSSAHSAPSNSLTWGTNASSSSAVSKDGLGFQSVSSLHTSCESIDISLSSGGVPSHNSSTGLIASSKDDSLTPFVRTNSVKTTLSESPLSSPAASPKFCRSTLPRKQDSDPHLDRNTLPKKGLRYTPTSQLRTQEDAKEWLRSHSAGGLQDTAANSPFSSGSSVTSPSGTRFNFSQLASPTTVTQMSLSNPTMLRTHSLSNADGQYDPYTDSRFRNSSMSLDEKSRTMSRSGSFRDGFEEESWEKSSVDNFVSRLHSSLHFSLPLFHHARYELVHGSSLSLVSSTSSVYSTPEEKCQSEIRKLRRELDASQEKVSALTTQLTANAHLVAAFEQSLGNMTIRLQSLTMTAEQKDSELNELRKTIELLKKQNAAAQAAINGVINTPELNCKGNGTAQSADLRIRRQHSSDSVSSINSATSHSSVGSNIESDSKKKKRKNWVNELRSSFKQAFGKKKSPKSASSHSDIEEMTDSSLPSSPKLPHNGSTGSTPLLRNSHSNSLISECMDSEAETVMQLRNELRDKEMKLTDIRLEALSSAHQLDQLREAMNRMQSEIEKLKAENDRLKSESQGSGCSRAPSQVSISASPRQSMGLSQHSLNLTESTSLDMLLDDTGECSARKEGGRHVKIVVSFQEEMKWKEDSRPHLFLIGCIGVSGKTKWDVLDGVVRRLFKEYIIHVDPVSQLGLNSDSVLGYSIGEIKRSNTSETPELLPCGYLVGENTTISVTVKGLAENSLDSLVFESLIPKPILQRYVSLLIEHRRIILSGPSGTGKTYLANRLSEYIVLREGRELTDGVIATFNVDHKSSKELRQYLSNLADQCNSENNAVDMPLVIILDNLHHVSSLGEIFNGLLNCKYHKCPYIIGTMNQATSSTPNLQLHHNFRWVLCANHTEPVKGFLGRFLRRKLMETEISGRVRNMELVKIIDWIPKVWHHLNRFLEAHSSSDVTIGPRLFLSCPIDVDGSRVWFTDLWNYSIIPYLLEAVREGLQLYGRRAPWEDPAKWVMDTYPWAASPQQHEWPPLLQLRPEDVGFDGYSMPREGSTSKQMPPSDAEGDPLMNMLMRLQEAANYSSPQSYDSDSNSNSHHDDILDSSLESTL

SEQ ID NO: 56474 - protein, 160 aa, Homo sapiens
  Payload ID: 11096
  Gene Symbol: NAV2
  Gene Name: neuron navigator 2
  ENSP ID: ENSP00000431276
MLWPRNLTSWDDSSSVSSGISDTIDNLSTDDINTSSSISSYANTPASSRKNLDVQTDAEKHSQVERNSLWSGDDVKKSDGGSDSGIKMEPGSKWRRNPSDVSDESDKSTSGKKNPVISQTGSWRRGMTAQVGITMPRTKPSAPAGALKTPGTGKTDDAKV

SEQ ID NO: 56475 - protein, 2489 aa, Homo sapiens
  Payload ID: 11096
  Gene Symbol: NAV2
  Gene Name: neuron navigator 2
  ENSP ID: ENSP00000435395
MPAILVASKMKSGLPKPVHSAAPILHVPPARAGPQPCYLKLGSKVEVSKTTYPSQIPLKSQVLQGLQEPAGEGLPLRKSGSVENGFDTQIYTDWANHYLAKSGHKRLIRDLQQDVTDGVLLAQIIQVVANEKIEDINGCPKNRSQMIENIDACLNFLAAKGINIQGLSAEEIRNGNLKAILGLFFSLSRYKQQQQQPQKQHLSSPLPPAVSQVAGAPSQCQAGTPQQQVPVTPQAPCQPHQPAPHQQSKAQAEMQSSASSKDSSQSKIIRFTLGQKKISRLPGPTARVSAAGSEAKTRGGSTTANNRRSQSFNNYDKSKPVTSPPPPPSSHEKEPLASSASSHPGMSDNAPASLESGSSSTPTNCSTSSAIPQPGAATKPWRSKSLSVKHSATVSMLSVKPPGPEAPRPTPEAMKPAPNNQKSMLEKLKLFNSKGGSKAGEGPGSRDTSCERLETLPSFEESEELEAASRMLTTVGPASSSPKIALKGIAQRTFSRALTNKKSSLKGNEKEKEKQQREKDKEKSKDLAKRASVTERLDLKEEPKEDPSGAAVPEMPKKSSKIASFIPKGGKLNSAKKEPMAPSHSGIPKPGMKSMPGKSPSAPAPSKEGERSRSGKLSSGLPQQKPQLDGRHSSSSSSLASSEGKGPGGTTLNHSISSQTVSGSVGTTQTTGSNTVSVQLPQPQQQYNHPNTATVAPFLYRSQTDTEGNVTAESSSTGVSVEPSHFTKTGQPALEELTGEDPEARRLRTVKNIADLRQNLEETMSSLRGTQVTHSTLETTFDTNVTTEMSGRSILSLTGRPTPLSWRLGQSSPRLQAGDAPSMGNGYPPRANASRFINTESGRYVYSAPLRRQLASRGSSVCHVDVSDKAGDEMDLEGISMDAPGYMSDGDVLSKNIRTDDITSGYMTDGGLGLYTRRLNRLPDGMAVVRETLQRNTSLGLGDADSWDDSSSVSSGISDTIDNLSTDDINTSSSISSYANTPASSRKNLDVQTDAEKHSQVERNSLWSGDDVKKSDGGSDSGIKMEPGSKWRRNPSDVSDESDKSTSGKKNPVISQTGSWRRGMTAQVGITMPRTKPSAPAGALKTPGTGKTDDAKVSEKGRLSPKASQVKRSPSDAGRSSGDESKKPLPSSSRTPTANANSFGFKKQSGSAAGLAMITASGVTVTSRSATLGKIPKSSALVSRSAGRKSSMDGAQNQDDGYLALSSRTNLQYRSLPRPSKSNSRNGAGNRSSTSSIDSNISSKSAGLPVPKLREPSKTALGSSLPGLVNQTDKEKGISSDNESVASCNSVKVNPAAQPVSSPAQTSLQPGAKYPDVASPTLRRLFGGKPTKQVPIATAENMKNSVVISNPHATMTQQGNLDSPSGSGVLSSGSSSPLYSKNVDLNQSPLASSPSSAHSAPSNSLTWGTNASSSSAVSKDGLGFQSVSSLHTSCESIDISLSSGGVPSHNSSTGLIASSKDDSLTPFVRTNSVKTTLSESPLSSPAASPKFCRSTLPRKQDSDPHLDRNTLPKKGLRYTPTSQLRTQEDAKEWLRSHSAGGLQDTAANSPFSSGSSVTSPSGTRFNFSQLASPTTVTQMSLSNPTMLRTHSLSNADGQYDPYTDSRFRNSSMSLDEKSRTMSRSGSFRDGFEEESWEKSSVDNFVSRLHSSLHFSLPLFHHARYELVHGSSLSLVSSTSSVYSTPEEKCQSEIRKLRRELDASQEKVSALTTQLTANAHLVAAFEQSLGNMTIRLQSLTMTAEQKDSELNELRKTIELLKKQNAAAQAAINGVINTPELNCKGNGTAQSADLRIRRQHSSDSVSSINSATSHSSVGSNIESDSKKKKRKNWVNIQLRSSFKQAFGKKKSPKSASSHSDIEEMTDSSLPSSPKLPHNGSTGSTPLLRNSHSNSLISECMDSEAETVMQLRNELRDKEMKLTDIRLEALSSAHQLDQLREAMNRMQSEIEKLKAENDRLKSESQGSGCSRAPSQVSISASPRQSMGLSQHSLNLTESTSLDMLLDDTGECSARKEGGRHVKIVVSFQEEMKWKEDSRPHLFLIGCIGVSGKTKWDVLDGVVRRLFKEYIIHVDPVSQLGLNSDSVLGYSIGEIKRSNTSETPELLPCGYLVGENTTISVTVKGLAENSLDSLVFESLIPKPILQRYVSLLIEHRRIILSGPSGTGKTYLANRLSEYIVLREGRELTDGVIATFNVDHKSSKELRQYLSNLADQCNSENNAVDMPLVIILDNLHHVSSLGEIFNGLLNCKYHKCPYIIGTMNQATSSTPNLQLHHNFRWVLCANHTEPVKGFLGRFLRRKLMETEISGRVRNMELVKIIDWIPKVWHHLNRFLEAHSSSDVTIGPRLFLSCPIDVDGSRVWFTDLWNYSIIPYLLEAVREGLQLYGRRAPWEDPAKWVMDTYPWAASPQQHEWPPLLQLRPEDVGFDGYSMPREGSTSKQMPPSDAEGDPLMNMLMRLQEAANYSSPQSYDSDSNSNSHHDDILDSSLESTL

SEQ ID NO: 56476 - protein, 815 aa, Homo sapiens
  Payload ID: 11096
  Gene Symbol: NAV2
  Gene Name: neuron navigator 2
  ENSP ID: ENSP00000437136
MLWPRNLTSWDDSSSVSSGISDTIDNLSTDDINTSSSISSYANTPASSRKNLDVQTDAEKHSQVERNSLWSGDDVKKSDGGSDSGIKMEPGSKWRRNPSDVSDESDKSTSGKKNPVISQTGSWRRGMTAQVGITMPRTKPSAPAGALKTPGTGKTDDAKVSEKGRLSPKASQVKRSPSDAGRSSGDESKKPLPSSSRTPTANANSFGFKKQSGSAAGLAMITASGVTVTSRSATLGKIPKSSALVSRSAGRKSSMDGAQNQDDGYLALSSRTNLQYRSLPRPSKSNSRNGAGNRSSTSSIDSNISSKSAGLPVPKLREPSKTALGSSLPGLVNQTDKEKGISSDNESVASCNSVKVNPAAQPVSSPAQTSLQPGAKYPDVASPTLRRLFGGKPTKQVPIATAENMKNSVVISNPHATMTQQGNLDSPSGSGVLSSGSSSPLYSKNVDLNQSPLASSPSSAHSAPSNSLTWGTNASSSSAVSKDGLGFQSVSSLHTSCESIDISLSSGGVPSHNSSTGLIASSKDDSLTPFVRTNSVKTTLSERYTPTSQLRTQEDAKEWLRSHSAGGLQDTAANSPFSSGSSVTSPSGTRFNFSQLASPTTVTQMSLSNPTMLRTHSLSNADGQYDPYTDSRFRNSSMSLDEKSRTMSRSGSFRDGFEEVHGSSLSLVSSTSSVYSTPEEKCQSEIRKLRRELDASQEKVSALTTQLTANAHLVAAFEQSLGNMTIRLQSLTMTAEQKDSELNELRKTIELLKKQNAAAQAAINGVINTPELNCKGNGTAQSADLRIRRQHSSDSVSSINSATSHSSVGSNIESD

SEQ ID NO: 56477 - protein, 1493 aa, Homo sapiens
  Payload ID: 11096
  Gene Symbol: NAV2
  Gene Name: neuron navigator 2
  Uniprot ID: Q8IVL1
  ENSP ID: ENSP00000437316
MLWPRNLTSWDDSSSVSSGISDTIDNLSTDDINTSSSISSYANTPASSRKNLDVQTDAEKHSQVERNSLWSGDDVKKSDGGSDSGIKMEPGSKWRRNPSDVSDESDKSTSGKKNPVISQTGSWRRGMTAQVGITMPRTKPSAPAGALKTPGTGKTDDAKVSEKGRLSPKASQVKRSPSDAGRSSGDESKKPLPSSSRTPTANANSFGFKKQSGSAAGLAMITASGVTVTSRSATLGKIPKSSALVSRSAGRKSSMDGAQNQDDGYLALSSRTNLQYRSLPRPSKSNSRNGAGNRSSTSSIDSNISSKSAGLPVPKLREPSKTALGSSLPGLVNQTDKEKGISSDNESVASCNSVKVNPAAQPVSSPAQTSLQPGAKYPDVASPTLRRLFGGKPTKQVPIATAENMKNSVVISNPHATMTQQGNLDSPSGSGVLSSGSSSPLYSKNVDLNQSPLASSPSSAHSAPSNSLTWGTNASSSSAVSKDGLGFQSVSSLHTSCESIDISLSSGGVPSHNSSTGLIASSKDDSLTPFVRTNSVKTTLSESDPHLDRNTLPKKGLRYTPTSQLRTQEDAKEWLRSHSAGGLQDTAANSPFSSGSSVTSPSGTRFNFSQLASPTTVTQMSLSNPTMLRTHSLSNADGQYDPYTDSRFRNSSMSLDEKSRTMSRSGSFRDGFEEVHGSSLSLVSSTSSVYSTPEEKCQSEIRKLRRELDASQEKVSALTTQLTANAHLVAAFEQSLGNMTIRLQSLTMTAEQKDSELNELRKTIELLKKQNAAAQAAINGVINTPELNCKGNGTAQSADLRIRRQHSSDSVSSINSATSHSSVGSNIESDSKKKKRKNWLRSSFKQAFGKKKSPKSASSHSDIEEMTDSSLPSSPKLPHNGSTGSTPLLRNSHSNSLISECMDSEAETVMQLRNELRDKEMKLTDIRLEALSSAHQLDQLREAMNRMQSEIEKLKAENDRLKSESQGSGCSRAPSQVSISASPRQSMGLSQHSLNLTESTSLDMLLDDTGECSARKEGGRHVKIVVSFQEEMKWKEDSRPHLFLIGCIGVSGKTKWDVLDGVVRRLFKEYIIHVDPVSQLGLNSDSVLGYSIGEIKRSNTSETPELLPCGYLVGENTTISVTVKGLAENSLDSLVFESLIPKPILQRYVSLLIEHRRIILSGPSGTGKTYLANRLSEYIVLREGRELTDGVIATFNVDHKSSKELRQYLSNLADQCNSENNAVDMPLVIILDNLHHVSSLGEIFNGLLNCKYHKCPYIIGTMNQATSSTPNLQLHHNFRWVLCANHTEPVKGFLGRFLRRKLMETEISGRVRNMELVKIIDWIPKVWHHLNRFLEAHSSSDVTIGPRLFLSCPIDVDGSRVWFTDLWNYSIIPYLLEAVREGLQLYGRRAPWEDPAKWVMDTYPWAASPQQHEWPPLLQLRPEDVGFDGYSMPREGSTSKQMPPSDAEGDPLMNMLMRLQEAANYSSPQSYDSDSNSNSHHDDILDSSLESTL

SEQ ID NO: 56478 - protein, 2433 aa, Homo sapiens
  Payload ID: 11096
  Gene Symbol: NAV2
  Gene Name: neuron navigator 2
  ENSP ID: ENSP00000443489
MPAILVASKMKSGLPKPVHSAAPILHVPPARAGPQPCYLKLGSKVEVSKTTYPSQIPLKSQVLQGLQEPAGEGLPLRKSGSVENGFDTQIYTDWANHYLAKSGHKRLIRDLQQDVTDGVLLAQIIQVVANEKIEDINGCPKNRSQMIENIDACLNFLAAKGINIQGLSAEEIRNGNLKAILGLFFSLSRYKQQQQQPQKQHLSSPLPPAVSQVAGAPSQCQAGTPQQQVPVTPQAPCQPHQPAPHQQSKAQAEMQSRLPGPTARVSAAGSEAKTRGGSTTANNRRSQSFNNYDKSKPVTSPPPPPSSHEKEPLASSASSHPGMSDNAPASLESGSSSTPTNCSTSSAIPQPGAATKPWRSKSLSVKHSATVSMLSVKPPGPEAPRPTPEAMKPAPNNQKSMLEKLKLFNSKGGSKAGEGPGSRDTSCERLETLPSFEESEELEAASRMLTTVGPASSSPKIALKGIAQRTFSRALTNKKSSLKGNEKEKEKQQREKDKEKSKDLAKRASVTERLDLKEEPKEDPSGAAVPEMPKKSSKIASFIPKGGKLNSAKKEPMAPSHSGIPKPGMKSMPGKSPSAPAPSKEGERSRSGKLSSGLPQQKPQLDGRHSSSSSSLASSEGKGPGGTTLNHSISSQTVSGSVGTTQTTGSNTVSVQLPQPQQQYNHPNTATVAPFLYRSQTDTEGNVTAESSSTGVSVEPSHFTKTGQPALEELTGEDPEARRLRTVKNIADLRQNLEETMSSLRGTQVTHSTLETTFDTNVTTEMSGRSILSLTGRPTPLSWRLGQSSPRLQAGDAPSMGNGYPPRANASRFINTESGRYVYSAPLRRQLASRGSSVCHVDVSDKAGDEMDLEGISMDAPGYMSDGDVLSKNIRTDDITSGYMTDGGLGLYTRRLNRLPDGMAVVRETLQRNTSLGLGDADSWDDSSSVSSGISDTIDNLSTDDINTSSSISSYANTPASSRKNLDVQTDAEKHSQVERNSLWSGDDVKKSDGGSDSGIKMEPGSKWRRNPSDVSDESDKSTSGKKNPVISQTGSWRRGMTAQVGITMPRTKPSAPAGALKTPGTGKTDDAKVSEKGRLSPKASQVKRSPSDAGRSSGDESKKPLPSSSRTPTANANSFGFKKQSGSAAGLAMITASGVTVTSRSATLGKIPKSSALVSRSAGRKSSMDGAQNQDDGYLALSSRTNLQYRSLPRPSKSNSRNGAGNRSSTSSIDSNISSKSAGLPVPKLREPSKTALGSSLPGLVNQTDKEKGISSDNESVASCNSVKVNPAAQPVSSPAQTSLQPGAKYPDVASPTLRRLFGGKPTKQVPIATAENMKNSVVISNPHATMTQQGNLDSPSGSGVLSSGSSSPLYSKNVDLNQSPLASSPSSAHSAPSNSLTWGTNASSSSAVSKDGLGFQSVSSLHTSCESIDISLSSGGVPSHNSSTGLIASSKDDSLTPFVRTNSVKTTLSESPLSSPAASPKFCRSTLPRKQDSDPHLDRNTLPKKGLRYTPTSQLRTQEDAKEWLRSHSAGGLQDTAANSPFSSGSSVTSPSGTRFNFSQLASPTTVTQMSLSNPTMLRTHSLSNADGQYDPYTDSRFRNSSMSLDEKSRTMSRSGSFRDGFEEVHGSSLSLVSSTSSVYSTPEEKCQSEIRKLRRELDASQEKVSALTTQLTANAHLVAAFEQSLGNMTIRLQSLTMTAEQKDSELNELRKTIELLKKQNAAAQAAINGVINTPELNCKGNGTAQSADLRIRRQHSSDSVSSINSATSHSSVGSNIESDSKKKKRKNWVNIQLRSSFKQAFGKKKSPKSASSHSDIEEMTDSSLPSSPKLPHNGSTGSTPLLRNSHSNSLISECMDSEAETVMQLRNELRDKEMKLTDIRLEALSSAHQLDQLREAMNRMQSEIEKLKAENDRLKSESQGSGCSRAPSQVSISASPRQSMGLSQHSLNLTESTSLDMLLDDTGECSARKEGGRHVKIVVSFQEEMKWKEDSRPHLFLIGCIGVSGKTKWDVLDGVVRRLFKEYIIHVDPVSQLGLNSDSVLGYSIGEIKRSNTSETPELLPCGYLVGENTTISVTVKGLAENSLDSLVFESLIPKPILQRYVSLLIEHRRIILSGPSGTGKTYLANRLSEYIVLREGRELTDGVIATFNVDHKSSKELRQYLSNLADQCNSENNAVDMPLVIILDNLHHVSSLGEIFNGLLNCKYHKCPYIIGTMNQATSSTPNLQLHHNFRWVLCANHTEPVKGFLGRFLRRKLMETEISGRVRNMELVKIIDWIPKVWHHLNRFLEAHSSSDVTIGPRLFLSCPIDVDGSRVWFTDLWNYSIIPYLLEAVREGLQLYGRRAPWEDPAKWVMDTYPWAASPQQHEWPPLLQLRPEDVGFDGYSMPREGSTSKQMPPSDAEGDPLMNMLMRLQEAANYSSPQSYDSDSNSNSHHDDILDSSLESTL

SEQ ID NO: 56479 - protein, 2385 aa, Homo sapiens
  Payload ID: 11097
  Gene Symbol: NAV3
  Gene Name: neuron navigator 3
  Uniprot ID: Q8IVL0
  ENSP ID: ENSP00000381007
MPVLGVASKLRQPAVGSKPVHTALPIPNLGTTGSQHCSSRPLELTETESSMLSCQLALKSTCEFGEKKPLQGKAKEKEDSKIYTDWANHYLAKSGHKRLIKDLQQDIADGVLLAEIIQIIANEKVEDINGCPRSQSQMIENVDVCLSFLAARGVNVQGLSAEEIRNGNLKAILGLFFSLSRYKQQQHHQQQYYQSLVELQQRVTHASPPSEASQAKTQQDMQSSLAARYATQSNHSGIATSQKKPTRLPGPSRVPAAGSSSKVQGASNLNRRSQSFNSIDKNKPPNYANGNEKDSSKGPQSSSGVNGNVQPPSTAGQPPASAIPSPSASKPWRSKSMNVKHSATSTMLTVKQSSTATSPTPSSDRLKPPVSEGVKTAPSGQKSMLEKFKLVNARTALRPPQPPSSGPSDGGKDDDAFSESGEMEGFNSGLNSGGSTNSSPKVSPKLAPPKAGSKNLSNKKSLLQPKEKEEKNRDKNKVCTEKPVKEEKDQVTEMAPKKTSKIASLIPKGSKTTAAKKESLIPSSSGIPKPGSKVPTVKQTISPGSTASKESEKFRTTKGSPSQSLSKPITMEKASASSCPAPLEGREAGQASPSGSCTMTVAQSSGQSTGNGAVQLPQQQQHSHPNTATVAPFIYRAHSENEGTALPSADSCTSPTKMDLSYSKTAKQCLEEISGEDPETRRMRTVKNIADLRQNLEETMSSLRGTQISHSTLETTFDSTVTTEVNGRTIPNLTSRPTPMTWRLGQACPRLQAGDAPSLGAGYPRSGTSRFIHTDPSRFMYTTPLRRAAVSRLGNMSQIDMSEKASSDLDMSSEVDVGGYMSDGDILGKSLRTDDINSGYMTDGGLNLYTRSLNRIPDTATSRDIIQRGVHDVTVDADSWDDSSSVSSGLSDTLDNISTDDLNTTSSVSSYSNITVPSRKNTQLRTDSEKRSTTDETWDSPEELKKPEEDFDSHGDAGGKWKTVSSGLPEDPEKAGQKASLSVSQTGSWRRGMSAQGGAPSRQKAGTSALKTPGKTDDAKASEKGKAPLKGSSLQRSPSDAGKSSGDEGKKPPSGIGRSTATSSFGFKKPSGVGSSAMITSSGATITSGSATLGKIPKSAAIGGKSNAGRKTSLDGSQNQDDVVLHVSSKTTLQYRSLPRPSKSSTSGIPGRGGHRSSTSSIDSNVSSKSAGATTSKLREPTKIGSGRSSPVTVNQTDKEKEKVAVSDSESVSLSGSPKSSPTSASACGAQGLRQPGSKYPDIASPTFRRLFGAKAGGKSASAPNTEGVKSSSVMPSPSTTLARQGSLESPSSGTGSMGSAGGLSGSSSPLFNKPSDLTTDVISLSHSLASSPASVHSFTSGGLVWAANMSSSSAGSKDTPSYQSMTSLHTSSESIDLPLSHHGSLSGLTTGTHEVQSLLMRTGSVRSTLSESMQLDRNTLPKKGLRYTPSSRQANQEEGKEWLRSHSTGGLQDTGNQSPLVSPSAMSSSAAGKYHFSNLVSPTNLSQFNLPGPSMMRSNSIPAQDSSFDLYDDSQLCGSATSLEERPRAISHSGSFRDSMEEVHGSSLSLVSSTSSLYSTAEEKAHSEQIHKLRRELVASQEKVATLTSQLSANAHLVAAFEKSLGNMTGRLQSLTMTAEQKESELIELRETIEMLKAQNSAAQAAIQGALNGPDHPPKDLRIRRQHSSESVSSINSATSHSSIGSGNDADSKKKKKKNWVNSRGSELRSSFKQAFGKKKSTKPPSSHSDIEELTDSSLPASPKLPHNAGDCGSASMKPSQSASASPLVWPPKKRQNGPVIYKHRSRICECTEAEAEIILQLKSELREKELKLTDIRLEALSSAHHLDQIREAMNRMQNEIEILKAENDRLKAETGNTAKPTRPPSESSSSTSSSSSRQSLGLSLNNLNITEAVSSDILLDDAGDATGHKDGRSVKIIVSISKGYGRAKDQKSQAYLIGSIGVSGKTKWDVLDGVIRRLFKEYVFRIDTSTSLGLSSDCIASYCIGDLIRSHNLEVPELLPCGYLVGDNNIITVNLKGVEENSLDSFVFDTLIPKPITQRYFNLLMEHHRIILSGPSGTGKTYLANKLAEYVITKSGRKKTEDAIATFNVDHKSSKELQQYLANLAEQCSADNNGVELPVVIILDNLHHVGSLSDIFNGFLNCKYNKCPYIIGTMNQGVSSSPNLELHHNFRWVLCANHTEPVKGFLGRYLRRKLIEIEIERNIRNNDLVKIIDWIPKTWHHLNSFLETHSSSDVTIGPRLFLPCPMDVEGSRVWFMDLWNYSLVPYILEAVREGLQMYGKRTPWEDPSKWVLDTYPWSSATLPQESPALLQLRPEDVGYESCTSTKEATTSKHIPQTDTEGDPLMNMLMKLQEAANYSSTQSCDSESTSHHEDILDSSLESTL

SEQ ID NO: 56480 - protein, 2363 aa, Homo sapiens
  Payload ID: 11097
  Gene Symbol: NAV3
  Gene Name: neuron navigator 3
  Uniprot ID: Q8IVL0
  ENSP ID: ENSP00000446132
MPVLGVASKLRQPAVGSKPVHTALPIPNLGTTGSQHCSSRPLELTETESSMLSCQLALKSTCEFGEKKPLQGKAKEKEDSKIYTDWANHYLAKSGHKRLIKDLQQDIADGVLLAEIIQIIANEKVEDINGCPRSQSQMIENVDVCLSFLAARGVNVQGLSAEEIRNGNLKAILGLFFSLSRYKQQQHHQQQYYQSLVELQQRVTHASPPSEASQAKTQQDMQSSLAARYATQSNHSGIATSQKKPTRLPGPSRVPAAGSSSKVQGASNLNRRSQSFNSIDKNKPPNYANGNEKDSSKGPQSSSGVNGNVQPPSTAGQPPASAIPSPSASKPWRSKSMNVKHSATSTMLTVKQSSTATSPTPSSDRLKPPVSEGVKTAPSGQKSMLEKFKLVNARTALRPPQPPSSGPSDGGKDDDAFSESGEMEGFNSGLNSGGSTNSSPKVSPKLAPPKAGSKNLSNKKSLLQPKEKEEKNRDKNKVCTEKPVKEEKDQVTEMAPKKTSKIASLIPKGSKTTAAKKESLIPSSSGIPKPGSKVPTVKQTISPGSTASKESEKFRTTKGSPSQSLSKPITMEKASASSCPAPLEGREAGQASPSGSCTMTVAQSSGQSTGNGAVQLPQQQQHSHPNTATVAPFIYRAHSENEGTALPSADSCTSPTKMDLSYSKTAKQCLEEISGEDPETRRMRTVKNIADLRQNLEETMSSLRGTQISHSTLETTFDSTVTTEVNGRTIPNLTSRPTPMTWRLGQACPRLQAGDAPSLGAGYPRSGTSRFIHTDPSRFMYTTPLRRAAVSRLGNMSQIDMSEKASSDLDMSSEVDVGGYMSDGDILGKSLRTDDINSGYMTDGGLNLYTRSLNRIPDTATSRDIIQRGVHDVTVDADSWDDSSSVSSGLSDTLDNISTDDLNTTSSVSSYSNITVPSRKNTQLRTDSEKRSTTDETWDSPEELKKPEEDFDSHGDAGGKWKTVSSGLPEDPEKAGQKASLSVSQTGSWRRGMSAQGGAPSRQKAGTSALKTPGKTDDAKASEKGKAPLKGSSLQRSPSDAGKSSGDEGKKPPSGIGRSTATSSFGFKKPSGVGSSAMITSSGATITSGSATLGKIPKSAAIGGKSNAGRKTSLDGSQNQDDVVLHVSSKTTLQYRSLPRPSKSSTSGIPGRGGHRSSTSSIDSNVSSKSAGATTSKLREPTKIGSGRSSPVTVNQTDKEKEKVAVSDSESVSLSGSPKSSPTSASACGAQGLRQPGSKYPDIASPTFRRLFGAKAGGKSASAPNTEGVKSSSVMPSPSTTLARQGSLESPSSGTGSMGSAGGLSGSSSPLFNKPSDLTTDVISLSHSLASSPASVHSFTSGGLVWAANMSSSSAGSKDTPSYQSMTSLHTSSESIDLPLSHHGSLSGLTTGTHEVQSLLMRTGSVRSTLSESMQLDRNTLPKKGLRYTPSSRQANQEEGKEWLRSHSTGGLQDTGNQSPLVSPSAMSSSAAGKYHFSNLVSPTNLSQFNLPGPSMMRSNSIPAQDSSFDLYDDSQLCGSATSLEERPRAISHSGSFRDSMEEVHGSSLSLVSSTSSLYSTAEEKAHSEQIHKLRRELVASQEKVATLTSQLSANAHLVAAFEKSLGNMTGRLQSLTMTAEQKESELIELRETIEMLKAQNSAAQAAIQGALNGPDHPPKDLRIRRQHSSESVSSINSATSHSSIGSGNDADSKKKKKKNWVNSRGSELRSSFKQAFGKKKSTKPPSSHSDIEELTDSSLPASPKLPHNAGDCGSASMKPSQSASAICECTEAEAEIILQLKSELREKELKLTDIRLEALSSAHHLDQIREAMNRMQNEIEILKAENDRLKAETGNTAKPTRPPSESSSSTSSSSSRQSLGLSLNNLNITEAVSSDILLDDAGDATGHKDGRSVKIIVSISKGYGRAKDQKSQAYLIGSIGVSGKTKWDVLDGVIRRLFKEYVFRIDTSTSLGLSSDCIASYCIGDLIRSHNLEVPELLPCGYLVGDNNIITVNLKGVEENSLDSFVFDTLIPKPITQRYFNLLMEHHRIILSGPSGTGKTYLANKLAEYVITKSGRKKTEDAIATFNVDHKSSKELQQYLANLAEQCSADNNGVELPVVIILDNLHHVGSLSDIFNGFLNCKYNKCPYIIGTMNQGVSSSPNLELHHNFRWVLCANHTEPVKGFLGRYLRRKLIEIEIERNIRNNDLVKIIDWIPKTWHHLNSFLETHSSSDVTIGPRLFLPCPMDVEGSRVWFMDLWNYSLVPYILEAVREGLQMYGKRTPWEDPSKWVLDTYPWSSATLPQESPALLQLRPEDVGYESCTSTKEATTSKHIPQTDTEGDPLMNMLMKLQEAANYSSTQSCDSESTSHHEDILDSSLESTL

SEQ ID NO: 56481 - protein, 679 aa, Homo sapiens
  Payload ID: 11097
  Gene Symbol: NAV3
  Gene Name: neuron navigator 3
  ENSP ID: ENSP00000446628
MPVLGVASKLRQPAVGSKPVHTALPIPNLGTTGSQHCSSRPLELTETESSMLSCQLALKSTCEFGEKKPLQGKAKEKEDSKIYTDWANHYLAKSGHKRLIKDLQQDIADGVLLAEIIQIIANEKVEDINGCPRSQSQMIENVDVCLSFLAARGVNVQGLSAEEIRNGNLKAILGLFFSLSRYKQQQHHQQQYYQSLVELQQRVTHASPPSEASQAKTQQDMQSSLAARYATQSNHSGIATSQKKPTRLPGPSRVPAAGSSSKVQGASNLNRRSQSFNSIDKNKPPNYANGNEKDSSKGPQSSSGVNGNVQPPSTAGQPPASAIPSPSASKPWRSKSMNVKHSATSTMLTVKQSSTATSPTPSSDRLKPPVSEGVKTAPSGQKSMLEKFKLVNARTALRPPQPPSSGPSDGGKDDDAFSESGEMEGFNSGLNSGGSTNSSPKVSPKLAPPKAGSKNLSNKKSLLQPKEKEEKNRDKNKVCTEKPVKEEKDQVTEMAPKKTSKIASLIPKGSKTTAAKKESLIPSSSGIPKPGSKVPTVKQTISPGSTASKESEKFRTTKGSPSQSLSKPITMEKASASSCPAPLEGREAGQASPSGSCTMTVAQSSGQSTGNGAVQLPQQQQHSHPNTATVAPFIYRAHSENEGTALPSADSCTSPTKMDLSYSKTAKQCLEEISGEDPE

SEQ ID NO: 56482 - protein, 1258 aa, Homo sapiens
  Payload ID: 11097
  Gene Symbol: NAV3
  Gene Name: neuron navigator 3
  ENSP ID: ENSP00000446644
  MOD_RES (1)..(1): Any amino acid
XKRSTTDETWDSPEELKKPEEDFDSHGDAGGKWKTVSSGLPEDPEKAGQKASLSVSQTGSWRRGMSAQGGAPSRQKAGTSALKTPGKTDDAKASEKGKAPLKGSSLQRSPSDAGKSSGDEGKKPPSGIGRSTATSSFGFKKPSGVGSSAMITSSGATITSGSATLGKIPKSAAIGGKSNAGRKTSLDGSQNQDDVVLHVSSKTTLQYRSLPRPSKSSTSGIPGRGGHRSSTSSIDSNVSSKSAGATTSKLREPTKIGSGRSSPVTVNQTDKEKEKVAVSDSESVSLSGSPKSSPTSASACGAQGLRQPGSKYPDIASPTFRRYTPSSRQANQEEGKEWLRSHSTGGLQDTGNQSPLVSPSAMSSSAAGKYHFSNLVSPTNLSQFNLPGPSMMRSNSIPAQDSSFDLYDDSQLCGSATSLEERPRAISHSGSFRDSMEEVHGSSLSLVSSTSSLYSTAEEKAHSEQIHKLRRELVASQEKVATLTSQLSANAHLVAAFEKSLGNMTGRLQSLTMTAEQKESELIELRETIEMLKAQNSAAQAAIQGALNGPDHPPKDLRIRRQHSSESVSSINSATSHSSIGSGNDADSKKKKKKNWVNSRGSELRSSFKQAFGKKKSTKPPSSHSDIEELTDSSLPASPKLPHNAGDCGSASMKPSQSASAICECTEAEAEIILQLKSELREKELKLTDIRLEALSSAHHLDQIREAMNRMQNEIEILKAENDRLKAETGNTAKPTRPPSESSSSTSSSSSRQSLGLSLNNLNITEAVSSDILLDDAGDATGHKDGRSVKIIVSISKGYGRAKDQKSQAYLIGSIGVSGKTKWDVLDGVIRRLFKEYVFRIDTSTSLGLSSDCIASYCIGDLIRSHNLEVPELLPCGYLVGDNNIITVNLKGVEENSLDSFVFDTLIPKPITQRYFNLLMEHHRIILSGPSGTGKTYLANKLAEYVITKSGRKKTEDAIATFNVDHKSSKELQQYLANLAEQCSADNNGVELPVVIILDNLHHVGSLSDIFNGFLNCKYNKCPYIIGTMNQGVSSSPNLELHHNFRWVLCANHTEPVKGFLGRYLRRKLIEIEIERNIRNNDLVKIIDWIPKTWHHLNSFLETHSSSDVTIGPRLFLPCPMDVEGSRVWFMDLWNYSLVPYILEAVREGLQMYGKRTPWEDPSKWVLDTYPWSSATLPQESPALLQLRPEDVGYESCTSTKEATTSKHIPQTDTEGDPLMNMLMKLQEAANYSSTQSCDSESTSHHEDILDSSLESTL

SEQ ID NO: 56483 - protein, 233 aa, Homo sapiens
  Payload ID: 11097
  Gene Symbol: NAV3
  Gene Name: neuron navigator 3
  ENSP ID: ENSP00000448037
  MOD_RES (1)..(1): Any amino acid
XNVQGLSAEEIRNGNLKAILGLFFSLSRYKQQQHHQQQYYQSLVELQQRVTHASPPSEASQAKTQQDMQSRLPGPSRVPAAGSSSKVQGASNLNRRSQSFNSIDKNKPPNYANGNEKDSSKGPQSSSGVNGNVQPPSTAGQPPASAIPSPSASKPWRSKSMNVKHSATSTMLTVKQSSTATSPTPSSDRLKPPVSEGVKTAPSGQKSMLEKFKLVNARTALRPPQPPSSGPSD

SEQ ID NO: 56484 - protein, 253 aa, Homo sapiens
  Payload ID: 11097
  Gene Symbol: NAV3
  Gene Name: neuron navigator 3
  ENSP ID: ENSP00000448243
  MOD_RES (1)..(1): Any amino acid
XAFRLPLTSDAHELLFSSKSRVSYIIALILVDLLTPLIMKRWVLCANHTEPVKGFLGRYLRRKLIEIEIERNIRNNDLVKIIDWIPKTWHHLNSFLETHSSSDVTIGPRLFLPCPMDVEGSRVWFMDLWNYSLVPYILEAVREGLQMYGKRTPWEDPSKWVLDTYPWSSATLPQESPALLQLRPEDVGYESCTSTKEATTSKHIPQTDTEGDPLMNMLMKLQEAANYSSTQSCDSESTSHHEDILDSSLESTL

SEQ ID NO: 56485 - protein, 799 aa, Homo sapiens
  Payload ID: 11097
  Gene Symbol: NAV3
  Gene Name: neuron navigator 3
  ENSP ID: ENSP00000448303
KDTPSYQSMTSLHTSSESIDLPLSHHGSLSGLTTGTHEVQSLLMRTGSVRSTLSERYTPSSRQANQEEGKEWLRSHSTGGLQDTGNQSPLVSPSAMSSSAAGKYHFSNLVSPTNLSQFNLPGPSMMRSNSIPAQDSSFDLYDDSQLCGSATSLEERPRAISHSGSFRDSMEEVHGSSLSLVSSTSSLYSTAEEKAHSEQIHKLRRELVASQEKVATLTSQLSANAHLVAAFEKSLGNMTGRLQSLTMTAEQKESELIELRETIEMLKAQNSAAQAAIQGALNGPDHPPKDLRIRRQHSSESVSSINSATSHSSIGSGNDADSKKKKKKNWLRSSFKQAFGKKKSTKPPSSHSDIEELTDSSLPASPKLPHNAGDCGSASMKPSQSASAICECTEAEAEIILQLKSELREKELKLTDIRLEALSSAHHLDQIREAMNRMQNEIEILKAENDRLKAETGNTAKPTRPPSESSSSTSSSSSRQSLGLSLNNLNITEAVSSDILLDDAGDATGHKDGRSVKIIVSISKGYGRAKDQKSQAYLIGSIGVSGKTKWDVLDGVIRRLFKEYVFRIDTSTSLGLSSDCIASYCIGDLIRSHNLEVPELLPCGYLVGDNNIITVNLKGVEENSLDSFVFDTLIPKPITQRYFNLLMEHHRIILSGPSGTGKTYLANKLAEYVITKSGRKKTEDAIATFNVDHKSSKELQQYLANLAEQCSADNNGVELPVVIILDNLHHVGSLSDIFNGFLNCKYNKCPYIIGTMNQGVSSSPNLELHHNFRWVLCANHTEPVKGFLGRYLRRKLIEI

SEQ ID NO: 56486 - protein, 185 aa, Homo sapiens
  Payload ID: 11098
  Gene Symbol:
  Gene Name: neuron specific gene family member 1 [Source:EntrezGene
  Acc:27065]
  Uniprot ID: P42857
  ENSP ID: ENSP00000381049
MVKLGNNFAEKGTKQPLLEDGFDTIPLMTPLDVNQLQFPPPDKVVVKTKTEYEPDRKKGKARPPQIAEFTVSITEGVTERFKVSVLVLFALAFLTCVVFLVVYKVYKYDRACPDGFVLKNTQCIPEGLESYYAEQDSSAREKFYTVINHYNLAKQSITRSVSPWMSVLSEEKLSEQETEAAEKSA

SEQ ID NO: 56487 - protein, 185 aa, Homo sapiens; identical to SEQ ID NO: 56486
  Payload ID: 11098
  Gene Symbol:
  Gene Name: neuron specific gene family member 1 [Source:EntrezGene
  Acc:27065]
  Uniprot ID: P42857
  ENSP ID: ENSP00000388823

SEQ ID NO: 56488 - protein, 185 aa, Homo sapiens; identical to SEQ ID NO: 56486
  Payload ID: 11098
  Gene Symbol:
  Gene Name: neuron specific gene family member 1 [Source:EntrezGene
  Acc:27065]
  Uniprot ID: P42857
  ENSP ID: ENSP00000408833

SEQ ID NO: 56489 - protein, 185 aa, Homo sapiens; identical to SEQ ID NO: 56486
  Payload ID: 11098
  Gene Symbol:
  Gene Name: neuron specific gene family member 1 [Source:EntrezGene
  Acc:27065]
  Uniprot ID: P42857
  ENSP ID: ENSP00000421841

SEQ ID NO: 56490 - protein, 185 aa, Homo sapiens; identical to SEQ ID NO: 56486
  Payload ID: 11098
  Gene Symbol:
  Gene Name: neuron specific gene family member 1 [Source:EntrezGene
  Acc:27065]
  Uniprot ID: P42857
  ENSP ID: ENSP00000425345

SEQ ID NO: 56491 - protein, 185 aa, Homo sapiens; identical to SEQ ID NO: 56486
  Payload ID: 11098
  Gene Symbol:
  Gene Name: neuron specific gene family member 1 [Source:EntrezGene
  Acc:27065]
  Uniprot ID: P42857
  ENSP ID: ENSP00000425423

SEQ ID NO: 56492 - protein, 146 aa, Homo sapiens
  Payload ID: 11098
  Gene Symbol:
  Gene Name: neuron specific gene family member 1 [Source:EntrezGene
  Acc:27065]
  ENSP ID: ENSP00000425803
MVKLGNNFAEKGTKQPLLEDGFDTIPLMTPLDVNQLQFPPPDKVSVLVLFALAFLTCVVFLVVYKVYKYDRACPDGFVLKNTQCIPEGLESYYAEQDSSAREKFYTVINHYNLAKQSITRSVSPWMSVLSEEKLSEQETEAAEKSA

SEQ ID NO: 56493 - protein, 185 aa, Homo sapiens; identical to SEQ ID NO: 56486
  Payload ID: 11098
  Gene Symbol:
  Gene Name: neuron specific gene family member 1 [Source:EntrezGene
  Acc:27065]
  Uniprot ID: P42857
  ENSP ID: ENSP00000426358

SEQ ID NO: 56494 - protein, 185 aa, Homo sapiens; identical to SEQ ID NO: 56486
  Payload ID: 11098
  Gene Symbol:
  Gene Name: neuron specific gene family member 1 [Source:EntrezGene
  Acc:27065]
  Uniprot ID: P42857
  ENSP ID: ENSP00000480081

SEQ ID NO: 56495 - protein, 190 aa, Homo sapiens [sequence omitted]

SEQ ID NO: 56496 - protein, 172 aa, Homo sapiens
  Payload ID: 11099
  Gene Symbol: NCS1
  Gene Name: neuronal calcium sensor 1
  Uniprot ID: P62166
  ENSP ID: ENSP00000486695
MATITEKEVQQWYKGFIKDCPSGQLDAAGFQKIYKQFFPFGDPTKFATFVFNVFDENKDGRIEFSEFIQALSVTSRGTLDEKLRWAFKLYDLDNDGYITRNEMLDIVDAIYQMVGNTVELPEEENTPEKRVDRIFAMMDKNADGKLTLQEFQEGSKADPSIVQALSLYDGLV

SEQ ID NO: 56497 - protein, 1183 aa, Homo sapiens
  Payload ID: 11100
  Gene Symbol: NRCAM
  Gene Name: neuronal cell adhesion molecule
  Uniprot ID: Q92823
  ENSP ID: ENSP00000325269
MQLKIMPKKKRLSAGRVPLILFLCQMISALEVPLDLVQPPTITQQSPKDYIIDPRENIVIQCEAKGKPPPSFSWTRNGTHFDIDKDPLVTMKPGTGTLIINIMSEGKAETYEGVYQCTARNERGAAVSNNIVVRPSRSPLWTKEKLEPITLQSGQSLVLPCRPPIGLPPPIIFWMDNSFQRLPQSERVSQGLNGDLYFSNVLPEDTREDYICYARFNHTQTIQQKQPISVKVISVDELNDTIAANLSDTEFYGAKSSRERPPTFLTPEGNASNKEELRGNVLSLECIAEGLPTPIIYWAKEDGMLPKNRTVYKNFEKTLQIIHVSEADSGNYQCIAKNALGAIHHTISVRVKAAPYWITAPQNLVLSPGEDGTLICRANGNPKPRISWLTNGVPIEIAPDDPSRKIDGDTIIFSNVQERSSAVYQCNASNEYGYLLANAFVNVLAEPPRILTPANTLYQVIANRPALLDCAFFGSPLPTIEWFKGAKGSALHEDIYVLHENGTLEIPVAQKDSTGTYTCVARNKLGMAKNEVHLEIKDPTWIVKQPEYAVVQRGSMVSFECKVKHDHTLSLTVLWLKDNRELPSDERFTVDKDHLVVADVSDDDSGTYTCVANTTLDSVSASAVLSVVDVPNPPFDLELTDQLDKSVQLSWTPGDDNNSPITKFIIEYEDAMHKPGLWHHQTEVSGTQTTAQLKLSPYVNYSFRVMAVNSIGKSLPSEASEQYLTKASEPDKNPTAVEGLGSEPDNLVITWKPLNGFESNGPGLQYKVSWRQKDGDDEWTSVVVANVSKYIVSGTPTFVPYLIKVQALNDMGFAPEPAVVMGHSGEDLPMVAPGNVRVNVVNSTLAEVHWDPVPLKSIRGHLQGYRIYYWKTQSSSKRNRRHIEKKILTFQGSKTHGMLPGLEPFSHYTLNVRVVNGKGEGPASPDRVFNTPEGVPSAPSSLKIVNPTLDSLTLEWDPPSHPNGILTEYTLKYQPINSTHELGPLVDLKIPANKTRWTLKNLNFSTRYKFYFYAQTSAGSGSQITEEAVTTVDEAMASRQVDIATQGWFIGLMCAVALLILILLIVCFIRRNKGGKYPVKEKEDAHADPEIQPMKEDDGTFGEYSDAEDHKPLKKGSRTPSDRTVKKEDSDDSLVDYGEGVNGQFNEDGSFIGQYSGKKEKEPAEGNESSEAPSPVNAMNSFV

SEQ ID NO: 56498 - protein, 1299 aa, Homo sapiens
  Payload ID: 11100
  Gene Symbol: NRCAM
  Gene Name: neuronal cell adhesion molecule
  ENSP ID: ENSP00000368308
MPKKKRLSAGRVPLILFLCQMISALEVPLDPKLLEDLVQPPTITQQSPKDYIIDPRENIVIQCEAKGKPPPSFSWTRNGTHFDIDKDPLVTMKPGTGTLIINIMSEGKAETYEGVYQCTARNERGAAVSNNIVVRPSRSPLWTKEKLEPITLQSGQSLVLPCRPPIGLPPPIIFWMDNSFQRLPQSERVSQGLNGDLYFSNVLPEDTREDYICYARFNHTQTIQQKQPISVKVISVDELNDTIAANLSDTEFYGAKSSRERPPTFLTPEGNASNKEELRGNVLSLECIAEGLPTPIIYWAKEDGMLPKNRTVYKNFEKTLQIIHVSEADSGNYQCIAKNALGAIHHTISVRVKAAPYWITAPQNLVLSPGEDGTLICRANGNPKPRISWLTNGVPIEIAPDDPSRKIDGDTIIFSNVQERSSAVYQCNASNEYGYLLANAFVNVLAEPPRILTPANTLYQVIANRPALLDCAFFGSPLPTIEWFKGAKGSALHEDIYVLHENGTLEIPVAQKDSTGTYTCVARNKLGMAKNEVHLEIKDPTWIVKQPEYAVVQRGSMVSFECKVKHDHTLSLTVLWLKDNRELPSDERFTVDKDHLVVADVSDDDSGTYTCVANTTLDSVSASAVLSVVAPTPTPAPVYDVPNPPFDLELTDQLDKSVQLSWTPGDDNNSPITRIHHEYEDAMHKPGLWHHQTEVSGTQTTAQLKLSPYVNYSFRVMAVNSIGKSLPSEASEQYLTKASEPDKNPTAVEGLGSEPDNLVITWKPLNGFESNGPGLQYKVSWRQKDGDDEWTSVVVANVSKYIVSGTPTFVPYLIKVQALNDMGFAPEPAVVMGHSGEDLPMVAPGNVRVNVVNSTLAEVHWDPVPLKSIRGHLQGYRIYYWKTQSSSKRNRRHIEKKILTFQGSKTHGMLPGLEPFSHYTLNVRVVNGKGEGPASPDRVFNTPEGVPSAPSSLKIVNPTLDSLTLEWDPPSHPNGILTEYTLKYQPINSTHELGPLVDLKIPANKTRWTLKNLNFSTRYKFYFYAQTSAGSGSQITEEAVTTVDEAGILPPDVGAGKVQAVNPRISNLTAAAAETYANISWEYEGPEHVNFYVEYGVAGSKEEWRKEIVNGSRSFFGLKGLMPGTAYKVRVGAVGDSGFVSSEDVFETGPAMASRQVDIATQGWFIGLMCAVALLILILLIVCFIRRNKGGKYPVKEKEDAHADPEIQPMKEDDGTFGEYSDAEDHKPLKKGSRTPSDRTVKKEDSDDSLVDYGEGVNGQFNEDGSFIGQYSGKKEKEPAEGNESSEAPSPVNAMNSFV

SEQ ID NO: 56499 - protein, 1192 aa, Homo sapiens
  Payload ID: 11100
  Gene Symbol: NRCAM
  Gene Name: neuronal cell adhesion molecule
  Uniprot ID: Q92823
  ENSP ID: ENSP00000368310
MQLKIMPKKKRLSAGRVPLILFLCQMISALEVPLDPKLLEDLVQPPTITQQSPKDYIIDPRENIVIQCEAKGKPPPSFSWTRNGTHFDIDKDPLVTMKPGTGTLIINIMSEGKAETYEGVYQCTARNERGAAVSNNIVVRPSRSPLWTKEKLEPITLQSGQSLVLPCRPPIGLPPPIIFWMDNSFQRLPQSERVSQGLNGDLYFSNVLPEDTREDYICYARFNHTQTIQQKQPISVKVISAKSSRERPPTFLTPEGNASNKEELRGNVLSLECIAEGLPTPIIYWAKEDGMLPKNRTVYKNFEKTLQIIHVSEADSGNYQCIAKNALGAIHHTISVRVKAAPYWITAPQNLVLSPGEDGTLICRANGNPKPRISWLTNGVPIEIAPDDPSRKIDGDTIIFSNVQERSSAVYQCNASNEYGYLLANAFVNVLAEPPRILTPANTLYQVIANRPALLDCAFFGSPLPTIEWFKGAKGSALHEDIYVLHENGTLEIPVAQKDSTGTYTCVARNKLGMAKNEVHLEIKDPTWIVKQPEYAVVQRGSMVSFECKVKHDHTLSLTVLWLKDNRELPSDERFTVDKDHLVVADVSDDDSGTYTCVANTTLDSVSASAVLSVVAPTPTPAPVYDVPNPPFDLELTDQLDKSVQLSWTPGDDNNSPITKFIIEYEDAMHKPGLWHHQTEVSGTQTTAQLKLSPYVNYSFRVMAVNSIGKSLPSEASEQYLTKASEPDKNPTAVEGLGSEPDNLVITWKPLNGFESNGPGLQYKVSWRQKDGDDEWTSVVVANVSKYIVSGTPTFVPYLIKVQALNDMGFAPEPAVVMGHSGEDLPMVAPGNVRVNVVNSTLAEVHWDPVPLKSIRGHLQGYRIYYWKTQSSSKRNRRHIEKKILTFQGSKTHGMLPGLEPFSHYTLNVRVVNGKGEGPASPDRVFNTPEGVPSAPSSLKIVNPTLDSLTLEWDPPSHPNGILTEYTLKYQPINSTHELGPLVDLKIPANKTRWTLKNLNFSTRYKFYFYAQTSAGSGSQITEEAVTTVDEAGILPPDVGAGKAMASRQVDIATQGWFIGLMCAVALLILILLIVCFIRRNKGGKYPVKEKEDAHADPEIQPMKEDDGTFGEYSDAEDHKPLKKGSRTPSDRTVKKEDSDDSLVDYGEGVNGQFNEDGSFIGQYSGKKEKEPAEGNESSEAPSPVNAMNSFV

SEQ ID NO: 56500 - protein, 1304 aa, Homo sapiens
  Payload ID: 11100
  Gene Symbol: NRCAM
  Gene Name: neuronal cell adhesion molecule
  Uniprot ID: Q92823
  ENSP ID: ENSP00000368314
MQLKIMPKKKRLSAGRVPLILFLCQMISALEVPLDPKLLEDLVQPPTITQQSPKDYIIDPRENIVIQCEAKGKPPPSFSWTRNGTHFDIDKDPLVTMKPGTGTLIINIMSEGKAETYEGVYQCTARNERGAAVSNNIVVRPSRSPLWTKEKLEPITLQSGQSLVLPCRPPIGLPPPIIFWMDNSFQRLPQSERVSQGLNGDLYFSNVLPEDTREDYICYARFNHTQTIQQKQPISVKVISVDELNDTIAANLSDTEFYGAKSSRERPPTFLTPEGNASNKEELRGNVLSLECIAEGLPTPIIYWAKEDGMLPKNRTVYKNFEKTLQIIHVSEADSGNYQCIAKNALGAIHHTISVRVKAAPYWITAPQNLVLSPGEDGTLICRANGNPKPRISWLTNGVPIEIAPDDPSRKIDGDTIIFSNVQERSSAVYQCNASNEYGYLLANAFVNVLAEPPRILTPANTLYQVIANRPALLDCAFFGSPLPTIEWFKGAKGSALHEDIYVLHENGTLEIPVAQKDSTGTYTCVARNKLGMAKNEVHLEIKDPTWIVKQPEYAVVQRGSMVSFECKVKHDHTLSLTVLWLKDNRELPSDERFTVDKDHLVVADVSDDDSGTYTCVANTTLDSVSASAVLSVVAPTPTPAPVYDVPNPPFDLELTDQLDKSVQLSWTPGDDNNSPITKFIIEYEDAMHKPGLWHHQTEVSGTQTTAQLKLSPYVNYSFRVMAVNSIGKSLPSEASEQYLTKASEPDKNPTAVEGLGSEPDNLVITWKPLNGFESNGPGLQYKVSWRQKDGDDEWTSVVVANVSKYIVSGTPTFVPYLIKVQALNDMGFAPEPAVVMGHSGEDLPMVAPGNVRVNVVNSTLAEVHWDPVPLKSIRGHLQGYRIYYWKTQSSSKRNRRHIEKKILTFQGSKTHGMLPGLEPFSHYTLNVRVVNGKGEGPASPDRVFNTPEGVPSAPSSLKIVNPTLDSLTLEWDPPSHPNGILTEYTLKYQPINSTHELGPLVDLKIPANKTRWTLKNLNFSTRYKFYFYAQTSAGSGSQITEEAVTTVDEAGILPPDVGAGKVQAVNPRISNLTAAAAETYANISWEYEGPEHVNFYVEYGVAGSKEEWRKEIVNGSRSFFGLKGLMPGTAYKVRVGAVGDSGFVSSEDVFETGPAMASRQVDIATQGWFIGLMCAVALLILILLIVCFIRRNKGGKYPVKEKEDAHADPEIQPMKEDDGTFGEYSDAEDHKPLKKGSRTPSDRTVKKEDSDDSLVDYGEGVNGQFNEDGSFIGQYSGKKEKEPAEGNESSEAPSPVNAMNSFV

SEQ ID NO: 56501 - protein, 431 aa, Homo sapiens
  Payload ID: 11100
  Gene Symbol: NRCAM
  Gene Name: neuronal cell adhesion molecule
  ENSP ID: ENSP00000390421
MQLKIMPKKKRLSAGRVPLILFLCQMISALEVPLDLVQPPTITQQSPKDYIIDPRENIVIQCEAKGKPPPSFSWTRNGTHFDIDKDPLVTMKPGTGTLIINIMSEGKAETYEGVYQCTARNERGAAVSNNIVVRPSRSPLWTKEKLEPITLQSGQSLVLPCRPPIGLPPPIIFWMDNSFQRLPQSERVSQGLNGDLYFSNVLPEDTREDYICYARFNHTQTIQQKQPISVKVISVDELNDTIAANLSDTEFYGAKSSRERPPTFLTPEGNASNKEELRGNVLSLECIAEGLPTPIIYWAKEDGMLPKNRTVYKNFEKTLQIIHVSEADSGNYQCIAKNALGAIHHTISVRVKAAPYWITAPQNLVLSPGEDGTLICRANGNPKPRISWLTNGVPIEIAPDDPSRKIDGDTIIFSNVQERSSAVYQCNASNE

SEQ ID NO: 56502 - protein, 118 aa, Homo sapiens
  Payload ID: 11100
  Gene Symbol: NRCAM
  Gene Name: neuronal cell adhesion molecule
  ENSP ID: ENSP00000390868
MQLKIMPKKKRLSAGRVPLILFLCQMISALEVPLDPKLLEDLVQPPTITQQSPKDYIIDPRENIVIQCEAKGKPPPSFSWTRNGTHFDIDKDPLVTMKPGTGTLIINIMSEGKAETYE

SEQ ID NO: 56503 - protein, 61 aa, Homo sapiens
  Payload ID: 11100
  Gene Symbol: NRCAM
  Gene Name: neuronal cell adhesion molecule
  ENSP ID: ENSP00000393663
MQLKIMPKKKRLSAGRVPLILFLCQMISALEVPLDPKLLEDLVQPPTITQQSPKDYIIDPR

SEQ ID NO: 56504 - protein, 106 aa, Homo sapiens
  Payload ID: 11100
  Gene Symbol: NRCAM
  Gene Name: neuronal cell adhesion molecule
  ENSP ID: ENSP00000397544
MQLKIMPKKKRLSAGRVPLILFLCQMISALEVPLDLVQPPTITQQSPKDYIIDPRENIVIQCEAKGKPPPSFSWTRNGTHFDIDKDPLVTMKPGTGTLIINIMSEG

SEQ ID NO: 56505 - protein, 190 aa, Homo sapiens
  Payload ID: 11100
  Gene Symbol: NRCAM
  Gene Name: neuronal cell adhesion molecule
  ENSP ID: ENSP00000398174
  MOD_RES (1)..(1): Any amino acid
XGILPPDVGAGKVQAVNPRISNLTAAAAETYANISWEYEGPEHVNFYVEYGVAGTMASRQVDIATQGWFIGLMCAVALLILILLIVCFIRRNKGGKYPVKEKEDAHADPEIQPMKEDDGTFGEYSDAEDHKPLKKGSRTPSDRTVKKEDSDDSLVDYGEGVNGQFNEDGSFIGQYSGKKEKEPAEGNESS

SEQ ID NO: 56506 - protein, 1304 aa, Homo sapiens; identical to SEQ ID NO: 56500
  Payload ID: 11100
  Gene Symbol: NRCAM
  Gene Name: neuronal cell adhesion molecule
  Uniprot ID: Q92823
  ENSP ID: ENSP00000401244

SEQ ID NO: 56507 - protein, 1211 aa, Homo sapiens
  Payload ID: 11100
  Gene Symbol: NRCAM
  Gene Name: neuronal cell adhesion molecule
  ENSP ID: ENSP00000407858
MQLKIMPKKKRLSAGRVPLILFLCQMISALEVPLDPKLLEDLVQPPTITQQSPKDYIIDPRENIVIQCEAKGKPPPSFSWTRNGTHFDIDKDPLVTMKPGTGTLIINIMSEGKAETYEGVYQCTARNERGAAVSNNIVVRPSRSPLWTKEKLEPITLQSGQSLVLPCRPPIGLPPPIIFWMDNSFQRLPQSERVSQGLNGDLYFSNVLPEDTREDYICYARFNHTQTIQQKQPISVKVISVDELNDTIAANLSDTEFYGAKSSRERPPTFLTPEGNASNKEELRGNVLSLECIAEGLPTPIIYWAKEDGMLPKNRTVYKNFEKTLQIIHVSEADSGNYQCIAKNALGAIHHTISVRVKAAPYWITAPQNLVLSPGEDGTLICRANGNPKPRISWLTNGVPIEIAPDDPSRKIDGDTIIFSNVQERSSAVYQCNASNEYGYLLANAFVNVLAEPPRILTPANTLYQVIANRPALLDCAFFGSPLPTIEWFKGAKGSALHEDIYVLHENGTLEIPVAQKDSTGTYTCVARNKLGMAKNEVHLEIKDPTWIVKQPEYAVVQRGSMVSFECKVKHDHTLSLTVLWLKDNRELPSDERFTVDKDHLVVADVSDDDSGTYTCVANTTLDSVSASAVLSVVAPTPTPAPVYDVPNPPFDLELTDQLDKSVQLSWTPGDDNNSPITKFIIEYEDAMHKPGLWHHQTEVSGTQTTAQLKLSPYVNYSFRVMAVNSIGKSLPSEASEQYLTKASEPDKNPTAVEGLGSEPDNLVITWKPLNGFESNGPGLQYKVSWRQKDGDDEWTSVVVANVSKYIVSGTPTFVPYLIKVQALNDMGFAPEPAVVMGHSGEDLPMVAPGNVRVNVVNSTLAEVHWDPVPLKSIRGHLQGYRIYYWKTQSSSKRNRRHIEKKILTFQGSKTHGMLPGLEPFSHYTLNVRVVNGKGEGPASPDRVFNTPEGVPSAPSSLKIVNPTLDSLTLEWDPPSHPNGILTEYTLKYQPINSTHELGPLVDLKIPANKTRWTLKNLNFSTRYKFYFYAQTSAGSGSQITEEAVTTVDEAGILPPDVGAGKAMASRQVDIATQGWFIGLMCAVALLILILLIVCFIRRNKGGKYPVKEKEDAHADPEIQPMKEDDGTFGEYSDAEDHKPLKKGSRTPSDRTVKKEDSDDSLVDYGEGVNGQFNEDGSFIGQYSGKKEKEPAEGNESSEAPSPVNAMNSFV

SEQ ID NO: 56508 - protein, 106 aa, Homo sapiens; identical to SEQ ID NO: 56504
  Payload ID: 11100
  Gene Symbol: NRCAM
  Gene Name: neuronal cell adhesion molecule
  ENSP ID: ENSP00000408203

SEQ ID NO: 56509 - protein, 771 aa, Homo sapiens [sequence omitted]

SEQ ID NO: 56510 - protein, 356 aa, Homo sapiens
  Payload ID: 11101
  Gene Symbol: NEUROD1
  Gene Name: neuronal differentiation 1
  Uniprot ID: Q13562
  ENSP ID: ENSP00000295108
MTKSYSESGLMGEPQPQGPPSWTDECLSSQDEEHEADKKEDDLETMNAEEDSLRNGGEEEDEDEDLEEEEEEEEEDDDQKPKRRGPKKKKMTKARLERFKLRRMKANARERNRMHGLNAALDNLRKVVPCYSKTQKLSKIETLRLAKNYIWALSEILRSGKSPDLVSFVQTLCKGLSQPTTNLVAGCLQLNPRTFLPEQNQDMPPHLPTASASFPVHPYSYQSPGLPSPPYGTMDSSHVFHVKPPPHAYSAALEPFFESPLTDCTSPSFDGPLSPPLSINGNFSFKHEPSAEFEKNYAFTMHYPAATLAGAQSHGSIFSGTAAPRCEIPIDNIMSFDSHSHHERVMSAQLNAIFHD

SEQ ID NO: 56511 - protein, 382 aa, Homo sapiens
  Payload ID: 11102
  Gene Symbol: NEUROD2
  Gene Name: neuronal differentiation 2
  Uniprot ID: Q15784
  ENSP ID: ENSP00000306754
MLTRLFSEPGLLSDVPKFASWGDGEDDEPRSDKGDAPPPPPPAPGPGAPGPARAAKPVPLRGEEGTEATLAEVKEEGELGGEEEEEEEEEEGLDEAEGERPKKRGPKKRKMTKARLERSKLRRQKANARERNRMHDLNAALDNLRKVVPCYSKTQKLSKIETLRLAKNYIWALSEILRSGKRPDLVSYVQTLCKGLSQPTTNLVAGCLQLNSRNFLTEQGADGAGRFHGSGGPFAMHPYPYPCSRLAGAQCQAAGGLGGGAAHALRTHGYCAAYETLYAAAGGGGASPDYNSSEYEGPLSPPLCLNGNFSLKQDSSPDHEKSYHYSMHYSALPGSRPTGHGLVFGSSAVRGGVHSENLLSYDMHLHHDRGPMYEELNAFFHN

SEQ ID NO: 56512 - protein, 331 aa, Homo sapiens
  Payload ID: 11103
  Gene Symbol: NEUROD4
  Gene Name: neuronal differentiation 4
  Uniprot ID: Q9HD90
  ENSP ID: ENSP00000242994
MSKTFVKSKEMGELVNTPSWMDKGLGSQNEVKEEESRPGTYGMLSSLTEEHDSIEEEEEEEEDGEKPKRRGPKKKKMTKARLERFRARRVKANARERTRMHGLNDALDNLRRVMPCYSKTQKLSKIETLRLARNYIWALSEVLETGQTPEGKGFVEMLCKGLSQPTSNLVAGCLQLGPQSVLLEKHEDKSPICDSAISVHNFNYQSPGLPSPPYGHMETHLLHLKPQVFKSLGESSFGSHLPDCSTPPYEGPLTPPLSISGNFSLKQDGSPDLEKSYSFMPHYPSSSLSSGHVHSTPFQAGTPRYDVPIDMSYDSYPHHGIGTQLNTVFTE

SEQ ID NO: 56513 - protein, 337 aa, Homo sapiens
  Payload ID: 11104
  Gene Symbol: NEUROD6
  Gene Name: neuronal differentiation 6
  Uniprot ID: Q96NK8
  ENSP ID: ENSP00000297142
MLTLPFDESVVMPESQMCRKFSRECEDQKQIKKPESFSKQIVLRGKSIKRAPGEETEKEEEEEDREEEDENGLPRRRGLRKKKTTKLRLERVKFRRQEANARERNRMHGLNDALDNLRKVVPCYSKTQKLSKIETLRLAKNYIWALSEILRIGKRPDLLTFVQNLCKGLSQPTTNLVAGCLQLNARSFLMGQGGEAAHHTRSPYSTFYPPYHSPELTTPPGHGTLDNSKSMKPYNYCSAYESFYESTSPECASPQFEGPLSPPPINYNGIFSLKQEETLDYGKNYNYGMHYCAVPPRGPLGQGAMFRLPTDSHFPYDLHLRSQSLTMQDELNAVFHN

SEQ ID NO: 56514 - protein, 330 aa, Homo sapiens
  Payload ID: 11104
  Gene Symbol: NEUROD6
  Gene Name: neuronal differentiation 6
  ENSP ID: ENSP00000479428
MLTLPFDESVVMPESQMCRKFSRECEDQKQIKKPESFSKQIVLRGKSIKRAPGEETEKEEEEEDREEEDENGLPRRRGLRKKKTTKLRLERVKFRRQEANARERNRMHGLNDALDNLRKVVPCYSKTQKLSKIETLRLAKNYIWALSEILRIGKRPDLLTFVQNLCKGLSQPTTNLVAGCLQLNARSFLMGQGGEAAHHTRSPYSTFYPPYHSPELTTPPGHGTLDNSKSMKPYNYCSAYESFYESTSPECASPQFEGPLSPPPINYNGIFSLKQEETLDYGKNYNYGMHYCAVPPRGPLGQVPCSGCPPTATSLTTYICAANLSQCKMN

SEQ ID NO: 56515 - protein, 226 aa, Homo sapiens
  Payload ID: 11105
  Gene Symbol: NEGR1
  Gene Name: neuronal growth regulator 1
  Uniprot ID: Q7Z3B1
  ENSP ID: ENSP00000305938
MQVHLTVQVPPKIYDISNDMTVNEGTNVTLTCLATGKPEPSISWRHISPSAKPFENGQYLDIYGITRDQAGEYECSAENDVSFPDVRKVKVVVNFAPTIQEIKSGTVTPGRSGLIRCEGAGVPPPAFEWYKGEKKLFNGQQGIIIQNFSTRSILTVTNVTQEHFGNYTCVAANKLGTTNASLPLNPPSTAQYGITGSADVLFSCWYLVLTLSSFTSIFYLKNAILQ

SEQ ID NO: 56516 - protein, 354 aa, Homo sapiens
  Payload ID: 11105
  Gene Symbol: NEGR1
  Gene Name: neuronal growth regulator 1
  Uniprot ID: Q7Z3B1
  ENSP ID: ENSP00000350364
MDMMLLVQGACCSNQWLAAVLLSLCCLLPSCLPAGQSVDFPWAAVDNMMVRKGDTAVLRCYLEDGASKGAWLNRSSIIFAGGDKWSVDPRVSISTLNKRDYSLQIQNVDVTDDGPYTCSVQTQHTPRTMQVHLTVQVPPKIYDISNDMTVNEGTNVTLTCLATGKPEPSISWRHISPSAKPFENGQYLDIYGITRDQAGEYECSAENDVSFPDVRKVKVVVNFAPTIQEIKSGTVTPGRSGLIRCEGAGVPPPAFEWYKGEKKLFNGQQGIIIQNFSTRSILTVTNVTQEHFGNYTCVAANKLGTTNASLPLNPPSTAQYGITGSADVLFSCWYLVLTLSSFTSIFYLKNAILQ

SEQ ID NO: 56517 - protein, 299 aa, Homo sapiens
  Payload ID: 11105
  Gene Symbol: NEGR1
  Gene Name: neuronal growth regulator 1
  ENSP ID: ENSP00000413294
VICRCYLEDGASKGAWLNRSSIIFAGGDKWSVDPRVSISTLNKRDYSLQIQNVDVTDDGPYTCSVQTQHTPRTMQVHLTVQVPPKIYDISNDMTVNEGTNVTLTCLATGKPEPSISWRHISPSAKPFENGQYLDIYGITRDQAGEYECSAENDVSFPDVRKVKVVVNFAPTIQEIKSGTVTPGRSGLIRCEGAGVPPPAFEWYKGEKKLFNGQQGIIIQNFSTRSILTVTNVTQEHFGNYTCVAANKLGTTNASLPLNPPSTAQYGITGSADVLFSCWYLVLTLSSFTSIFYLKNAILQ

SEQ ID NO: 56518 - protein, 710 aa, Homo sapiens
  Payload ID: 11106
  Gene Symbol: NGEF
  Gene Name: neuronal guanine nucleotide exchange factor
  Uniprot ID: Q8N5V2
  ENSP ID: ENSP00000264051
METRESEDLEKTRRKSASDQWNTDNEPAKVKPELLPEKEETSQADQDIQDKEPHCHIPIKRNSIFNRSIRRKSKAKARDNPERNASCLADSQDNGKSVNEPLTLNIPWSRMPPCRTAMQTDPGAQEMSESSSTPGNGATPEEWPALADSPTTLTEALRMIHPIPADSWRNLIEQIGLLYQEYRDKSTLQEIETRRQQDAEIEDNTNGSPASEDTPEEEEEEEEEEEPASPPERKTLPQICLLSNPHSRFNLWQDLPEIRSSGVLEILQPEEIKLQEAMFELVTSEASYYKSLNLLVSHFMENERIRKILHPSEAHILFSNVLDVLAVSERFLLELEHRMEENIVISDVCDIVYRYAADHFSVYITYVSNQTYQERTYKQLLQEKAAFRELIAQLELDPKCRGLPFSSFLILPFQRITRLKLLVQNILKRVEERSERECTALDAHKELEMVVKACNEGVRKMSRTEQMISIQKKMEFKIKSVPIISHSRWLLKQGELQQMSGPKTSRTLRTKKLFHEIYLFLFNDLLVICRQIPGDKYQVFDSAPRGLLRVEELEDQGQTLANVFILRLLENADDREATYMLKASSQSEMKRWMTSLAPNRRTKFVSFTSRLLDCPQVQCVHPYVAQQPDELTLELADILNILDKTDDGWIFGERLHDQERGWFPSSMTEEILNPKIRSQNLKECFRVHKMDDPQRSQNKDRRKLGSRNRQ

SEQ ID NO: 56519 - protein, 618 aa, Homo sapiens
  Payload ID: 11106
  Gene Symbol: NGEF
  Gene Name: neuronal guanine nucleotide exchange factor
  Uniprot ID: Q8N5V2
  ENSP ID: ENSP00000362653
MELLAAAFSAACAVDHDSSTSESDARDSAAGHLPGSESSSTPGNGATPEEWPALADSPTTLTEALRMIHPIPADSWRNLIEQIGLLYQEYRDKSTLQEIETRRQQDAEIEDNTNGSPASEDTPEEEEEEEEEEEPASPPERKTLPQICLLSNPHSRFNLWQDLPEIRSSGVLEILQPEEIKLQEAMFELVTSEASYYKSLNLLVSHFMENERIRKILHPSEAHILFSNVLDVLAVSERFLLELEHRMEENIVISDVCDIVYRYAADHFSVYITYVSNQTYQERTYKQLLQEKAAFRELIAQLELDPKCRGLPFSSFLILPFQRITRLKLLVQNILKRVEERSERECTALDAHKELEMVVKACNEGVRKMSRTEQMISIQKKMEFKIKSVPIISHSRWLLKQGELQQMSGPKTSRTLRTKKLFHEIYLFLFNDLLVICRQIPGDKYQVFDSAPRGLLRVEELEDQGQTLANVFILRLLENADDREATYMLKASSQSEMKRWMTSLAPNRRTKFVSFTSRLLDCPQVQCVHPYVAQQPDELTLELADILNILDKTDDGWIFGERLHDQERGWFPSSMTEEILNPKIRSQNLKECFRVHKMDDPQRSQNKDRRKLGSRNRQ

SEQ ID NO: 56520 - protein, 238 aa, Homo sapiens
  Payload ID: 11106
  Gene Symbol: NGEF
  Gene Name: neuronal guanine nucleotide exchange factor
  Uniprot ID: Q8N5V2
  ENSP ID: ENSP00000387033
MELLAAAFSAACAVDHDSSTSESDARDSAAGHLPGSESSSTPGNGATPEEWPALADSPTTLTEALRMIHPIPADSWRNLIEQIGLLYQEYRDKSTLQEIETRRQQDAEIEDNTNGSPASEDTPEEEEEEEEEEEPASPPERKTLPQICLLSNPHSRFNLWQDLPEIRSSGVLEILQPEEIKLQEAMFELVTSEASYYKSLNLLVSHFMENERIRKILHPSEAHILFSNVLDVLAVSER

SEQ ID NO: 56521 - protein, 150 aa, Homo sapiens
  Payload ID: 11106
  Gene Symbol: NGEF
  Gene Name: neuronal guanine nucleotide exchange factor
  ENSP ID: ENSP00000387591
MVVKACNEGVRKMSRTEQMISIQKKMEFKIKSVPIISHSRWLLKQGELQQMSGPKTSRTLRTKKLFHEIYLFLFNDLLVICRQIPGDKYQVFDSAPRGLLRVEELEDQGQTLANVFILRLLENADDREATYMLKASSQSEMKRWMTSLAP

SEQ ID NO: 56522 - protein, 187 aa, Homo sapiens
  Payload ID: 11106
  Gene Symbol: NGEF
  Gene Name: neuronal guanine nucleotide exchange factor
  ENSP ID: ENSP00000401063
MFELVTSEASYYKSLNLLVSHFMENERIRKILHPSEAHILFSNVLDVLAVSERFLLELEHRMEENIVISDVCDIVYRYAADHFSVYITYVSNQTYQERTYKQLLQEKAAFRELIAQLELDPKCRGLPFSSFLILPFQRITRLKLLVQNILKRVEERSERECTALDAHKELEMVVKACNEGVRKMSRT

SEQ ID NO: 56523 - protein, 97 aa, Homo sapiens
  Payload ID: 11106
  Gene Symbol: NGEF
  Gene Name: neuronal guanine nucleotide exchange factor
  ENSP ID: ENSP00000405053
  MOD_RES (1)..(1): Any amino acid
XELLPEKEETSQADQDIQDKEPHCHIPIKRNSIFNRSIRRKSKAKARDNPERNASCLADSQDNGKSVNEPLTLNIPWSRMPPCRTAMQTDPGAQEMR

SEQ ID NO: 56524 - protein, 234 aa, Homo sapiens
  Payload ID: 11107
  Gene Symbol: NPAS1
  Gene Name: neuronal PAS domain protein 1
  Uniprot ID: Q99742
  ENSP ID: ENSP00000398689
MTGSSVFDYIHPGDHSEVLEQLGLRTPTPGPPTPPSVSSSSSSSSSLADTPEIEASLTKVPPSSLVQERSFFVRMKSTLTKRGLHVKASGYKVIHVTGRLRAHALGLVALGHTLPPAPLAELPLHGHMIVFRLSLGLTILACESRVSDHMDLGPSELVGRSCYQFVHGQDATRIRQSHVDSCRGLRVAAVCGHSGWEREEPRGAPCALGQPRAQPSRGWPNSFGCLPASSQRGL

SEQ ID NO: 56525 - protein, 590 aa, Homo sapiens
  Payload ID: 11107
  Gene Symbol: NPAS1
  Gene Name: neuronal PAS domain protein 1
  Uniprot ID: Q99742
  ENSP ID: ENSP00000405290
MAAPYPGSGGGSEVKCVGGRGASVPWDFLPGLMVKAPSGPCLQAQRKEKSRNAARSRRGKENLEFFELAKLLPLPGAISSQLDKASIVRLSVTYLRLRRFAALGAPPWGLRAAGPPAGLAPGRRGPAALVSEVFEQHLGGHILQSLDGFVFALNQEGKFLYISETVSIYLGLSQVEMTGSSVFDYIHPGDHSEVLEQLGLRTPTPGPPTPPSVSSSSSSSSSLADTPEIEASLTKVPPSSLVQERSFFVRMKSTLTKRGLHVKASGYKVIHVTGRLRAHALGLVALGHTLPPAPLAELPLHGHMIVFRLSLGLTILACESRVSDHMDLGPSELVGRSCYQFVHGQDATRIRQSHVDLLDKGQVMTGYYRWLQRAGGFVWLQSVATVAGSGKSPGEHHVLWVSHVLSQAEGGQTPLDAFQLPASVACEEASSPGPEPTEPEPPTEGKQAAPAENEAPQTQGKRIKVEPGPRETKGSEDSGDEDPSSHPATPRPEFTSVIRAGVLKQDPVRPWGLAPPGDPPPTLLHAGFLPPVVRGLCTPGTIRYGPAELGLVYPHLQRLGPGPALPEAFYPPLGLPYPGPAGTRLPRKGD

SEQ ID NO: 56526 - protein, 95 aa, Homo sapiens
  Payload ID: 11107
  Gene Symbol: NPAS1
  Gene Name: neuronal PAS domain protein 1
  ENSP ID: ENSP00000468871
MTGSSVFDYIHPGDHSEVLEQLGLRTPTPGPPTPPSVSSSSSSSSSLADTPEIESATTWTWGPQSWWAAAATSLSTDRTPRGSARATWTCWTRVR

SEQ ID NO: 56527 - protein, 590 aa, Homo sapiens; identical to SEQ ID NO: 56525
  Payload ID: 11107
  Gene Symbol: NPAS1
  Gene Name: neuronal PAS domain protein 1
  Uniprot ID: Q99742
  ENSP ID: ENSP00000469142

SEQ ID NO: 56528 - protein, 214 aa, Homo sapiens
  Payload ID: 11107
  Gene Symbol: NPAS1
  Gene Name: neuronal PAS domain protein 1
  ENSP ID: ENSP00000472075
MTGSSVFDYIHPGDHSEVLEQLGLRTPTPGPPTPPSVSSSSSSSSSLADTPEIEASLTKVPPSSLVQERSFFVRMKSTLTKRGLHVKASGYKVIHVTGRLRAHALGLVALGHTLPPAPLAELPLHGHMIVFRLSLGLTILACESRVSDHMDLGPSELVGRSCYQFVHGQDATRIRQSHVDSCRGLRVAAVCGHSGWEREEPRGAPCALGQPRAQ

SEQ ID NO: 56529 - protein, 415 aa, Homo sapiens
  Payload ID: 11107
  Gene Symbol: NPAS1
  Gene Name: neuronal PAS domain protein 1
  ENSP ID: ENSP00000472679
MTGSSVFDYIHPGDHSEVLEQLGLRTPTPGPPTPPSVSSSSSSSSSLADTPEIEASLTKVPPSSLVQERSFFVRMKSTLTKRGLHVKASGYKQVIHVTGRLRAHALGLVALGHTLPPAPLAELPLHGHMIVFRLSLGLTILACESRVSDHMDLGPSELVGRSCYQFVHGQDATRIRQSHVDLLDKGQVMTGYYRWLQRAGGFVWLQSVATVAGSGKSPGEHHVLWVSHVLSQAEGGQTPLDAFQLPASVACEEASSPGPEPTEPEPPTEGKQAAPAENEAPQTQGKRIKVEPGPRETKGSEDSGDEDPSSHPATPRPEFTSVIRAGVLKQDPVRPWGLAPPGDPPPTLLHAGFLPPVVRGLCTPGTIRYGPAELGLVYPHLQRLGPGPALPEAFYPPLGLPYPGPAGTRLPRKGD

SEQ ID NO: 56530 - protein, 824 aa, Homo sapiens
  Payload ID: 11108
  Gene Symbol: NPAS2
  Gene Name: neuronal PAS domain protein 2
  Uniprot ID: Q99743
  ENSP ID: ENSP00000338283
MDEDEKDRAKRASRNKSEKKRRDQFNVLIKELSSMLPGNTRKMDKTTVLEKVIGFLQKHNEVSAQTEICDIQQDWKPSFLSNEEFTQLMLEALDGFIIAVTTDGSIIYVSDSITPLLGHLPSDVMDQNLLNFLPEQEHSEVYKILSSHMLVTDSPSPEYLKSDSDLEFYCHLLRGSLNPKEFPTYEYIKFVGNFRSYNNVPSPSCNGFDNTLSRPCRVPLGKEVCFIATVRLATPQFLKEMCIVDEPLEEFTSRHSLEWKFLFLDHRAPPIIGYLPFEVLGTSGYDYYHIDDLELLARCHQHLMQFGKGKSCCYRFLTKGQQWIWLQTHYYITYHQWNSKPEFIVCTHSVVSYADVRVERRQELALEDPPSEALHSSALKDKGSSLEPRQHFNTLDVGASGLNTSHSPSASSRSSHKSSHTAMSEPTSTPTKLMAEASTPALPRSATLPQELPVPGLSQAATMPAPLPSPSSCDLTQQLLPQTVLQSTPAPMAQFSAQFSMFQTIKDQLEQRTRILQANIRWQQEELHKIQEQLCLVQDSNVQMFLQQPAVSLSFSSTQRPEAQQQLQQRSAAVTQPQLGAGPQLPGQISSAQVTSQHLLRESSVISTQGPKPMRSSQLMQSSGRSGSSLVSPFSSATAALPPSLNLTTPASTSQDASQCQPSPDFSHDRQLRLLLSQPIQPMMPGSCDARQPSEVSRTGRQVKYAQSQTVFQNPDAHPANSSSAPMPVLLMGQAVLHPSFPASQPSPLQPAQARQQPPQHYLQVQAPTSLHSEQQDSLLLSTYSQQPGTLGYPQPPPAQPQPLRPPRRVSSLSESSGLQQPPR

SEQ ID NO: 56531 - protein, 258 aa, Homo sapiens
  Payload ID: 11108
  Gene Symbol: NPAS2
  Gene Name: neuronal PAS domain protein 2
  ENSP ID: ENSP00000388528
  MOD_RES (1)..(1): Any amino acid
XASRNKSEKKRRDQFNVLIKELSSMLPGNTRKMDKTTVLEKVIGFLQKHNEVSAQTEICDIQQDWKPSFLSNEEFTQLMLEALDGFIIAVTTDGSIIYVSDSITPLLGHLPSDVMDQNLLNFLPEQEHSEVYKILSSHMLVTDSPSPEYLKSDSDLEFYCHLLRGSLNPKEFPTYEYIKFVGNFRSYNNVMQFGKGKSCCYRFLTKGQQWIWLQTHYYITYHQWNSKPEFIVCTHSVVSYADVRVERRQELALEDPPS

SEQ ID NO: 56532 - protein, 202 aa, Homo sapiens
  Payload ID: 11108
  Gene Symbol: NPAS2
  Gene Name: neuronal PAS domain protein 2
  ENSP ID: ENSP00000392125
LNTSHSPSASSRSSHKSSHTAMSEPTSTPTKLMAEASTPALPRSATLPQELPVPGLSQAATMPAPLPSPSSCDLTQQLLPQTVLQSTPAPMAQFSAQFSMFQTIKDQLEQRTRILQANIRWQQEELHKIQEQLCLVQDSNVQVRPEPDRVSKSRRTPRQQQQRPDARPADGAGGAPPQLPCLPTIAPAACTGPAAATAALPA

SEQ ID NO: 56533 - protein, 269 aa, Homo sapiens
  Payload ID: 11108
  Gene Symbol: NPAS2
  Gene Name: neuronal PAS domain protein 2
  ENSP ID: ENSP00000393396
  MOD_RES (1)..(1): Any amino acid
XQTIKDQLEQRTRILQANIRWQQEELHKIQEQLCLVQDSNVQMFLQQPAVSLSFSSTQRPEAQQQLQQRSAAVTQPQLGAGPQLPGQISSAQVTSQHLLRESSVISTQGPKPMRSSQLMQSSGRSGSSLVSPFSSATAALPPSLNLTTPASTSQDASQCQPSPDFSHDRQLRLLLSQPIQPMMPGSCDARQPSEVSRTGRQVKYAQSQTVFQNPDAHPANSSSAPMPVLLMGQAVLHPSFPASQPSPLQPAQARQQPPQHYLQVLGHTL

SEQ ID NO: 56534 - protein, 107 aa, Homo sapiens
  Payload ID: 11108
  Gene Symbol: NPAS2
  Gene Name: neuronal PAS domain protein 2
  ENSP ID: ENSP00000395265
SEKKRRDQFNVLIKELSSMLPGNTRKMDKTTVLEKVIGFLQKHNGKEVSAQTEICDIQQDWKPSFLSNEEFTQLMLEALDGFIIAVTTDGSIIYVSDSITPLLGHLP

SEQ ID NO: 56535 - protein, 207 aa, Homo sapiens
  Payload ID: 11108
  Gene Symbol: NPAS2
  Gene Name: neuronal PAS domain protein 2
  ENSP ID: ENSP00000397595
MYAYGFVGRCAPFPAEEGRTFDLSEELGRSVTREGTGTTRLNSEPVPLLCLPLLNCSRKNCIENLMDEDEKDRAKRASRNKSEKKRRDQFNVLIKELSSMLPGNTRKMDKTTVLEKVIGFLQKHNEVSAQTEICDIQQDWKPSFLSNEEFTQLMLEALDGFIIAVTTDGSIIYVSDSITPLLGHLPSDVMDQNLLNFLPEQEHSEVY

SEQ ID NO: 56536 - protein, 901 aa, Homo sapiens
  Payload ID: 11109
  Gene Symbol: NPAS3
  Gene Name: neuronal PAS domain protein 3
  Uniprot ID: Q8IXF0
  ENSP ID: ENSP00000319610
MAPTKPSFQQDPSRRERLQALRKEKSRDAARSRRGKENFEFYELAKLLPLPAAITSQLDKASIIRLTISYLKMRDFANQGDPPWNLRMEGPPPNTSVKGAQRRRSPSALAIEVFEAHLGSHILQSLDGFVFALNQEGKFLYISETVSIYLGLSQVELTGSSVFDYVHPGDHVEMAEQLGMKLPPGRGLLSQGTAEDGASSASSSSQSETPEPVESTSPSLLTTDNTLERSFFIRMKSTLTKRGVHIKSSGYKVIHITGRLRLRVSLSHGRTVPSQIMGLVVVAHALPPPTINEVRIDCHMFVTRVNMDLNIIYCENRISDYMDLTPVDIVGKRCYHFIHAEDVEGIRHSHLDLLNKGQCVTKYYRWMQKNGGYIWIQSSATIAINAKNANEKNIIWVNYLLSNPEYKDTPMDIAQLPHLPEKTSESSETSDSESDSKDTSGITEDNENSKSDEKGNQSENSEDPEPDRKKSGNACDNDMNCNDDGHSSSNPDSRDSDDSFEHSDFENPKAGEDGFGALGAMQIKVERYVESESDLRLQNCESLTSDSAKDSDSAGEAGAQASSKHQKRKKRRKRQKGGSASRRRLSSASSPGGLDAGLVEPPRLLSSPNSASVLKIKTEISEPINFDNDSSIWNYPPNREISRNESPYSMTKPPSSEHFPSPQGGGGGGGGGGGLHVAIPDSVLTPPGADGAAARKTQFGASATAALAPVASDPLSPPLSASPRDKHPGNGGGGGGGGGGAGGGGPSASNSLLYTGDLEALQRLQAGNVVLPLVHRVTGTLAATSTAAQRVYTTGTIRYAPAEVTLAMQSNLLPNAHAVNFVDVNSPGFGLDPKTPMEMLYHHVHRLNMSGPFGGAVSAASLTQMPAGNVFTTAEGLFSTLPFPVYSNGIHAAQTLERKED

SEQ ID NO: 56537 - protein, 933 aa, Homo sapiens
  Payload ID: 11109
  Gene Symbol: NPAS3
  Gene Name: neuronal PAS domain protein 3
  Uniprot ID: Q8IXF0
  ENSP ID: ENSP00000348460
MAPTKPSFQQDPSRRERITAQHPLPNQSECRKIYRYDGIYCESTYQNLQALRKEKSRDAARSRRGKENFEFYELAKLLPLPAAITSQLDKASIIRLTISYLKMRDFANQGDPPWNLRMEGPPPNTSVKVIGAQRRRSPSALAIEVFEAHLGSHILQSLDGFVFALNQEGKFLYISETVSIYLGLSQVELTGSSVFDYVHPGDHVEMAEQLGMKLPPGRGLLSQGTAEDGASSASSSSQSETPEPVESTSPSLLTTDNTLERSFFIRMKSTLTKRGVHIKSSGYKVIHITGRLRLRVSLSHGRTVPSQIMGLVVVAHALPPPTINEVRIDCHMFVTRVNMDLNIIYCENRISDYMDLTPVDIVGKRCYHFIHAEDVEGIRHSHLDLLNKGQCVTKYYRWMQKNGGYIWIQSSATIAINAKNANEKNIIWVNYLLSNPEYKDTPMDIAQLPHLPEKTSESSETSDSESDSKDTSGITEDNENSKSDEKGNQSENSEDPEPDRKKSGNACDNDMNCNDDGHSSSNPDSRDSDDSFEHSDFENPKAGEDGFGALGAMQIKVERYVESESDLRLQNCESLTSDSAKDSDSAGEAGAQASSKHQKRKKRRKRQKGGSASRRRLSSASSPGGLDAGLVEPPRLLSSPNSASVLKIKTEISEPINFDNDSSIWNYPPNREISRNESPYSMTKPPSSEHFPSPQGGGGGGGGGGGLHVAIPDSVLTPPGADGAAARKTQFGASATAALAPVASDPLSPPLSASPRDKHPGNGGGGGGGGGGAGGGGPSASNSLLYTGDLEALQRLQAGNVVLPLVHRVTGTLAATSTAAQRVYTTGTIRYAPAEVTLAMQSNLLPNAHAVNFVDVNSPGFGLDPKTPMEMLYHHVHRLNMSGPFGGAVSAASLTQMPAGNVFTTAEGLFSTLPFPVYSNGIHAAQTLERKED

SEQ ID NO: 56538 - protein, 920 aa, Homo sapiens
  Payload ID: 11109
  Gene Symbol: NPAS3
  Gene Name: neuronal PAS domain protein 3
  Uniprot ID: Q8IXF0
  ENSP ID: ENSP00000350446
MAPTKPSFQQDPSRRERLQALRKEKSRDAARSRRGKENFEFYELAKLLPLPAAITSQLDKASIIRLTISYLKMRDFANQGDPPWNLRMEGPPPNTSVKGIQMWKSELCMRKTPCEVIGAQRRRSPSALAIEVFEAHLGSHILQSLDGFVFALNQEGKFLYISETVSIYLGLSQVELTGSSVFDYVHPGDHVEMAEQLGMKLPPGRGLLSQGTAEDGASSASSSSQSETPEPVESTSPSLLTTDNTLERSFFIRMKSTLTKRGVHIKSSGYKVIHITGRLRLRVSLSHGRTVPSQIMGLVVVAHALPPPTINEVRIDCHMFVTRVNMDLNIIYCENRISDYMDLTPVDIVGKRCYHFIHAEDVEGIRHSHLDLLNKGQCVTKYYRWMQKNGGYIWIQSSATIAINAKNANEKNIIWVNYLLSNPEYKDTPMDIAQLPHLPEKTSESSETSDSESDSKDTSGITEDNENSKSDEKGNQSENSEDPEPDRKKSGNACDNDMNCNDDGHSSSNPDSRDSDDSFEHSDFENPKAGEDGFGALGAMQIKVERYVESESDLRLQNCESLTSDSAKDSDSAGEAGAQASSKHQKRKKRRKRQKGGSASRRRLSSASSPGGLDAGLVEPPRLLSSPNSASVLKIKTEISEPINFDNDSSIWNYPPNREISRNESPYSMTKPPSSEHFPSPQGGGGGGGGGGGLHVAIPDSVLTPPGADGAAARKTQFGASATAALAPVASDPLSPPLSASPRDKHPGNGGGGGGGGGGAGGGGPSASNSLLYTGDLEALQRLQAGNVVLPLVHRVTGTLAATSTAAQRVYTTGTIRYAPAEVTLAMQSNLLPNAHAVNFVDVNSPGFGLDPKTPMEMLYHHVHRLNMSGPFGGAVSAASLTQMPAGNVFTTAEGLFSTLPFPVYSNGIHAAQTLERKED

SEQ ID NO: 56539 - protein, 125 aa, Homo sapiens
  Payload ID: 11109
  Gene Symbol: NPAS3
  Gene Name: neuronal PAS domain protein 3
  ENSP ID: ENSP00000446700
ASIIRLTISYLKMRDFANQGDPPWNLRMEGPPPNTSVKVIGAQRRRSPSALAIEVFEAHLGSHILQSLDGFVFALNQEGKFLYISETVSIYLGLSQAQTLCSPLQSHRRPSRCSVAKLQSIYVTF

SEQ ID NO: 56540 - protein, 155 aa, Homo sapiens
  Payload ID: 11109
  Gene Symbol: NPAS3
  Gene Name: neuronal PAS domain protein 3
  ENSP ID: ENSP00000447213
MRDFANQGDPPWNLRMEGPPPNTSVKVIGAQRRRSPSALAIEVFEAHLGSHILQSLDGFVFALNQEGKFLYISETVSIYLGLSQVELTGSSVFDYVHPGDHVEMAEQLGMKLPPGRGLLSQGTAEDGASSASSSSQSETPEPVVCFPPASDQFLL

SEQ ID NO: 56541 - protein, 13 aa, Homo sapiens
  Payload ID: 11109
  Gene Symbol: NPAS3
  Gene Name: neuronal PAS domain protein 3
  ENSP ID: ENSP00000447858
  MOD_RES (1)..(1): Any amino acid
XSIYLGLSQAGVQ

SEQ ID NO: 56542 - protein, 906 aa, Homo sapiens
  Payload ID: 11109
  Gene Symbol: NPAS3
  Gene Name: neuronal PAS domain protein 3
  ENSP ID: ENSP00000448373
MGRAGAAANGTPQNVQGITSYQQRLQALRKEKSRDAARSRRGKENFEFYELAKLLPLPAAITSQLDKASIIRLTISYLKMRDFANQGDPPWNLRMEGPPPNTSVKVIGAQRRRSPSALAIEVFEAHLGSHILQSLDGFVFALNQEGKFLYISETVSIYLGLSQVELTGSSVFDYVHPGDHVEMAEQLGMKLPPGRGLLSQGTAEDGASSASSSSQSETPEPVESTSPSLLTTDNTLERSFFIRMKSTLTKRGVHIKSSGYKVIHITGRLRLRVSLSHGRTVPSQIMGLVVVAHALPPPTINEVRIDCHMFVTRVNMDLNIIYCENRISDYMDLTPVDIVGKRCYHFIHAEDVEGIRHSHLDLLNKGQCVTKYYRWMQKNGGYIWIQSSATIAINAKNANEKNIIWVNYLLSNPEYKDTPMDIAQLPHLPEKTSESSETSDSESDSKDTSEDNENSKSDEKGNQSENSEDPEPDRKKSGNACDNDMNCNDDGHSSSNPDSRDSDDSFEHSDFENPKAGEDGFGALGAMQIKVERYVESESDLRLQNCESLTSDSAKDSDSAGEAGAQASSKHQKRKKRRKRQKGGSASRRRLSSASSPGGLDAGLVEPPRLLSSPNSASVLKIKTEISEPINFDNDSSIWNYPPNREISRNESPYSMTKPPSSEHFPSPQGGGGGGGGGGGLHVAIPDSVLTPPGADGAAARKTQFGASATAALAPVASDPLSPPLSASPRDKHPGNGGGGGGGGGGAGGGGPSASNSLLYTGDLEALQRLQAGNVVLPLVHRVTGTLAATSTAAQRVYTTGTIRYAPAEVTLAMQSNLLPNAHAVNFVDVNSPGFGLDPKTPMEMLYHHVHRLNMSGPFGGAVSAASLTQMPAGNVFTTAEGLFSTLPFPVYSNGIHAAQTLERKE

SEQ ID NO: 56543 - protein, 132 aa, Homo sapiens
  Payload ID: 11109
  Gene Symbol: NPAS3
  Gene Name: neuronal PAS domain protein 3
  ENSP ID: ENSP00000448450
  MOD_RES (1)..(1): Any amino acid
XTDNTLERSFFIRMKSTLTKRGVHIKSSGYKVIHITGRLRLRVSLSHGRTVPSQIMGLVVVAHALPPPTINEVRIDCHMFVTRVNMDLNIIYCENRISDYMDLTPVDIVGKRCYHFIHAEDVEGIRHSHLDS

SEQ ID NO: 56544 - protein, 903 aa, Homo sapiens
  Payload ID: 11109
  Gene Symbol: NPAS3
  Gene Name: neuronal PAS domain protein 3
  Uniprot ID: Q8IXF0
  ENSP ID: ENSP00000448916
MAPTKPSFQQDPSRRERLQALRKEKSRDAARSRRGKENFEFYELAKLLPLPAAITSQLDKASIIRLTISYLKMRDFANQGDPPWNLRMEGPPPNTSVKVIGAQRRRSPSALAIEVFEAHLGSHILQSLDGFVFALNQEGKFLYISETVSIYLGLSQVELTGSSVFDYVHPGDHVEMAEQLGMKLPPGRGLLSQGTAEDGASSASSSSQSETPEPVESTSPSLLTTDNTLERSFFIRMKSTLTKRGVHIKSSGYKVIHITGRLRLRVSLSHGRTVPSQIMGLVVVAHALPPPTINEVRIDCHMFVTRVNMDLNIIYCENRISDYMDLTPVDIVGKRCYHFIHAEDVEGIRHSHLDLLNKGQCVTKYYRWMQKNGGYIWIQSSATIAINAKNANEKNIIWVNYLLSNPEYKDTPMDIAQLPHLPEKTSESSETSDSESDSKDTSGITEDNENSKSDEKGNQSENSEDPEPDRKKSGNACDNDMNCNDDGHSSSNPDSRDSDDSFEHSDFENPKAGEDGFGALGAMQIKVERYVESESDLRLQNCESLTSDSAKDSDSAGEAGAQASSKHQKRKKRRKRQKGGSASRRRLSSASSPGGLDAGLVEPPRLLSSPNSASVLKIKTEISEPINFDNDSSIWNYPPNREISRNESPYSMTKPPSSEHFPSPQGGGGGGGGGGGLHVAIPDSVLTPPGADGAAARKTQFGASATAALAPVASDPLSPPLSASPRDKHPGNGGGGGGGGGGAGGGGPSASNSLLYTGDLEALQRLQAGNVVLPLVHRVTGTLAATSTAAQRVYTTGTIRYAPAEVTLAMQSNLLPNAHAVNFVDVNSPGFGLDPKTPMEMLYHHVHRLNMSGPFGGAVSAASLTQMPAGNVFTTAEGLFSTLPFPVYSNGIHAAQTLERKED

SEQ ID NO: 56545 - protein, 153 aa, Homo sapiens
  Payload ID: 11109
  Gene Symbol: NPAS3
  Gene Name: neuronal PAS domain protein 3
  Uniprot ID: Q8IXF0
  ENSP ID: ENSP00000449542
MRDFANQGDPPWNLRMEGPPPNTSVKGAQRRRSPSALAIEVFEAHLGSHILQSLDGFVFALNQEGKFLYISETVSIYLGLSQVELTGSSVFDYVHPGDHVEMAEQLGMKLPPGRGLLSQGTAEDGASSASSSSQSETPEPVVCFPPASDQFLL

SEQ ID NO: 56546 - protein, 938 aa, Homo sapiens
  Payload ID: 11109
  Gene Symbol: NPAS3
  Gene Name: neuronal PAS domain protein 3
  ENSP ID: ENSP00000450392
MGRAGAAANGTPQNVQGITSYQQRITAQHPLPNQSECRKIYRYDGIYCESTYQNLQALRKEKSRDAARSRRGKENFEFYELAKLLPLPAAITSQLDKASIIRLTISYLKMRDFANQGDPPWNLRMEGPPPNTSVKGAQRRRSPSALAIEVFEAHLGSHILQSLDGFVFALNQEGKFLYISETVSIYLGLSQVELTGSSVFDYVHPGDHVEMAEQLGMKLPPGRGLLSQGTAEDGASSASSSSQSETPEPVESTSPSLLTTDNTLERSFFIRMKSTLTKRGVHIKSSGYKVIHITGRLRLRVSLSHGRTVPSQIMGLVVVAHALPPPTINEVRIDCHMFVTRVNMDLNIIYCENRISDYMDLTPVDIVGKRCYHFIHAEDVEGIRHSHLDLLNKGQCVTKYYRWMQKNGGYIWIQSSATIAINAKNANEKNIIWVNYLLSNPEYKDTPMDIAQLPHLPEKTSESSETSDSESDSKDTSGITEDNENSKSDEKGNQSENSEDPEPDRKKSGNACDNDMNCNDDGHSSSNPDSRDSDDSFEHSDFENPKAGEDGFGALGAMQIKVERYVESESDLRLQNCESLTSDSAKDSDSAGEAGAQASSKHQKRKKRRKRQKGGSASRRRLSSASSPGGLDAGLVEPPRLLSSPNSASVLKIKTEISEPINFDNDSSIWNYPPNREISRNESPYSMTKPPSSEHFPSPQGGGGGGGGGGGLHVAIPDSVLTPPGADGAAARKTQFGASATAALAPVASDPLSPPLSASPRDKHPGNGGGGGGGGGGAGGGGPSASNSLLYTGDLEALQRLQAGNVVLPLVHRVTGTLAATSTAAQRVYTTGTIRYAPAEVTLAMQSNLLPNAHAVNFVDVNSPGFGLDPKTPMEMLYHHVHRLNMSGPFGGAVSAASLTQMPAGNVFTTAEGLFSTLPFPVYSNGIHAAQTLERKED

SEQ ID NO: 56547 - protein, 802 aa, Homo sapiens
  Payload ID: 11110
  Gene Symbol: NPAS4
  Gene Name: neuronal PAS domain protein 4
  Uniprot ID: Q8IUM7
  ENSP ID: ENSP00000311196
MYRSTKGASKARRDQINAEIRNLKELLPLAEADKVRLSYLHIMSLACIYTRKGVFFAGGTPLAGPTGLLSAQELEDIVAALPGFLLVFTAEGKLLYLSESVSEHLGHSMVDLVAQGDSIYDIIDPADHLTVRQQLTLPSALDTDRLFRCRFNTSKSLRRQSAGNKLVLIRGRFHAHPPGAYWAGNPVFTAFCAPLEPRPRPGPGPGPGPASLFLAMFQSRHAKDLALLDISESVLIYLGFERSELLCKSWYGLLHPEDLAHASAQHYRLLAESGDIQAEMVVRLQAKTGGWAWIYCLLYSEGPEGPITANNYPISDMEAWSLRQQLNSEDTQAAYVLGTPTMLPSFPENILSQEECSSTNPLFTAALGAPRSTSFPSAPELSVVSASEELPRPSKELDFSYLTFPSGPEPSLQAELSKDLVCTPPYTPHQPGGCAFLFSLHEPFQTHLPTPSSTLQEQLTPSTATFSDQLTPSSATFPDPLTSPLQGQLTETSVRSYEDQLTPCTSTFPDQLLPSTATFPEPLGSPAHEQLTPPSTAFQAHLDSPSQTFPEQLSPNPTKTYFAQEGCSFLYEKLPPSPSSPGNGDCTLLALAQLRGPLSVDVPLVPEGLLTPEASPVKQSFFHYSEKEQNEIDRLIQQISQLAQGMDRPFSAEAGTGGLEPLGGLEPLDSNLSLSGAGPPVLSLDLKPWKCQELDFLADPDNMFLEETPVEDIFMDLSTPDPSEEWGSGDPEAEGPGGAPSPCNNLSPEDHSFLEDLATYETAFETGVSAFPYDGFTDELHQLQSQVQDSFHEDGSGGEPTF

SEQ ID NO: 56548 - protein, 234 aa, Homo sapiens
  Payload ID: 11110
  Gene Symbol: NPAS4
  Gene Name: neuronal PAS domain protein 4
  Uniprot ID: Q8IUM7
  ENSP ID: ENSP00000433135
MYRSTKGASKARRDQINAEIRNLKELLPLAEADKVRLSYLHIMSLACIYTRKGVFFAGGTPLAGPTGLLSAQELEDIVAALPGFLLVFTAEGKLLYLSESVSEHLGHSMVDLVAQGDSIYDIIDPADHLTVRQQLTLPSALDTDRLFRCRFNTSKSLRRQSAGNKLVLIRGRFHAHPPGAYWAGNPVFTAFCAPLEPRPRPGPGPGPGPASLFLAMFQSRHAKDLALLDISESG

SEQ ID NO: 56549 - protein, 432 aa, Homo sapiens
  Payload ID: 11111
  Gene Symbol: NPTX1
  Gene Name: neuronal pentraxin I
  Uniprot ID: Q15818
  ENSP ID: ENSP00000307549
MPAGRAARTCALLALCLLGAGAQDFGPTRFICTSVPVDADMCAASVAAGGAEELRSSVLQLRETVLQQKETILSQKETIRELTAKLGRCESQSTLDPGAGEARAGGGRKQPGSGKNTMGDLSRTPAAETLSQLGQTLQSLKTRLENLEQYSRLNSSSQTNSLKDLLQSKIDELERQVLSRVNTLEEGKGGPRNDTEERVKIETALTSLHQRISELEKGQKDNRPGDKFQLTFPLRTNYMYAKVKKSLPEMYAFTVCMWLKSSATPGVGTPFSYAVPGQANELVLIEWGNNPMEILINDKVAKLPFVINDGKWHHICVTWTTRDGVWEAYQDGTQGGSGENLAPYHPIKPQGVLVLGQEQDTLGGGFDATQAFVGELAHFNIWDRKLTPGEVYNLATCSTKALSGNVIAWAESHIEIYGGATKWTFEACRQIN

SEQ ID NO: 56550 - protein, 431 aa, Homo sapiens
  Payload ID: 11112
  Gene Symbol: NPTX2
  Gene Name: neuronal pentraxin II
  Uniprot ID: P47972
  ENSP ID: ENSP00000265634
MLALLAASVALAVAAGAQDSPAPGSRFVCTALPPEAVHAGCPLPAMPMQGGAQSPEEELRAAVLQLRETVVQQKETLGAQREAIRELTGKLARCEGLAGGKARGAGATGKDTMGDLPRDPGHVVEQLSRSLQTLKDRLESLEHQLRANVSNAGLPGDFREVLQQRLGELERQLLRKVAELEDEKSLLHNETSAHRQKTESTLNALLQRVTELERGNSAFKSPDAFKVSLPLRTNYLYGKIKKTLPELYAFTICLWLRSSASPGIGTPFSYAVPGQANEIVLIEWGNNPIELLINDKVAQLPLFVSDGKWHHICVTWTTRDGMWEAFQDGEKLGTGENLAPWHPIKPGGVLILGQEQDTVGGRFDATQAFVGELSQFNIWDRVLRAQEIVNIANCSTNMPGNIIPWVDNNVDVFGGASKWPVETCEERLLDL

SEQ ID NO: 56551 - protein, 500 aa, Homo sapiens
  Payload ID: 11113
  Gene Symbol: NPTXR
  Gene Name: neuronal pentraxin receptor
  Uniprot ID: O95502
  ENSP ID: ENSP00000327545
LKFLAVLLAAGMLAFLGAVICIIASVPLAASPARALPGGADNASVASGAAASPGPQRSLSALHGAGGSAGPPALPGAPAASAHPLPPGPLFSRFLCTPLAAACPSGAQQGDAAGAAPGEREELLLLQSTAEQLRQTALQQEARIRADQDTIRELTGKLGRCESGLPRGLQGAGPRRDTMADGPWDSPALILELEDAVRALRDRIDRLEQELPARVNLSAAPAPVSAVPTGLHSKMDQLEGQLLAQVLALEKERVALSHSSRRQRQEVEKELDVLQGRVAELEHGSSAYSPPDAFKISIPIRNNYMYARVRKALPELYAFTACMWLRSRSSGTGQGTPFSYSVPGQANEIVLLEAGHEPMELLINDKVAQLPLSLKDNGWHHICIAWTTRDGLWSAYQDGELQGSGENLAAWHPIKPHGILILGQEQDTLGGRFDATQAFVGDIAQFNLWDHALTPAQVLGIANCTAPLLGNVLPWEDKLVEAFGGATKAAFDVCKGRAKA

SEQ ID NO: 56552 - protein, 68 aa, Homo sapiens
  Payload ID: 11114
  Gene Symbol: NREP
  Gene Name: neuronal regeneration related protein
  Uniprot ID: Q16612
  ENSP ID: ENSP00000257435
MVYYPELFVWVSQEPFPNKDMEGRLPKGRLPVPKEVNRKKNDETNAASLTPLGSSELRSPRISYLHFF

SEQ ID NO: 56553 - protein, 68 aa, Homo sapiens; identical to SEQ ID NO: 56552
  Payload ID: 11114
  Gene Symbol: NREP
  Gene Name: neuronal regeneration related protein
  Uniprot ID: Q16612
  ENSP ID: ENSP00000368993

SEQ ID NO: 56554 - protein, 112 aa, Homo sapiens
  Payload ID: 11114
  Gene Symbol: NREP
  Gene Name: neuronal regeneration related protein
  Uniprot ID: Q16612
  ENSP ID: ENSP00000378996
MKGVWNYSALSRREDETRTQRSRMTDRVPCSKCFQVHCQISVLNCVYYPELFVWVSQEPFPNKDMEGRLPKGRLPVPKEVNRKKNDETNAASLTPLGSSELRSPRISYLHFF

SEQ ID NO: 56555 - protein, 68 aa, Homo sapiens; identical to SEQ ID NO: 56552
  Payload ID: 11114
  Gene Symbol: NREP
  Gene Name: neuronal regeneration related protein
  Uniprot ID: Q16612
  ENSP ID: ENSP00000392559

SEQ ID NO: 56556 - protein, 68 aa, Homo sapiens; identical to SEQ ID NO: 56552
  Payload ID: 11114
  Gene Symbol: NREP
  Gene Name: neuronal regeneration related protein
  Uniprot ID: Q16612
  ENSP ID: ENSP00000399766

SEQ ID NO: 56557 - protein, 68 aa, Homo sapiens; identical to SEQ ID NO: 56552
  Payload ID: 11114
  Gene Symbol: NREP
  Gene Name: neuronal regeneration related protein
  Uniprot ID: Q16612
  ENSP ID: ENSP00000402965

SEQ ID NO: 56558 - protein, 68 aa, Homo sapiens; identical to SEQ ID NO: 56552
  Payload ID: 11114
  Gene Symbol: NREP
  Gene Name: neuronal regeneration related protein
  Uniprot ID: Q16612
  ENSP ID: ENSP00000403383

SEQ ID NO: 56559 - protein, 68 aa, Homo sapiens; identical to SEQ ID NO: 56552
  Payload ID: 11114
  Gene Symbol: NREP
  Gene Name: neuronal regeneration related protein
  Uniprot ID: Q16612
  ENSP ID: ENSP00000408839

SEQ ID NO: 56560 - protein, 68 aa, Homo sapiens; identical to SEQ ID NO: 56552
  Payload ID: 11114
  Gene Symbol: NREP
  Gene Name: neuronal regeneration related protein
  Uniprot ID: Q16612
  ENSP ID: ENSP00000416617

SEQ ID NO: 56561 - protein, 33 aa, Homo sapiens
  Payload ID: 11114
  Gene Symbol: NREP
  Gene Name: neuronal regeneration related protein
  ENSP ID: ENSP00000422046
MVYYPELFVWVSQEPFPNKDMEGRLPKGRLPVP

SEQ ID NO: 56562 - protein, 35 aa, Homo sapiens
  Payload ID: 11114
  Gene Symbol: NREP
  Gene Name: neuronal regeneration related protein
  ENSP ID: ENSP00000422278
MVYYPELFVWVSQEPFPNKDMEGRLPKLRKKNRIH

SEQ ID NO: 56563 - protein, 5 aa, Homo sapiens
  Payload ID: 11114
  Gene Symbol: NREP
  Gene Name: neuronal regeneration related protein
  ENSP ID: ENSP00000422514
MVYYP

SEQ ID NO: 56564 - protein, 68 aa, Homo sapiens; identical to SEQ ID NO: 56552
  Payload ID: 11114
  Gene Symbol: NREP
  Gene Name: neuronal regeneration related protein
  Uniprot ID: Q16612
  ENSP ID: ENSP00000422630

SEQ ID NO: 56565 - protein, 35 aa, Homo sapiens; identical to SEQ ID NO: 56562
  Payload ID: 11114
  Gene Symbol: NREP
  Gene Name: neuronal regeneration related protein
  ENSP ID: ENSP00000423320

SEQ ID NO: 56566 - protein, 37 aa, Homo sapiens
  Payload ID: 11114
  Gene Symbol: NREP
  Gene Name: neuronal regeneration related protein
  ENSP ID: ENSP00000426834
MVYYPELFVWVSQEPFPNKDMEGRLPKETSLSPFMES

SEQ ID NO: 56567 - protein, 68 aa, Homo sapiens; identical to SEQ ID NO: 56552
  Payload ID: 11114
  Gene Symbol: NREP
  Gene Name: neuronal regeneration related protein
  Uniprot ID: Q16612
  ENSP ID: ENSP00000427149

SEQ ID NO: 56568 - protein, 65 aa, Homo sapiens
  Payload ID: 11114
  Gene Symbol: NREP
  Gene Name: neuronal regeneration related protein
  ENSP ID: ENSP00000427476
MVYYPELFVWVSQEPFPNKDMEGRLPKGRLPVPKEVNRKKNDETNAASLTPLGSSELRSPRISYL

SEQ ID NO: 56569 - protein, 37 aa, Homo sapiens; identical to SEQ ID NO: 56566
  Payload ID: 11114
  Gene Symbol: NREP
  Gene Name: neuronal regeneration related protein
  ENSP ID: ENSP00000427595

SEQ ID NO: 56570 - protein, 841 aa, Homo sapiens
  Payload ID: 11115
  Gene Symbol: NYAP1
  Gene Name: neuronal tyrosine-phosphorylated phosphoinositide-3-kinase adaptor 1
  Uniprot ID: Q6ZVC0
  ENSP ID: ENSP00000300179
MNLLYRKTKLEWRQHKEEEAKRSSSKEVAPAGSAGPAAGQGPGVRVRDIASLRRSLRMGFMTMPASQEHTPHPCRSAMAPRSLSCHSVGSMDSVGGGPGGASGGLTEDSSTRRPPAKPRRHPSTKLSMVGPGSGAETPPSKKAGSQKPTPEGRESSRKVPPQKPRRSPNTQLSVSFDESCPPGPSPRGGNLPLQRLTRGSRVAGDPDVGAQEEPVYIEMVGDVFRGGGRSGGGLAGPPLGGGGPTPPAGADSDSEESEAIYEEMKYPLPEEAGEGRANGPPPLTATSPPQQPHALPPHAHRRPASALPSRRDGTPTKTTPCEIPPPFPNLLQHRPPLLAFPQAKSASRTPGDGVSRLPVLCHSKEPAGSTPAPQVPARERETPPPPPPPPAANLLLLGPSGRARSHSTPLPPQGSGQPRGERELPNSHSMICPKAAGAPAAPPAPAALLPGPPKDKAVSYTMVYSAVKVTTHSVLPAGPPLGAGEPKTEKEISVLHGMLCTSSRPPVPGKTSPHGGAMGAAAGVLHHRGCLASPHSLPDPTVGPLTPLWTYPATAAGLKRPPAYESLKAGGVLNKGCGVGAPSPMVKIQLQEQGTDGGAFASISCAHVIASAGTPEEEEEEVGAATFGAGWALQRKVLYGGRKAKELDKVEDGARAWNGSAEGPGKVEREDRGPGTSGIPVRSQGAEGLLARIHHGDRGGSRTALPIPCQTFPACHRNGDFTGGYRLGRSASTSGVRQVVLHTPRPCSQPRDALSQPHPALPLPLPLPPQPARERDGKLLEVIERKRCVCKEIKARHRPDRGLCKQESMPILPSWRRGPEPRKSGTPPCRRQHTVLWDTAI

SEQ ID NO: 56571 - protein, 785 aa, Homo sapiens
  Payload ID: 11115
  Gene Symbol: NYAP1
  Gene Name: neuronal tyrosine-phosphorylated phosphoinositide-3-kinase adaptor 1
  ENSP ID: ENSP00000394424
MGFMTMPASQEHTPHPCRSAMAPRSLSCHSVGSMDSVGGGPGGASGGLTEDSSTRRPPAKPRRHPSTKLSMVGPGSGAETPPSKKAGSQKPTPEGRESSRKVPPQKPRRSPNTQLSVSFDESCPPGPSPRGGNLPLQRLTRGSRVAGDPDVGAQEEPVYIEMVGDVFRGGGRSGGGLAGPPLGGGGPTPPAGADSDSEESEAIYEEMKYPLPEEAGEGRANGPPPLTATSPPQQPHALPPHAHRRPASALPSRRDGTPTKTTPCEIPPPFPNLLQHRPPLLAFPQAKSASRTPGDGVSRLPVLCHSKEPAGSTPAPQVPARERETPPPPPPPPAANLLLLGPSGRARSHSTPLPPQGSGQPRGERELPNSHSMICPKAAGAPAAPPAPAALLPGPPKDKAVSYTMVYSAVKVTTHSVLPAGPPLGAGEPKTEKEISVLHGMLCTSSRPPVPGKTSPHGGAMGAAAGVLHHRGCLASPHSLPDPTVGPLTPLWTYPATAAGLKRPPAYESLKAGGVLNKGCGVGAPSPMVKIQLQEQGTDGGAFASISCAHVIASAGTPEEEEEEVGAATFGAGWALQRKVLYGGRKAKELDTEVEDGARAWNGSAEGPGKVEREDRGPGTSGIPVRSQGAEGLLARIHHGDRGGSRTALPIPCQTFPACHRNGDFTGGYRLGRSASTSGVRQVVLHTPRPCSQPRDALSQPHPALPLPLPLPPQPARERDGKLLEVIERKRCVCKEIKARHRPDRGLCKQESMPILPSWRRGPEPRKSGTPPCRRQHTVLWDTAI

SEQ ID NO: 56572 - protein, 653 aa, Homo sapiens
  Payload ID: 11116
  Gene Symbol: NYAP2
  Gene Name: neuronal tyrosine-phosphorylated phosphoinositide-3-kinase adaptor 2
  Uniprot ID: Q9P242
  ENSP ID: ENSP00000272907
MISSKMMSSNPEEDPLDTFLQYIEDMGMKAYDGLVIQNASDIARENDRLRNETNLAYLKEKNEKRRRQEEAIKRIGGEVGRGHEGSYVGKHFRMGFMTMPAPQDRLPHPCSSGFSVRSQSLHSVGGTDDDSSCGSRRQPPPKPKRDPSTKLSTSSETVSSTAASKSGKTPERTEASAKPRPHSDEYSKKIPPPKPKRNPNTQLSTSFDETYIKKHGPRRTSLPRDSSLSQMGSPAGDPEEEEPVYIEMVGNILRDFRKEDDDQSEAVYEEMKYPIFDDLGQDAKCDFDHHSCSSQCATPTVPDLDFAKASVPCPPKGLLCDIPPPFPNLLSHRPPLLVFPPAPVHCSPNSDESPLTPLEVTKLPVLENVSYMKQPAGASPSTLPSHVPGHAKLEKEQAAALGPASATPALSSSPPPPSTLYRTQSPHGYPKSHSTSPSPVSMGRSLTPLSLKRPPPYDAVHSGSLSRSSPSVPHSTPRPVSQDGAKMVNAAVNTYGAAPGGSRSRTPTSPLEELTSLFSSGRSLLRKSSSGRRSKEPAEKSTEELKVRSHSTEPLPKLDNKERGHHGASSSREPVKAQEWDGTPGTPVVTSRLGRCSVSPTLLAGNHSSEPKVSCKLGRSASTSGVPPPSVTPLRQSSDLQQSQVPSSLANRD

SEQ ID NO: 56573 - protein, 81 aa, Homo sapiens
  Payload ID: 11117
  Gene Symbol: NNAT
  Gene Name: neuronatin
  Uniprot ID: Q16517
  ENSP ID: ENSP00000062104
MAAVAAASAELLIIGWYIFRVLLQVFLECCIYWVGFAFRNPPGTQPIARSEVFRYSLQKLAYTVSRTGRQVLGERRQRAPN

SEQ ID NO: 56574 - protein, 54 aa, Homo sapiens
  Payload ID: 11117
  Gene Symbol: NNAT
  Gene Name: neuronatin
  Uniprot ID: Q16517
  ENSP ID: ENSP00000335497
MAAVAAASAELLIIGWYIFRVLLQVFRYSLQKLAYTVSRTGRQVLGERRQRAPN

SEQ ID NO: 56575 - protein, 568 aa, Homo sapiens
  Payload ID: 11118
  Gene Symbol: NDNF
  Gene Name: neuron-derived neurotrophic factor
  Uniprot ID: Q8TB73
  ENSP ID: ENSP00000369014
MVLLHWCLLWLLFPLSSRTQKLPTRDEELFQMQIRDKAFFHDSSVIPDGAEISSYLFRDTPKRYFFVVEEDNTPLSVTVTPCDAPLEWKLSLQELPEDRSGEGSGDLEPLEQQKQQIINEEGTELFSYKGNDVEYFISSSSPSGLYQLDLLSTEKDTHFKVYATTTPESDQPYPELPYDPRVDVTSLGRTTVTLAWKPSPTASLLKQPIQYCVVINKEHNFKSLCAVEAKLSADDAFMMAPKPGLDFSPFDFAHFGFPSDNSGKERSFQAKPSPKLGRHVYSRPKVDIQKICIGNKNIFTVSDLKPDTQYYFDVFVVNINSNMSTAYVGTFARTKEEAKQKTVELKDGKITDVFVKRKGAKFLRFAPVSSHQKVTFFIHSCLDAVQIQVRRDGKLLLSQNVEGIQQFQLRGKPKAKYLVRLKGNKKGASMLKILATTRPTKQSFPSLPEDTRIKAFDKLRTCSSATVAWLGTQERNKFCIYKKEVDDNYNEDQKKREQNQCLGPDIRKKSEKVLCKYFHSQNLQKAVTTETIKGLQPGKSYLLDVYVIGHGGHSVKYQSKVVKTRKFC

SEQ ID NO: 56576 - protein, 145 aa, Homo sapiens
  Payload ID: 11118
  Gene Symbol: NDNF
  Gene Name: neuron-derived neurotrophic factor
  ENSP ID: ENSP00000423352
MVLLHWCLLWLLFPLSSRTQKLPTRDEELFQMQIRDKAFFHDSSVIPDGAEISSYLFRDTPKRYFFVVEEDNTPLSVTVTPCDAPLEWKLSLQELPEDRSGEGSGDLEPLEQQKQQIINEEGTELFSYKGNDVEYFISSSSPSGL

SEQ ID NO: 56577 - protein, 116 aa, Homo sapiens
  Payload ID: 11118
  Gene Symbol: NDNF
  Gene Name: neuron-derived neurotrophic factor
  ENSP ID: ENSP00000426723
MVLLHWCLLWLLFPLSSRTQKLPTRDEELFQMQIRDKAFFHDSSVIPDGAEISSYLFRDTPKRYFFVVEEDNTPLSVTVTPCDAPLEWKLSLQELPEDRSGEGSGDLEPLEQQKQQ

SEQ ID NO: 56578 - protein, 109 aa, Homo sapiens
  Payload ID: 11119
  Gene Symbol: NOVA1
  Gene Name: neuro-oncological ventral antigen 1
  ENSP ID: ENSP00000299472
MPQNVAKTEPVSILQPQTTVNPDRIKQVKIIVPNSTAGLIIGKGGATVKAVMEQSGAWVQLSQKPDGINLQERVVTVSGEPEQNRKAVELIIQKIQEDPQSGSCLNISY

SEQ ID NO: 56579 - protein, 181 aa, Homo sapiens
  Payload ID: 11119
  Gene Symbol: NOVA1
  Gene Name: neuro-oncological ventral antigen 1
  Uniprot ID: P51513
  ENSP ID: ENSP00000342387
MMAAAPIQQNGTHTGVPIDLDPPDSRKRPLEAPPEAGSTKRTNTGEDGQYFLKVLIPSYAAGSIIGKGGQTIVQLQKETGATIKLSKSKDFYPGTTERVCLIQGTVEALNAVHGFIAEKIREMPQNVAKTEPVSILQPQTTVNPDRIKQTLPSSPTTTKSSPSDPMTTSRANQKHNISWIS

SEQ ID NO: 56580 - protein, 277 aa, Homo sapiens
  Payload ID: 11119
  Gene Symbol: NOVA1
  Gene Name: neuro-oncological ventral antigen 1
  ENSP ID: ENSP00000408914
MLSEEDGQYFLKVLIPSYAAGSIIGKGGQTIVQLQKETGATIKLSKSKDFYPGTTERVCLIQGTVEALNAVHGFIAEKIREMPQNVAKTEPVSILQPQTTVNPDRIKQTLPSSPTTTKSSPSDPMTTSRANQVKIIVPNSTAGLIIGKGGATVKAVMEQSGAWVQLSQKPDGINLQERVVTVSGEPEQNRKAVELIIQKIQEDPQSGSCLNISYANVTGPVANSNPTGSPYANTAEVLPTAAAAAGLLGHANLAGVAAFPAVLSGFTGNDLVAITSA

SEQ ID NO: 56581 - protein, 507 aa, Homo sapiens
  Payload ID: 11119
  Gene Symbol: NOVA1
  Gene Name: neuro-oncological ventral antigen 1
  Uniprot ID: P51513
  ENSP ID: ENSP00000438875
MMAAAPIQQNGTHTGVPIDLDPPDSRKRPLEAPPEAGSTKRTNTGEDGQYFLKVLIPSYAAGSIIGKGGQTIVQLQKETGATIKLSKSKDFYPGTTERVCLIQGTVEALNAVHGFIAEKIREMPQNVAKTEPVSILQPQTTVNPDRIKQTLPSSPTTTKSSPSDPMTTSRANQVKIIVPNSTAGLIIGKGGATVKAVMEQSGAWVQLSQKPDGINLQERVVTVSGEPEQNRKAVELIIQKIQEDPQSGSCLNISYANVTGPVANSNPTGSPYANTAEVLPTAAAAAGLLGHANLAGVAAFPAVLSGFTGNDLVAITSALNTLASYGYNLNTLGLGLSQAAATGALAAAAASANPAAAAANLLATYASEASASGSTAGGTAGTFALGSLAAATAATNGYFGAASPLAASAILGTEKSTDGSKDVVEIAVPENLVGAILGKGGKTLVEYQELTGARIQISKKGEFVPGTRNRKVTITGTPAATQAAQYLITQRITYEQGVRAANPQKVG

SEQ ID NO: 56582 - protein, 483 aa, Homo sapiens
  Payload ID: 11119
  Gene Symbol: NOVA1
  Gene Name: neuro-oncological ventral antigen 1
  Uniprot ID: P51513
  ENSP ID: ENSP00000447391
MMAAAPIQQNGTHTGVPIDLDPPDSRKRPLEAPPEAGSTKRTNTGEDGQYFLKVLIPSYAAGSIIGKGGQTIVQLQKETGATIKLSKSKDFYPGTTERVCLIQGTVEALNAVHGFIAEKIREMPQNVAKTEPVSILQPQTTVNPDRIKQVKIIVPNSTAGLIIGKGGATVKAVMEQSGAWVQLSQKPDGINLQERVVTVSGEPEQNRKAVELIIQKIQEDPQSGSCLNISYANVTGPVANSNPTGSPYANTAEVLPTAAAAAGLLGHANLAGVAAFPAVLSGFTGNDLVAITSALNTLASYGYNLNTLGLGLSQAAATGALAAAAASANPAAAAANLLATYASEASASGSTAGGTAGTFALGSLAAATAATNGYFGAASPLAASAILGTEKSTDGSKDVVEIAVPENLVGAILGKGGKTLVEYQELTGARIQISKKGEFVPGTRNRKVTITGTPAATQAAQYLITQRITYEQGVRAANPQKVG

SEQ ID NO: 56583 - protein, 49 aa, Homo sapiens
  Payload ID: 11119
  Gene Symbol: NOVA1
  Gene Name: neuro-oncological ventral antigen 1
  ENSP ID: ENSP00000448144
VQLQKETGATIKLSKSKDFYPGADSCRRNCTWCCTEGISPLCHLQSETD

SEQ ID NO: 56584 - protein, 211 aa, Homo sapiens
  Payload ID: 11119
  Gene Symbol: NOVA1
  Gene Name: neuro-oncological ventral antigen 1
  ENSP ID: ENSP00000448157
MMAAAPIQQNGTHTGVPIDLDPPDSRKRPLEAPPEAGSTKRTNTGEDGQYFLKVLIPSYAAGSIIGKGGQTIVQLQKETGATIKLSKSKDFYPGTTERVCLIQGTVEALNAVHGFIAEKIREMPQNVAKTEPVSILQPQTTVNPDRIKQTLPSSPTTTKSSPSDPMTTSRANQVQYHPVIYTILFTGDCLQTGEKDNGGLRIYSFIHIYAP

SEQ ID NO: 56585 - protein, 121 aa, Homo sapiens
  Payload ID: 11119
  Gene Symbol: NOVA1
  Gene Name: neuro-oncological ventral antigen 1
  ENSP ID: ENSP00000448956
MMAAAPIQQNGTHTGVPIDLDPPDSRKRPLEAPPEAGSTKRTNTGEDGQYFLKVLIPSYAAGSIIGKGGQTIVQLQKETGATIKLSKSKDFYPGADSCRRNCTWCCTEGISPLCHLQSETD

SEQ ID NO: 56586 - protein, 96 aa, Homo sapiens
  Payload ID: 11119
  Gene Symbol: NOVA1
  Gene Name: neuro-oncological ventral antigen 1
  ENSP ID: ENSP00000449113
MPQNVAKTEPVSILQPQTTVNPDRIKQTLPSSPTTTKSSPSDPMTTSRANQVKIIVPNSTAGLIIGKGGATVKAVMEQSGAWVQLSQKPDGINLQE

SEQ ID NO: 56587 - protein, 173 aa, Homo sapiens
  Payload ID: 11119
  Gene Symbol: NOVA1
  Gene Name: neuro-oncological ventral antigen 1
  ENSP ID: ENSP00000449185
MHPMHRSREDGQYFLKVLIPSYAAGSIIGKGGQTIVQLQKETGATIKLSKSKDFYPGTTERVCLIQGTVEALNAVHGFIAEKIREMPQNVAKTEPVSILQPQTTVNPDRIKQTLPSSPTTTKSSPSDPMTTSRANQVKIIVPNSTAGLIIGKGGATVKAVMEQSGAWVQLSQK

SEQ ID NO: 56588 - protein, 152 aa, Homo sapiens
  Payload ID: 11119
  Gene Symbol: NOVA1
  Gene Name: neuro-oncological ventral antigen 1
  ENSP ID: ENSP00000459545
MMAAAPIQQNGTHTGVPIDLDPPDSRKRPLEAPPEAGSTKRTNTGEDGQYFLKVLIPSYAAGSIIGKGGQTIVQLQKETGATIKLSKSKDFYPGTTERVCLIQGTVEALNAVHGFIAEKIREMPQNVAKTEPVSILQPQTTVNPDRIKQVSV

SEQ ID NO: 56589 - protein, 492 aa, Homo sapiens
  Payload ID: 11120
  Gene Symbol: NOVA2
  Gene Name: neuro-oncological ventral antigen 2
  Uniprot ID: Q9UNW9
  ENSP ID: ENSP00000263257
MEPEAPDSRKRPLETPPEVVCTKRSNTGEEGEYFLKVLIPSYAAGSIIGKGGQTIVQLQKETGATIKLSKSKDFYPGTTERVCLVQGTAEALNAVHSFIAEKVREIPQAMTKPEVVNILQPQTTMNPDRAKQAKLIVPNSTAGLIIGKGGATVKAVMEQSGAWVQLSQKPEGINLQERVVTVSGEPEQVHKAVSAIVQKVQEDPQSSSCLNISYANVAGPVANSNPTGSPYASPADVLPAAAAASAAAASGLLGPAGLAGVGAFPAALPAFSGTDLLAISTALNTLASYGYNTNSLGLGLNSAAASGVLAAVAAGANPAAAAAANLLASYAGEAGAGPAGGAAPPPPPPPGALGSFALAAAANGYLGAGAGGGAGGGGGPLVAAAAAAGAAGGFLTAEKLAAESAKELVEIAVPENLVGAILGKGGKTLVEYQELTGARIQISKKGEFLPGTRNRRVTITGSPAATQAAQYLISQRVTYEQGVRASNPQKVG

SEQ ID NO: 56590 - protein, 40 aa, Homo sapiens
  Payload ID: 11120
  Gene Symbol: NOVA2
  Gene Name: neuro-oncological ventral antigen 2
  ENSP ID: ENSP00000471736
MTKPEVVNILQPQTTMNPDRAKQAKLIVPNSTAGLIIGKG

SEQ ID NO: 56591 - protein, 125 aa, Homo sapiens
  Payload ID: 11121
  Gene Symbol: NPB
  Gene Name: neuropeptide B
  Uniprot ID: Q8NG41
  ENSP ID: ENSP00000332766
MARSATLAAAALALCLLLAPPGLAWYKPAAGHSSYSVGRAAGLLSGLRRSPYARRSQPYRGAEPPGGAGASPELQLHPRLRSLAVCVQDVAPNLQRCERLPDGRGTYQCKANVFLSLRAADCLAA

SEQ ID NO: 56592 - protein, 156 aa, Homo sapiens
  Payload ID: 11121
  Gene Symbol: NPB
  Gene Name: neuropeptide B
  ENSP ID: ENSP00000461824
MARSATLAAAALALCLLLAPPGLAWYKPAAGHSSYSVGRAAGLLSGLRRSPYARRSQPYRGAEPPGGAGASPELQLHPRLRSLVSPACRGLMGGGGRTWVGVRRPLSLCLPAPQAVCVQDVAPNLQRCERLPDGRGTYQCKANVFLSLRAADCLAA

SEQ ID NO: 56593 - protein, 430 aa, Homo sapiens
  Payload ID: 11122
  Gene Symbol: NPFFR1
  Gene Name: neuropeptide FF receptor 1
  Uniprot ID: Q9GZQ6
  ENSP ID: ENSP00000277942
MEGEPSQPPNSSWPLSQNGTNTEATPATNLTFSSYYQHTSPVAAMFIVAYALIFLLCMVGNTLVCFIVLKNRHMHTVTNMFILNLAVSDLLVGIFCMPTTLVDNLITGWPFDNATCKMSGLVQGMSVSASVFTLVAIAVERFRCIVHPFREKLTLRKALVTIAVIWALALLIMCPSAVTLTVTREEHHFMVDARNRSYPLYSCWEAWPEKGMRRVYTTVLFSHIYLAPLALIVVMYARIARKLCQAPGPAPGGEEAADPRASRRRARVVHMLVMVALFFTLSWLPLWALLLLIDYGQLSAPQLHLVTVYAFPFAHWLAFFNSSANPIIYGYFNENFRRGFQAAFRARLCPRPSGSHKEAYSERPGGLLHRRVFVVVRPSDSGLPSESGPSSGAPRPGRLPLRNGRVAHHGLPREGPGCSHLPLTIPAWDI

SEQ ID NO: 56594 - protein, 522 aa, Homo sapiens
  Payload ID: 11123
  Gene Symbol: NPFFR2
  Gene Name: neuropeptide FF receptor 2
  Uniprot ID: Q9Y5X5
  ENSP ID: ENSP00000307822
MNSFFGTPAASWCLLESDVSSAPDKEAGRERRALSVQQRGGPAWSGSLEWSRQSAGDRRRLGLSRQTAKSSWSRSRDRTCCCRRAWWILVPAADRARRERFIMNEKWDTNSSENWHPIWNVNDTKHHLYSDINITYVNYYLHQPQVAAIFIISYFLIFFLCMMGNTVVCFIVMRNKHMHTVTNLFILNLAISDLLVGIFCMPITLLDNIIAGWPFGNTMCKISGLVQGISVAASVFTLVAIAVDRFQCVVYPFKPKLTIKTAFVIIMIIWVLAITIMSPSAVMLHVQEEKYYRVRLNSQNKTSPVYWCREDWPNQEMRKIYTTVLFANIYLAPLSLIVIMYGRIGISLFRAAVPHTGRKNQEQWHVVSRKKQKIIKMLLIVALLFILSWLPLWTLMMLSDYADLSPNELQIINIYIYPFAHWLAFGNSSVNPIIYGFFNENFRRGFQEAFQLQLCQKRAKPMEAYALKAKSHVLINTSNQLVQESTFQNPHGETLLYRKSAEKPQQELVMEELKETTNSSEI

SEQ ID NO: 56595 - protein, 132 aa, Homo sapiens
  Payload ID: 11123
  Gene Symbol: NPFFR2
  Gene Name: neuropeptide FF receptor 2
  Uniprot ID: Q9Y5X5
  ENSP ID: ENSP00000340789
MNSFFGTPAASWCLLESDVSSAPDKEAGRERRALSVQQRGGPAWSGSLEWSRQSAGDRRRLGLSRQTAKSSWSRSRDRTCCCRRAWWILVPAADRARRERMAIWKHDVQDQWIGPGNICRSFSLYVSCNCCR

SEQ ID NO: 56596 - protein, 420 aa, Homo sapiens
  Payload ID: 11123
  Gene Symbol: NPFFR2
  Gene Name: neuropeptide FF receptor 2
  Uniprot ID: Q9Y5X5
  ENSP ID: ENSP00000351599
MNEKWDTNSSENWHPIWNVNDTKHHLYSDINITYVNYYLHQPQVAAIFIISYFLIFFLCMMGNTVVCFIVMRNKHMHTVTNLFILNLAISDLLVGIFCMPITLLDNIIAGWPFGNTMCKISGLVQGISVAASVFTLVAIAVDRFQCVVYPFKPKLTIKTAFVIIMIIWVLAITIMSPSAVMLHVQEEKYYRVRLNSQNKTSPVYWCREDWPNQEMRKIYTTVLFANIYLAPLSLIVIMYGRIGISLFRAAVPHTGRKNQEQWHVVSRKKQKIIKMLLIVALLFILSWLPLWTLMMLSDYADLSPNELQIINIYIYPFAHWLAFGNSSVNPIIYGFFNENFRRGFQEAFQLQLCQKRAKPMEAYALKAKSHVLINTSNQLVQESTFQNPHGETLLYRKSAEKPQQELVMEELKETTNSSEI

SEQ ID NO: 56597 - protein, 423 aa, Homo sapiens
  Payload ID: 11123
  Gene Symbol: NPFFR2
  Gene Name: neuropeptide FF receptor 2
  Uniprot ID: Q9Y5X5
  ENSP ID: ENSP00000379321
MFIMNEKWDTNSSENWHPIWNVNDTKHHLYSDINITYVNYYLHQPQVAAIFIISYFLIFFLCMMGNTVVCFIVMRNKHMHTVTNLFILNLAISDLLVGIFCMPITLLDNIIAGWPFGNTMCKISGLVQGISVAASVFTLVAIAVDRFQCVVYPFKPKLTIKTAFVIIMIIWVLAITIMSPSAVMLHVQEEKYYRVRLNSQNKTSPVYWCREDWPNQEMRKIYTTVLFANIYLAPLSLIVIMYGRIGISLFRAAVPHTGRKNQEQWHVVSRKKQKIIKMLLIVALLFILSWLPLWTLMMLSDYADLSPNELQIINIYIYPFAHWLAFGNSSVNPIIYGFFNENFRRGFQEAFQLQLCQKRAKPMEAYALKAKSHVLINTSNQLVQESTFQNPHGETLLYRKSAEKPQQELVMEELKETTNSSEI

SEQ ID NO: 56598 - protein, 113 aa, Homo sapiens
  Payload ID: 11124
  Gene Symbol: NPFF
  Gene Name: neuropeptide FF-amide peptide precursor
  Uniprot ID: O15130
  ENSP ID: ENSP00000267017
MDSRQAAALLVLLLLIDGGCAEGPGGQQEDQLSAEEDSEPLPPQDAQTSGSLLHYLLQAMERPGRSQAFLFQPQRFGRNTQGSWRNEWLSPRAGEGLNSQFWSLAAPQRFGKK

SEQ ID NO: 56599 - protein, 89 aa, Homo sapiens
  Payload ID: 11125
  Gene Symbol: NPS
  Gene Name: neuropeptide S
  Uniprot ID: P0C0P6
  ENSP ID: ENSP00000381105
MISSVKLNLILVLSLSTMHVFWCYPVPSSKVSGKSDYFLILLNSCPTRLDRSKELAFLKPILEKMFVKRSFRNGVGTGMKKTSFQRAKS

SEQ ID NO: 56600 - protein, 377 aa, Homo sapiens
  Payload ID: 11126
  Gene Symbol: NPSR1
  Gene Name: neuropeptide S receptor 1
  Uniprot ID: Q6W5P4
  ENSP ID: ENSP00000352839
MPANFTEGSFDSSGTGQTLDSSPVACTETVTFTEVVEGKEWGSFYYSFKTEQLITLWVLFVFTIVGNSVVLFSTWRRKKKSRMTFFVTQLAITDSFTGLVNILTDINWRFTGDFTAPDLVCRVVRYLQVVLLYASTYVLVSLSIDRYHAIVYPMKFLQGEKQARVLIVIAWSLSFLFSIPTLIIFGKRTLSNGEVQCWALWPDDSYWTPYMTIVAFLVYFIPLTIISIMYGIVIRTIWIKSKTYETVISNCSDGKLCSSYNRGLISKAKIKAIKYSIIIILAFICCWSPYFLFDILDNFNLLPDTQERFYASVIIQNLPALNSAINPLIYCVFSSSISFPCRVIRLRQLQEAALMLCPQRENWKGTWPGVPSWALPR

SEQ ID NO: 56601 - protein, 371 aa, Homo sapiens
  Payload ID: 11126
  Gene Symbol: NPSR1
  Gene Name: neuropeptide S receptor 1
  Uniprot ID: Q6W5P4
  ENSP ID: ENSP00000353788
MPANFTEGSFDSSGTGQTLDSSPVACTETVTFTEVVEGKEWGSFYYSFKTEQLITLWVLFVFTIVGNSVVLFSTWRRKKKSRMTFFVTQLAITDSFTGLVNILTDINWRFTGDFTAPDLVCRVVRYLQVVLLYASTYVLVSLSIDRYHAIVYPMKFLQGEKQARVLIVIAWSLSFLFSIPTLIIFGKRTLSNGEVQCWALWPDDSYWTPYMTIVAFLVYFIPLTIISIMYGIVIRTIWIKSKTYETVISNCSDGKLCSSYNRGLISKAKIKAIKYSIIIILAFICCWSPYFLFDILDNFNLLPDTQERFYASVIIQNLPALNSAINPLIYCVFSSSISFPCREQRSQDSRMTFRERTERHEMQILSKPEFI

SEQ ID NO: 56602 - protein, 390 aa, Homo sapiens
  Payload ID: 11126
  Gene Symbol: NPSR1
  Gene Name: neuropeptide S receptor 1
  Uniprot ID: Q6W5P4
  ENSP ID: ENSP00000370950
MPANFTEGSFDSSGTGQTLDSSPVACTETVTFTEVVEGKEWGSFYYSFKTEQLITLWVLFVFTIVGNSVVLFSTWRRKKKSRMTFFVTQLAITDSFTGLVNILTDINWRFTGDFTAPDLVCRVVRYLQVVLLYASTYVLVSLSIDRYHAIVYPMKFLQGEKQARVLIVIAWSLSFLFSIPTLIIFGKRTLSNGEVQCWALWPDDSYWTPYMTIVAFLVYFIPLTIISIMYGIVIRTIWIKSKTYETVISNCSDGKLCSSYNRGLISKAKIKAIKYSIIIILAFICCWSPYFLFDILDNFNLLPDTQERFYASVIIQNLPALNSAINPLIYCVFSSSISFPCRANSSVYLLACDVSVLWALVLTSEKESCESWRRKGAKITGFQNDVPGEN

SEQ ID NO: 56603 - protein, 305 aa, Homo sapiens
  Payload ID: 11126
  Gene Symbol: NPSR1
  Gene Name: neuropeptide S receptor 1
  Uniprot ID: Q6W5P4
  ENSP ID: ENSP00000370953
MPANFTEGSFDSSGTGQTLDSSPVACTETVTFTEVVEGKEWGSFYYSFKTEQLITLWVLFVFTIVGNSVVLFSTWRRKKKSRMTFFVTQLAITEKQARVLIVIAWSLSFLFSIPTLIIFGKRTLSNGEVQCWALWPDDSYWTPYMTIVAFLVYFIPLTIISIMYGIVIRTIWIKSKTYETVISNCSDGKLCSSYNRGLISKAKIKAIKYSIIIILAFICCWSPYFLFDILDNFNLLPDTQERFYASVIIQNLPALNSAINPLIYCVFSSSISFPCREQRSQDSRMTFRERTERHEMQILSKPEFI

SEQ ID NO: 56604 - protein, 158 aa, Homo sapiens
  Payload ID: 11126
  Gene Symbol: NPSR1
  Gene Name: neuropeptide S receptor 1
  Uniprot ID: Q6W5P4
  ENSP ID: ENSP00000370955
MPANFTEGSFDSSGTGQTLDSSPVACTETVTFTEVVEGKEWGSFYYSFKTEQLITLWVLFVFTIVGNSVVLFSTWRRKKKSRMTFFVTQLAITGCAALRLYLRPGVPQHRQIPCHRLPHEVPSRRKASQGPHCDRLEPVFSVLHSHPDHIWEEDTVQR

SEQ ID NO: 56605 - protein, 143 aa, Homo sapiens
  Payload ID: 11126
  Gene Symbol: NPSR1
  Gene Name: neuropeptide S receptor 1
  Uniprot ID: Q6W5P4
  ENSP ID: ENSP00000370965
MPANFTEGSFDSSGTGQTLDSSPVACTETVTFTEVVEGKEWGSFYYSFKTEQLITLWVLFVFTIVGNSVVLFSTWRRKKKSRMTFFVTQLAITDSFTGLVNILTDINWRFTGDFTAPDLVCRVVRYLQVMVMKLFHIQKMNME

SEQ ID NO: 56606 - protein, 136 aa, Homo sapiens
  Payload ID: 11126
  Gene Symbol: NPSR1
  Gene Name: neuropeptide S receptor 1
  Uniprot ID: Q6W5P4
  ENSP ID: ENSP00000379402
MPANFTEGSFDSSGTGQTLDSSPVACTETVTFTEVVEGKEWGSFYYSFKTEQLITLWVLFVFTIVGNSVVLFSTWRRKKKSRMTFFVTQLAITDSFTGLVNILTDINWRFTGDFTAPDLVCRVVRYLQKSKPGSSL

SEQ ID NO: 56607 - protein, 366 aa, Homo sapiens
  Payload ID: 11126
  Gene Symbol: NPSR1
  Gene Name: neuropeptide S receptor 1
  Uniprot ID: Q6W5P4
  ENSP ID: ENSP00000433258
MPANFTEGSFDSSGTGQTLDSSPVACTETVTFTEVVEGKEWGSFYYSFKTEQLITLWVLFVFTIVGNSVVLFSTWRRKKKSRMTFFVTQLAITDINWRFTGDFTAPDLVCRVVRYLQVVLLYASTYVLVSLSIDRYHAIVYPMKFLQGEKQARVLIVIAWSLSFLFSIPTLIIFGKRTLSNGEVQCWALWPDDSYWTPYMTIVAFLVYFIPLTIISIMYGIVIRTIWIKSKTYETVISNCSDGKLCSSYNRGLISKAKIKAIKYSIIIILAFICCWSPYFLFDILDNFNLLPDTQERFYASVIIQNLPALNSAINPLIYCVFSSSISFPCRVIRLRQLQEAALMLCPQRENWKGTWPGVPSWALPR

SEQ ID NO: 56608 - protein, 94 aa, Homo sapiens
  Payload ID: 11126
  Gene Symbol: NPSR1
  Gene Name: neuropeptide S receptor 1
  Uniprot ID: Q6W5P4
  ENSP ID: ENSP00000434955
MPANFTEGSFDSSGTGQTLDSSPVACTETVTFTEVVEGKEWGSFYYSFKTEQLITLWVLFVFTIVGNSVVLFSTWRRKKKSRMTFFVTQLAITV

SEQ ID NO: 56609 - protein, 196 aa, Homo sapiens
  Payload ID: 11127
  Gene Symbol: NPVF
  Gene Name: neuropeptide VF precursor
  Uniprot ID: Q9HCQ7
  ENSP ID: ENSP00000222674
MEIISSKLFILLTLATSSLLTSNIFCADELVMSNLHSKENYDKYSEPRGYPKGERSLNFEELKDWGPKNVIKMSTPAVNKMPHSFANLPLRFGRNVQEERSAGATANLPLRSGRNMEVSLVRRVPNLPQRFGRTTTAKSVCRMLSDLCQGSMHSPCANDLFYSMTCQHQEIQNPDQKQSRRLLFKKIDDAELKQEK

SEQ ID NO: 56610 - protein, 165 aa, Homo sapiens
  Payload ID: 11128
  Gene Symbol: NPW
  Gene Name: neuropeptide W
  Uniprot ID: Q8N729
  ENSP ID: ENSP00000330070
LAWRPGERGAPASRPRLALLLLLLLLPLPSGAWYKHVASPRYHTVGRAAGLLMGLRRSPYLWRRALRAAAGPLARDTLSPEPAAREAPLLLPSWVQELWETRRRSSQAGIPVRAPRSPRAPEPALEPESLDFSGAGQRLRRDVSRPAVDPAANRLGLPCLAPGPF

SEQ ID NO: 56611 - protein, 113 aa, Homo sapiens
  Payload ID: 11128
  Gene Symbol: NPW
  Gene Name: neuropeptide W
  ENSP ID: ENSP00000456974
MGLRRSPYLWRRALRAAAGPLARDTLSPEPAAREAPLLLPSWVQELWETRRRSSQAGIPVRAPRSPRAPEPALEPESLDFSGAGQRLRRDVSRPAVDPAANRLGLPCLAPGPF

SEQ ID NO: 56612 - protein, 128 aa, Homo sapiens
  Payload ID: 11128
  Gene Symbol: NPW
  Gene Name: neuropeptide W
  ENSP ID: ENSP00000457009
MSRPLEGPRGHAASPGLLWATRVTSTLAGLHELALSDETRHNWFASQMNKGSCLSPARLLSCCPRGFRSCGRRDAGAPRQGSPSVRPGARAPQSLRWNRSPWTSAELARDFGETSPAQRWTPQQTALA

SEQ ID NO: 56613 - protein, 97 aa, Homo sapiens
  Payload ID: 11129
  Gene Symbol: NPY
  Gene Name: neuropeptide Y
  Uniprot ID: P01303
  ENSP ID: ENSP00000242152
MLGNKRLGLSGLTLALSLLVCLGALAEAYPSKPDNPGEDAPAEDMARYYSALRHYINLITRQRYGKRSSPETLISDLLMRESTENVPRTRLEDPAMW

SEQ ID NO: 56614 - protein, 97 aa, Homo sapiens; identical to SEQ ID NO: 56613
  Payload ID: 11129
  Gene Symbol: NPY
  Gene Name: neuropeptide Y
  Uniprot ID: P01303
  ENSP ID: ENSP00000384364

SEQ ID NO: 56615 - protein, 97 aa, Homo sapiens; identical to SEQ ID NO: 56613
  Payload ID: 11129
  Gene Symbol: NPY
  Gene Name: neuropeptide Y
  Uniprot ID: P01303
  ENSP ID: ENSP00000385282

SEQ ID NO: 56616 - protein, 384 aa, Homo sapiens
  Payload ID: 11130
  Gene Symbol: NPY1R
  Gene Name: neuropeptide Y receptor Y1
  Uniprot ID: P25929
  ENSP ID: ENSP00000354652
MNSTLFSQVENHSVHSNFSEKNAQLLAFENDDCHLPLAMIFTLALAYGAVIILGVSGNLALIIIILKQKEMRNVTNILIVNLSFSDLLVAIMCLPFTFVYTLMDHWVFGEAMCKLNPFVQCVSITVSIFSLVLIAVERHQLIINPRGWRPNNRHAYVGIAVIWVLAVASSLPFLIYQVMTDEPFQNVTLDAYKDKYVCFDQFPSDSHRLSYTTLLLVLQYFGPLCFIFICYFKIYIRLKRRNNMMDKMRDNKYRSSETKRINIMLLSIVVAFAVCWLPLTIFNTVFDWNHQIIATCNHNLLFLLCHLTAMISTCVNPIFYGFLNKNFQRDLQFFFNFCDFRSRDDDYETIAMSTMHTDVSKTSLKQASPVAFKKINNNDDNEKI

SEQ ID NO: 56617 - protein, 99 aa, Homo sapiens
  Payload ID: 11130
  Gene Symbol: NPY1R
  Gene Name: neuropeptide Y receptor Y1
  ENSP ID: ENSP00000421618
MTDEPFQNVTLDAYKDKYVCFDQFPSDSHRLSYTTLLLVLQYFGPLCFIFICYFKIYIRLKRRNNMMDKMRDNKYRSSETKRINIMLLSIVVAFAVCWL

SEQ ID NO: 56618 - protein, 64 aa, Homo sapiens
  Payload ID: 11130
  Gene Symbol: NPY1R
  Gene Name: neuropeptide Y receptor Y1
  ENSP ID: ENSP00000422963
MMDKMRDNKYRSSETKRINIMLLSIVVAFAVCWLPLTIFNTVFDWNHQIIATCNHNLLFLLCHL

SEQ ID NO: 56619 - protein, 24 aa, Homo sapiens
  Payload ID: 11130
  Gene Symbol: NPY1R
  Gene Name: neuropeptide Y receptor Y1
  ENSP ID: ENSP00000423878
MNSTLFSQVENHSVHSNFSEKNAQ

SEQ ID NO: 56620 - protein, 60 aa, Homo sapiens
  Payload ID: 11130
  Gene Symbol: NPY1R
  Gene Name: neuropeptide Y receptor Y1
  ENSP ID: ENSP00000426099
MNSTLFSQVENHSVHSNFSEKNAQLLAFENDDCHLPLAMIFTLALAYGAVIILGVSGNLA

SEQ ID NO: 56621 - protein, 141 aa, Homo sapiens
  Payload ID: 11130
  Gene Symbol: NPY1R
  Gene Name: neuropeptide Y receptor Y1
  ENSP ID: ENSP00000427284
MMDKMRDNKYRSSETKRINIMLLSIVVAFAVCWLPLTIFNTVFDWNHQIIATCNHNLLFLLCHLTAMISTCVNPIFYGFLNKNFQRDLQFFFNFCDFRSRDDDYETIAMSTMHTDVSKTSLKQASPVAFKKINNNDDNEKI

SEQ ID NO: 56622 - protein, 61 aa, Homo sapiens
  Payload ID: 11130
  Gene Symbol: NPY1R
  Gene Name: neuropeptide Y receptor Y1
  ENSP ID: ENSP00000427564
MNSTLFSQVENHSVHSNFSEKNAQLLAFENDDCHLPLAMIFTLALAYGAVIILGVSGNLAL

SEQ ID NO: 56623 - protein, 381 aa, Homo sapiens
  Payload ID: 11131
  Gene Symbol: NPY2R
  Gene Name: neuropeptide Y receptor Y2
  Uniprot ID: P49146
  ENSP ID: ENSP00000332591
MGPIGAEADENQTVEEMKVEQYGPQTTPRGELVPDPEPELIDSTKLIEVQVVLILAYCSIILLGVIGNSLVIHVVIKFKSMRTVTNFFIANLAVADLLVNTLCLPFTLTYTLMGEWKMGPVLCHLVPYAQGLAVQVSTITLTVIALDRHRCIVYHLESKISKRISFLIIGLAWGISALLASPLAIFREYSLIEIIPDFEIVACTEKWPGEEKSIYGTVYSLSSLLILYVLPLGIISFSYTRIWSKLKNHVSPGAANDHYHQRRQKTTKMLVCVVVVFAVSWLPLHAFQLAVDIDSQVLDLKEYKLIFTVFHIIAMCSTFANPLLYGWMNSNYRKAFLSAFRCEQRLDAIHSEVSVTFKAKKNLEVRKNSGPNDSFTEATNV

SEQ ID NO: 56624 - protein, 381 aa, Homo sapiens; identical to SEQ ID NO: 56623
  Payload ID: 11131
  Gene Symbol: NPY2R
  Gene Name: neuropeptide Y receptor Y2
  Uniprot ID: P49146
  ENSP ID: ENSP00000426366

SEQ ID NO: 56625 - protein, 375 aa, Homo sapiens
  Payload ID: 11132
  Gene Symbol: NPY4R
  Gene Name: neuropeptide Y receptor Y4
  Uniprot ID: P50391
  ENSP ID: ENSP00000363431
MNTSHLLALLLPKSPQGENRSKPLGTPYNFSEHCQDSVDVMVFIVTSYSIETVVGVLGNLCLMCVTVRQKEKANVTNLLIANLAFSDFLMCLLCQPLTAVYTIMDYWIFGETLCKMSAFIQCMSVTVSILSLVLVALERHQLIINPTGWKPSISQAYLGIVLIWVIACVLSLPFLANSILENVFHKNHSKALEFLADKVVCTESWPLAHHRTIYTTFLLLFQYCLPLGFILVCYARIYRCLQRQGRVFHKGTYSLRAGHMKQVNVVLVVMVVAFAVLWLPLHVFNSLEDWHHEAIPICHGNLIFLVCHLLAMASTCVNPFIYGFLNTNFKKEIKALVLTCQQSAPLEESEHLPLSTVHTEVSKGSLRLSGRSNPI

SEQ ID NO: 56626 - protein, 375 aa, Homo sapiens; identical to SEQ ID NO: 56625
  Payload ID: 11132
  Gene Symbol: NPY4R
  Gene Name: neuropeptide Y receptor Y4
  Uniprot ID: P50391
  ENSP ID: ENSP00000379066

SEQ ID NO: 56627 - protein, 375 aa, Homo sapiens; identical to SEQ ID NO: 56625
  Payload ID: 11132
  Gene Symbol: NPY4R
  Gene Name: neuropeptide Y receptor Y4
  Uniprot ID: P50391
  ENSP ID: ENSP00000480883

SEQ ID NO: 56628 - protein, 445 aa, Homo sapiens
  Payload ID: 11133
  Gene Symbol: NPY5R
  Gene Name: neuropeptide Y receptor Y5
  Uniprot ID: Q15761
  ENSP ID: ENSP00000339377
MDLELDEYYNKTLATENNTAATRNSDFPVWDDYKSSVDDLQYFLIGLYTFVSLLGFMGNLLILMALMKKRNQKTTVNFLIGNLAFSDILVVLFCSPFTLTSVLLDQWMFGKVMCHIMPFLQCVSVLVSTLILISIAIVRYHMIKHPISNNLTANHGYFLIATVWTLGFAICSPLPVFHSLVELQETFGSALLSSRYLCVESWPSDSYRIAFTISLLLVQYILPLVCLTVSHTSVCRSISCGLSNKENRLEENEMINLTLHPSKKSGPQVKLSGSHKWSYSFIKKHRRRYSKKTACVLPAPERPSQENHSRILPENFGSVRSQLSSSSKFIPGVPTCFEIKPEENSDVHELRVKRSVTRIKKRSRSVFYRLTILILVFAVSWMPLHLFHVVTDFNDNLISNRHFKLVYCICHLLGMMSCCLNPILYGFLNNGIKADLVSLIHCLHM

SEQ ID NO: 56629 - protein, 445 aa, Homo sapiens; identical to SEQ ID NO: 56628
  Payload ID: 11133
  Gene Symbol: NPY5R
  Gene Name: neuropeptide Y receptor Y5
  Uniprot ID: Q15761
  ENSP ID: ENSP00000423474

SEQ ID NO: 56630 - protein, 445 aa, Homo sapiens; identical to SEQ ID NO: 56628
  Payload ID: 11133
  Gene Symbol: NPY5R
  Gene Name: neuropeptide Y receptor Y5
  Uniprot ID: Q15761
  ENSP ID: ENSP00000423917

SEQ ID NO: 56631 - protein, 328 aa, Homo sapiens
  Payload ID: 11134
  Gene Symbol: NPBWR1
  Gene Name: neuropeptides B/W receptor 1
  Uniprot ID: P48145
  ENSP ID: ENSP00000330284
MDNASFSEPWPANASGPDPALSCSNASTLAPLPAPLAVAVPVVYAVICAVGLAGNSAVLYVLLRAPRMKTVTNLFILNLAIADELFTLVLPINIADFLLRQWPFGELMCKLIVAIDQYNTFSSLYFLTVMSADRYLVVLATAESRRVAGRTYSAARAVSLAVWGIVTLVVLPFAVFARLDDEQGRRQCVLVFPQPEAFWWRASRLYTLVLGFAIPVSTICVLYTTLLCRLHAMRLDSHAKALERAKKRVTFLVVAILAVCLLCWTPYHLSTVVALTTDLPQTPLVIAISYFITSLSYANSCLNPFLYAFLDASFRRNLRQLITCRAAA

SEQ ID NO: 56632 - protein, 333 aa, Homo sapiens
  Payload ID: 11135
  Gene Symbol: NPBWR2
  Gene Name: neuropeptides B/W receptor 2
  Uniprot ID: P48146
  ENSP ID: ENSP00000358783
MQAAGHPEPLDSRGSFSLPTMGANVSQDNGTGHNATFSEPLPFLYVLLPAVYSGICAVGLTGNTAVILVILRAPKMKTVTNVFILNLAVADGLFTLVLPVNIAEHLLQYWPFGELLCKLVLAVDHYNIFSSIYFLAVMSVDRYLVVLATVRSRHMPWRTYRGAKVASLCVWLGVTVLVLPFFSFAGVYSNELQVPSCGLSFPWPEQVWFKASRVYTLVLGFVLPVCTICVLYTDLLRRLRAVRLRSGAKALGKARRKVTVLVLVVLAVCLLCWTPFHLASVVALTTDLPQTPLVISMSYVITSLSYANSCLNPFLYAFLDDNFRKNFRSILRC

SEQ ID NO: 56633 - protein, 333 aa, Homo sapiens; identical to SEQ ID NO: 56632
  Payload ID: 11135
  Gene Symbol: NPBWR2
  Gene Name: neuropeptides B/W receptor 2
  Uniprot ID: P48146
  ENSP ID: ENSP00000484253

SEQ ID NO: 56634 - protein, 533 aa, Homo sapiens
  Payload ID: 11136
  Gene Symbol: NETO1
  Gene Name: neuropilin (NRP) and tolloid (TLL)-like 1
  Uniprot ID: Q8TDF5
  ENSP ID: ENSP00000313088
MIHGRSVLHIVASLIILHLSGATKKGTEKQTTSETQKSVQCGTWTKHAEGGIFTSPNYPSKYPPDRECIYIIEAAPRQCIELYFDEKYSIEPSWECKFDHIEVRDGPFGFSPIIGRFCGQQNPPVIKSSGRFLWIKFFADGELESMGFSARYNFTPDPDFKDLGALKPLPACEFEMGGSEGIVESIQIMKEGKATASEAVDCKWYIRAPPRSKIYLRFLDYEMQNSNECKRNFVAVYDGSSSVEDLKAKFCSTVANDVMLRTGLGVIRMWADEGSRNSRFQMLFTSFQEPPCEGNTFFCHSNMCINNTLVCNGLQNCVYPWDENHCKEKRKTSLLDQLTNTSGTVIGVTSCIVIILIIISVIVQIKQPRKKYVQRKSDFDQTVFQEVFEPPHYELCTLRGTGATADFADVADDFENYHKLRRSSSKCIHDHHCGSQLSSTKGSRSNLSTRDASILTEMPTQPGKPLIPPMNRRNILVMKHSYSQDAADACDIDEIEEVPTTSHRLSRHDKAVQRFCLIGSLSKHESEYNTTRV

SEQ ID NO: 56635 - protein, 156 aa, Homo sapiens
  Payload ID: 11136
  Gene Symbol: NETO1
  Gene Name: neuropilin (NRP) and tolloid (TLL)-like 1
  Uniprot ID: Q8TDF5
  ENSP ID: ENSP00000381024
MLAEPFPKVVASLIILHLSGATKKGTEKQTTSETQKSVQCGTWTKHAEGGIFTSPNYPSKYPPDRECIYIIEAAPRQCIELYFDEKYSIEPSWECKFDHIEVRDGPFGFSPIIGRFCGQQNPPVIKSSGRFLWIKFFADGELESMGFSARYNFTPE

SEQ ID NO: 56636 - protein, 3 aa, Homo sapiens
  Payload ID: 11136
  Gene Symbol: NETO1
  Gene Name: neuropilin (NRP) and tolloid (TLL)-like 1
  ENSP ID: ENSP00000462993
  MOD_RES (1)..(1): Any amino acid
XRV

SEQ ID NO: 56637 - protein, 101 aa, Homo sapiens
  Payload ID: 11136
  Gene Symbol: NETO1
  Gene Name: neuropilin (NRP) and tolloid (TLL)-like 1
  ENSP ID: ENSP00000464188
MSLYGFVASLIILHLSGATKKGTEKQTTSETQKSVQCGTWTKHAEGGIFTSPNYPSKYPPDRECIYIIEAAPRQCIELYFDEKYSIEPSWECKFDHIEVRD

SEQ ID NO: 56638 - protein, 533 aa, Homo sapiens; identical to SEQ ID NO: 56634
  Payload ID: 11136
  Gene Symbol: NETO1
  Gene Name: neuropilin (NRP) and tolloid (TLL)-like 1
  Uniprot ID: Q8TDF5
  ENSP ID: ENSP00000464312

SEQ ID NO: 56639 - protein, 518 aa, Homo sapiens
  Payload ID: 11137
  Gene Symbol: NETO2
  Gene Name: neuropilin (NRP) and tolloid (TLL)-like 2
  Uniprot ID: Q8NC67
  ENSP ID: ENSP00000306726
MALERLCSVLKVLLITVLVVEGIAVAQKTQDGQNIGIKHIPATQCGIWVRTSNGGHFASPNYPDSYPPNKECIYILEAAPRQRIELTFDEHYYIEPSFECRFDHLEVRDGPFGFSPLIDRYCGVKSPPLIRSTGRFMWIKFSSDEELEGLGFRAKYSFIPDPDFTYLGDCQFELSGADGIVRSSQVEQEEKTKPGQAVDCIWTIKATPKAKIYLRFLDYQMEHSNECKRNFVAVYDGSSSIENLKAKFCSTVANDVMLKTGIGVIRMWADEGSRLSRFRMLFTSFVEPPCTSSTFFCHSNMCINNSLVCNGVQNCAYPWDENHCKEKKKAGVFEQITKTHGTIIGITSGIVLVLLIISILVQVKQPRKKVMACKTAFNKTGFQEVFDPPHYELFSLRDKEISADLADLSEELDNYQKMRRSSTASRCIHDHHCGSQASSVKQSRTNLSSMELPFRNDFAQPQPMKTFNSTFKKSSYTFKQGHECPEQALEDRVMEEIPCEIYVRGREDSAQASISIDF

SEQ ID NO: 56640 - protein, 365 aa, Homo sapiens
  Payload ID: 11137
  Gene Symbol: NETO2
  Gene Name: neuropilin (NRP) and tolloid (TLL)-like 2
  ENSP ID: ENSP00000454213
  MOD_RES (1)..(1): Any amino acid
XLIDRYCGVKSPPLIRSTGRFMWIKFSSDEELEGLGFRAKYSFIPDPDFTYLGDCQFELSGADGIVRSSQVEQEEKTKPGQAVDCIWTIKATPKAKIYLRFLDYQMEHSNECKRNFVAVYDGSSSIENLKAKFCSTVANDVMLKTGIGVIRMWADEGSRLSRFRMLFTSFVEQKKKAGVFEQITKTHGTIIGITSGIVLVLLIISILVQVKQPRKKVMACKTAFNKTGFQEVFDPPHYELFSLRDKEISADLADLSEELDNYQKMRRSSTASRCIHDHHCGSQASSVKQSRTNLSSMELPFRNDFAQPQPMKTFNSTFKKSSYTFKQGHECPEQALEDRVMEEIPCEIYVRGREDSAQASISIDF

SEQ ID NO: 56641 - protein, 525 aa, Homo sapiens
  Payload ID: 11137
  Gene Symbol: NETO2
  Gene Name: neuropilin (NRP) and tolloid (TLL)-like 2
  Uniprot ID: Q8NC67
  ENSP ID: ENSP00000455169
MALERLCSVLKVLLITVLVVEGIAVAQKTQDGQNIGIKHIPATQCGIWVRTSNGGHFASPNYPDSYPPNKECIYILEAAPRQRIELTFDEHYYIEPSFECRFDHLEVRDGPFGFSPLIDRYCGVKSPPLIRSTGRFMWIKFSSDEELEGLGFRAKYSFIPDPDFTYLGGILNPIPDCQFELSGADGIVRSSQVEQEEKTKPGQAVDCIWTIKATPKAKIYLRFLDYQMEHSNECKRNFVAVYDGSSSIENLKAKFCSTVANDVMLKTGIGVIRMWADEGSRLSRFRMLFTSFVEPPCTSSTFFCHSNMCINNSLVCNGVQNCAYPWDENHCKEKKKAGVFEQITKTHGTIIGITSGIVLVLLIISILVQVKQPRKKVMACKTAFNKTGFQEVFDPPHYELFSLRDKEISADLADLSEELDNYQKMRRSSTASRCIHDHHCGSQASSVKQSRTNLSSMELPFRNDFAQPQPMKTFNSTFKKSSYTFKQGHECPEQALEDRVMEEIPCEIYVRGREDSAQASISIDF

SEQ ID NO: 56642 - protein, 194 aa, Homo sapiens
  Payload ID: 11137
  Gene Symbol: NETO2
  Gene Name: neuropilin (NRP) and tolloid (TLL)-like 2
  ENSP ID: ENSP00000456818
  MOD_RES (1)..(1): Any amino acid
XTYLGGILNPIPDCQFELSGADGIVRSSQVEQEEKTKPGQAVDCIWTIKATPKAKIYLRFLDYQMEHSNECKRNFVAVYDGSSSIENLKAKFCSTVANDVMLKTGIGVIRMWADEGSRLSRFRMLFTSFVEQKKKAGVFEQITKTHGTIIGITSGIVLVLLIISILVQVKQPRKKVMACKTAFNKTGFQEVFDP

SEQ ID NO: 56643 - protein, 228 aa, Homo sapiens
  Payload ID: 11137
  Gene Symbol: NETO2
  Gene Name: neuropilin (NRP) and tolloid (TLL)-like 2
  ENSP ID: ENSP00000457133
  MOD_RES (1)..(1): Any amino acid
XSSSIENLKAKFCSTVANDVMLKTGIGVIRMWADEEKKKAGVFEQITKTHGTIIGITSGIVLVLLIISILVQVKQPRKKVMACKTAFNKTGFQEVFDPPHYELFSLRDKEISADLADLSEELDNYQKMRRSSTASRCIHDHHCGSQASSVKQSRTNLSSMELPFRNDFAQPQPMKTFNSTFKKSSYTFKQGHECPEQALEDRVMEEIPCEIYVRGREDSAQASISIDF

SEQ ID NO: 56644 - protein, 923 aa, Homo sapiens
  Payload ID: 11138
  Gene Symbol: NRP1
  Gene Name: neuropilin 1
  Uniprot ID: O14786
  ENSP ID: ENSP00000265371
MERGLPLLCAVLALVLAPAGAFRNDKCGDTIKIESPGYLTSPGYPHSYHPSEKCEWLIQAPDPYQRIMINFNPHFDLEDRDCKYDYVEVFDGENENGHFRGKFCGKIAPPPVVSSGPFLFIKFVSDYETHGAGFSIRYEIFKRGPECSQNYTTPSGVIKSPGFPEKYPNSLECTYIVFVPKMSEIILEFESFDLEPDSNPPGGMFCRYDRLEIWDGFPDVGPHIGRYCGQKTPGRIRSSSGILSMVFYTDSAIAKEGFSANYSVLQSSVSEDFKCMEALGMESGEIHSDQITASSQYSTNWSAERSRLNYPENGWTPGEDSYREWIQVDLGLLRFVTAVGTQGAISKETKKKYYVKTYKIDVSSNGEDWITIKEGNKPVLFQGNTNPTDVVVAVFPKPLITRFVRIKPATWETGISMRFEVYGCKITDYPCSGMLGMVSGLISDSQITSSNQGDRNWMPENIRLVTSRSGWALPPAPHSYINEWLQIDLGEEKIVRGIIIQGGKHRENKVFMRKFKIGYSNNGSDWKMIMDDSKRKAKSFEGNNNYDTPELRTFPALSTRFIRIYPERATHGGLGLRMELLGCEVEAPTAGPTTPNGNLVDECDDDQANCHSGTGDDFQLTGGTTVLATEKPTVIDSTIQSEFPTYGFNCEFGWGSHKTFCHWEHDNHVQLKWSVLTSKTGPIQDHTGDGNFIYSQADENQKGKVARLVSPVVYSQNSAHCMTFWYHMSGSHVGTLRVKLRYQKPEEYDQLVWMAIGHQGDHWKEGRVLLHKSLKLYQVIFEGEIGKGNLGGIAVDDISINNHISQEDCAKPADLDKKNPEIKIDETGSTPGYEGEGEGDKNISRKPGNVLKTLDPILITIIAMSALGVLLGAVCGVVLYCACWHNGMSERNLSALENYNFELVDGVKLKKDKLNTQSTYSEA

SEQ ID NO: 56645 - protein, 641 aa, Homo sapiens
  Payload ID: 11138
  Gene Symbol: NRP1
  Gene Name: neuropilin 1
  ENSP ID: ENSP00000363949
MERGLPLLCAVLALVLAPAGAFRNDKCGDTIKIESPGYLTSPGYPHSYHPSEKCEWLIQAPDPYQRIMINFNPHFDLEDRDCKYDYVEVFDGENENGHFRGKFCGKIAPPPVVSSGPFLFIKFVSDYETHGAGFSIRYEIFKRGPECSQNYTTPSGVIKSPGFPEKYPNSLECTYIVFVPKMSEIILEFESFDLEPDSNPPGGMFCRYDRLEIWDGFPDVGPHIGRYCGQKTPGRIRSSSGILSMVFYTDSAIAKEGFSANYSVLQSSVSEDFKCMEALGMESGEIHSDQITASSQYSTNWSAERSRLNYPENGWTPGEDSYREWIQVDLGLLRFVTAVGTQGAISKETKKKYYVKTYKIDVSSNGEDWITIKEGNKPVLFQGNTNPTDVVVAVFPKPLITRFVRIKPATWETGISMRFEVYGCKITDYPCSGMLGMVSGLISDSQITSSNQGDRNWMPENIRLVTSRSGWALPPAPHSYINEWLQIDLGEEKIVRGIIIQGGKHRENKVFMRKFKIGYSNNGSDWKMIMDDSKRKAKSFEGNNNYDTPELRTFPALSTRFIRIYPERATHGGLGLRMELLGCEVEGTINTDQECPCARALAKDAKKKKRWADSTHCRCVRSIHGEMWSSGKGVCSLDANL

SEQ ID NO: 56646 - protein, 609 aa, Homo sapiens
  Payload ID: 11138
  Gene Symbol: NRP1
  Gene Name: neuropilin 1
  Uniprot ID: O14786
  ENSP ID: ENSP00000363954
MERGLPLLCAVLALVLAPAGAFRNDKCGDTIKIESPGYLTSPGYPHSYHPSEKCEWLIQAPDPYQRIMINFNPHFDLEDRDCKYDYVEVFDGENENGHFRGKFCGKIAPPPVVSSGPFLFIKFVSDYETHGAGFSIRYEIFKRGPECSQNYTTPSGVIKSPGFPEKYPNSLECTYIVFVPKMSEIILEFESFDLEPDSNPPGGMFCRYDRLEIWDGFPDVGPHIGRYCGQKTPGRIRSSSGILSMVFYTDSAIAKEGFSANYSVLQSSVSEDFKCMEALGMESGEIHSDQITASSQYSTNWSAERSRLNYPENGWTPGEDSYREWIQVDLGLLRFVTAVGTQGAISKETKKKYYVKTYKIDVSSNGEDWITIKEGNKPVLFQGNTNPTDVVVAVFPKPLITRFVRIKPATWETGISMRFEVYGCKITDYPCSGMLGMVSGLISDSQITSSNQGDRNWMPENIRLVTSRSGWALPPAPHSYINEWLQIDLGEEKIVRGIIIQGGKHRENKVFMRKFKIGYSNNGSDWKMIMDDSKRKAKSFEGNNNYDTPELRTFPALSTRFIRIYPERATHGGLGLRMELLGCEVEGGTTVLATEKPTVIDSTIQSGIK

SEQ ID NO: 56647 - protein, 644 aa, Homo sapiens
  Payload ID: 11138
  Gene Symbol: NRP1
  Gene Name: neuropilin 1
  Uniprot ID: O14786
  ENSP ID: ENSP00000363955
MERGLPLLCAVLALVLAPAGAFRNDKCGDTIKIESPGYLTSPGYPHSYHPSEKCEWLIQAPDPYQRIMINFNPHFDLEDRDCKYDYVEVFDGENENGHFRGKFCGKIAPPPVVSSGPFLFIKFVSDYETHGAGFSIRYEIFKRGPECSQNYTTPSGVIKSPGFPEKYPNSLECTYIVFVPKMSEIILEFESFDLEPDSNPPGGMFCRYDRLEIWDGFPDVGPHIGRYCGQKTPGRIRSSSGILSMVFYTDSAIAKEGFSANYSVLQSSVSEDFKCMEALGMESGEIHSDQITASSQYSTNWSAERSRLNYPENGWTPGEDSYREWIQVDLGLLRFVTAVGTQGAISKETKKKYYVKTYKIDVSSNGEDWITIKEGNKPVLFQGNTNPTDVVVAVFPKPLITRFVRIKPATWETGISMRFEVYGCKITDYPCSGMLGMVSGLISDSQITSSNQGDRNWMPENIRLVTSRSGWALPPAPHSYINEWLQIDLGEEKIVRGIIIQGGKHRENKVFMRKFKIGYSNNGSDWKMIMDDSKRKAKSFEGNNNYDTPELRTFPALSTRFIRIYPERATHGGLGLRMELLGCEVEAPTAGPTTPNGNLVDECDDDQANCHSGTGDDFQLTGGTTVLATEKPTVIDSTIQSGIK

SEQ ID NO: 56648 - protein, 704 aa, Homo sapiens
  Payload ID: 11138
  Gene Symbol: NRP1
  Gene Name: neuropilin 1
  ENSP ID: ENSP00000363956
MERGLPLLCAVLALVLAPAGAFRNDKCGDTIKIESPGYLTSPGYPHSYHPSEKCEWLIQAPDPYQRIMINFNPHFDLEDRDCKYDYVEVFDGENENGHFRGKFCGKIAPPPVVSSGPFLFIKFVSDYETHGAGFSIRYEIFKRGPECSQNYTTPSGVIKSPGFPEKYPNSLECTYIVFVPKMSEIILEFESFDLEPDSNPPGGMFCRYDRLEIWDGFPDVGPHIGRYCGQKTPGRIRSSSGILSMVFYTDSAIAKEGFSANYSVLQSSVSEDFKCMEALGMESGEIHSDQITASSQYSTNWSAERSRLNYPENGWTPGEDSYREWIQVDLGLLRFVTAVGTQGAISKETKKKYYVKTYKIDVSSNGEDWITIKEGNKPVLFQGNTNPTDVVVAVFPKPLITRFVRIKPATWETGISMRFEVYGCKITDYPCSGMLGMVSGLISDSQITSSNQGDRNWMPENIRLVTSRSGWALPPAPHSYINEWLQIDLGEEKIVRGIIIQGGKHRENKVFMRKFKIGYSNNGSDWKMIMDDSKRKAKSFEGNNNYDTPELRTFPALSTRFIRIYPERATHGGLGLRMELLGCEVEAPTAGPTTPNGNLVDECDDDQANCHSGTGDDFQLTGAETIFIPLLYHFSSCLSWDQLTPVCVLVTPHGRELPRNRSCLARTRASSFPHVIWIDELFLIATTICNNNLSHFESQRLGLS

SEQ ID NO: 56649 - protein, 923 aa, Homo sapiens; identical to SEQ ID NO: 56644
  Payload ID: 11138
  Gene Symbol: NRP1
  Gene Name: neuropilin 1
  Uniprot ID: O14786
  ENSP ID: ENSP00000364001

SEQ ID NO: 56650 - protein, 735 aa, Homo sapiens
  Payload ID: 11138
  Gene Symbol: NRP1
  Gene Name: neuropilin 1
  ENSP ID: ENSP00000364009
MSEIILEFESFDLEPDSNPPGGMFCRYDRLEIWDGFPDVGPHIGRYCGQKTPGRIRSSSGILSMVFYTDSAIAKEGFSANYSVLQSSVSEDFKCMEALGMESGEIHSDQITASSQYSTNWSAERSRLNYPENGWTPGEDSYREWIQVDLGLLRFVTAVGTQGAISKETKKKYYVKTYKIDVSSNGEDWITIKEGNKPVLFQGNTNPTDVVVAVFPKPLITRFVRIKPATWETGISMRFEVYGCKITDYPCSGMLGMVSGLISDSQITSSNQGDRNWMPENIRLVTSRSGWALPPAPHSYINEWLQIDLGEEKIVRGIIIQGGKHRENKVFMRKFKIGYSNNGSDWKMIMDDSKRKAKSFEGNNNYDTPELRTFPALSTRFIRIYPERATHGGLGLRMELLGCEVEAPTAGPTTPNGNLVDECDDDQANCHSGTGGTTVLATEKPTVIDSTIQSEFPTYGFNCEFGWGSHKTFCHWEHDNHVQLKWSVLTSKTGPIQDHTGDGNFIYSQADENQKGKVARLVSPVVYSQNSAHCMTFWYHMSGSHVGTLRVKLRYQKPEEYDQLVWMAIGHQGDHWKEGRVLLHKSLKLYQVIFEGEIGKGNLGGIAVDDISINNHISQEDCAKPADLDKKNPEIKIDETGSTPGYEGEGEGDKNISRKPGNVLKTLDPILITIIAMSALGVLLGAVCGVVLYCACWHNGMSERNLSALENYNFELVDGVKLKKDKLNTQSTYSEA

SEQ ID NO: 56651 - protein, 906 aa, Homo sapiens
  Payload ID: 11138
  Gene Symbol: NRP1
  Gene Name: neuropilin 1
  ENSP ID: ENSP00000379317
MERGLPLLCAVLALVLAPAGAFRNDKCGDTIKIESPGYLTSPGYPHSYHPSEKCEWLIQAPDPYQRIMINFNPHFDLEDRDCKYDYVEVFDGENENGHFRGKFCGKIAPPPVVSSGPFLFIKFVSDYETHGAGFSIRYEIFKRGPECSQNYTTPSGVIKSPGFPEKYPNSLECTYIVFVPKMSEIILEFESFDLEPDSNPPGGMFCRYDRLEIWDGFPDVGPHIGRYCGQKTPGRIRSSSGILSMVFYTDSAIAKEGFSANYSVLQSSVSEDFKCMEALGMESGEIHSDQITASSQYSTNWSAERSRLNYPENGWTPGEDSYREWIQVDLGLLRFVTAVGTQGAISKETKKKYYVKTYKIDVSSNGEDWITIKEGNKPVLFQGNTNPTDVVVAVFPKPLITRFVRIKPATWETGISMRFEVYGCKITDYPCSGMLGMVSGLISDSQITSSNQGDRNWMPENIRLVTSRSGWALPPAPHSYINEWLQIDLGEEKIVRGIIIQGGKHRENKVFMRKFKIGYSNNGSDWKMIMDDSKRKAKSFEGNNNYDTPELRTFPALSTRFIRIYPERATHGGLGLRMELLGCEVEAPTAGPTTPNGNLVDECDDDQANCHSGTGDDFQLTGGTTVLATEKPTVIDSTIQSEFPTYGFNCEFGWGSHKTFCHWEHDNHVQLKWSVLTSKTGPIQDHTGDGNFIYSQADENQKGKVARLVSPVVYSQNSAHCMTFWYHMSGSHVGTLRVKLRYQKPEEYDQLVWMAIGHQGDHWKEGRVLLHKSLKLYQVIFEGEIGKGNLGGIAVDDISINNHISQEDCARSTPGYEGEGEGDKNISRKPGNVLKTLDPILITIIAMSALGVLLGAVCGVVLYCACWHNGMSERNLSALENYNFELVDGVKLKKDKLNTQSTYSEA

SEQ ID NO: 56652 - protein, 105 aa, Homo sapiens
  Payload ID: 11138
  Gene Symbol: NRP1
  Gene Name: neuropilin 1
  ENSP ID: ENSP00000390447
NHISQEDCARSTPGYEGEGEGDKNISRKPGNVLKTLDPILITIIAMSALGVLLGAVCGVVLYCACWHNGMSERNLSALENYNFELVDGVKLKKDKLNTQSTYSEA

SEQ ID NO: 56653 - protein, 170 aa, Homo sapiens
  Payload ID: 11138
  Gene Symbol: NRP1
  Gene Name: neuropilin 1
  ENSP ID: ENSP00000390567
  MOD_RES (1)..(1): Any amino acid
XPGGMFCRYDRLEIWDGFPDVGPHIGRYCGQKTPGRIRSSSGILSMVFYTDSAIAKEGFSANYSVLQSSVSEDFKCMEALGMESGEIHSDQITASSQYSTNWSAERSRLNYPENGWTPGEDSYREWIQDAKYRLRVSVVRSKSSSSSTSLEPRPLSSLKLSFFSYKIKIT

SEQ ID NO: 56654 - protein, 100 aa, Homo sapiens
  Payload ID: 11138
  Gene Symbol: NRP1
  Gene Name: neuropilin 1
  ENSP ID: ENSP00000393071
  MOD_RES (1)..(1): Any amino acid
XTHGGLGLRMELLGCEVEAPTAGPTTPNGNLVDECDDDQANCHSGTGDDFQLTGGTTVLATEKPTVIDSTIQSGSRFFKHHHKQQSMRPQNLHHNSILLL

SEQ ID NO: 56655 - protein, 597 aa, Homo sapiens
  Payload ID: 11138
  Gene Symbol: NRP1
  Gene Name: neuropilin 1
  ENSP ID: ENSP00000408911
MERGLPLLCAVLALVLAPAGAFRNDKCGDTIKIESPGYLTSPGYPHSYHPSEKCEWLIQAPDPYQRIMINFNPHFDLEDRDCKYDYVEVFDGENENGHFRGKFCGKIAPPPVVSSGPFLFIKFVSDYETHGAGFSIRYEIFKRGPECSQNYTTPSGVIKSPGFPEKYPNSLECTYIVFVPKMSEIILEFESFDLEPDSNPPGGMFCRYDRLEIWDGFPDVGPHIGRYCGQKTPGRIRSSSGILSMVFYTDSAIAKEGFSANYSVLQSSVSEDFKCMEALGMESGEIHSDQITASSQYSTNWSAERSRLNYPENGWTPGEDSYREWIQVDLGLLRFVTAVGTQGAISKETKKKYYVKTYKIDVSSNGEDWITIKEGNKPVLFQGNTNPTDVVVAVFPKPLITRFVRIKPATWETGISMRFEVYGCKITDYPCSGMLGMVSGLISDSQITSSNQGDRNWMPENIRLVTSRSGWALPPAPHSYINEWLQIDLGEEKIVRGIIIQGGKHRENKVFMRKFKIGYSNNGSDWKMIMDDSKRKAKVRAGDWEEVIPYVLDFNQGPLAFSRGRASYFLPAMTLEEVCDGVSKTLDSRKTGIWHEK

SEQ ID NO: 56656 - protein, 77 aa, Homo sapiens
  Payload ID: 11138
  Gene Symbol: NRP1
  Gene Name: neuropilin 1
  ENSP ID: ENSP00000416147
  MOD_RES (1)..(1): Any amino acid
XPTAGPTTPNGNLVDECDDDQANCHSGTGDDFQLTGGTTVLATEKPTVIDSTIQSARLEVSTLNLSLHNPPQQKALI

SEQ ID NO: 56657 - protein, 60 aa, Homo sapiens
  Payload ID: 11138
  Gene Symbol: NRP1
  Gene Name: neuropilin 1
  ENSP ID: ENSP00000476896
  MOD_RES (1)..(1): Any amino acid
XINEWLQIDLGEEKIVRGIIIQGGKHRENKVFMRKFKIGYSNNGSDWKMIMDDSKRKALI

SEQ ID NO: 56658 - protein, 906 aa, Homo sapiens
  Payload ID: 11139
  Gene Symbol: NRP2
  Gene Name: neuropilin 2
  Uniprot ID: O60462
  ENSP ID: ENSP00000272849
MDMFPLTWVFLALYFSRHQVRGQPDPPCGGRLNSKDAGYITSPGYPQDYPSHQNCEWIVYAPEPNQKIVLNFNPHFEIEKHDCKYDFIEIRDGDSESADLLGKHCGNIAPPTIISSGSMLYIKFTSDYARQGAGFSLRYEIFKTGSEDCSKNFTSPNGTIESPGFPEKYPHNLDCTFTILAKPKMEIILQFLIFDLEHDPLQVGEGDCKYDWLDIWDGIPHVGPLIGKYCGTKTPSELRSSTGILSLTFHTDMAVAKDGFSARYYLVHQEPLENFQCNVPLGMESGRIANEQISASSTYSDGRWTPQQSRLHGDDNGWTPNLDSNKEYLQVDLRFLTMLTAIATQGAISRETQNGYYVKSYKLEVSTNGEDWMVYRHGKNHKVFQANNDATEVVLNKLHAPLLTRFVRIRPQTWHSGIALRLELFGCRVTDAPCSNMLGMLSGLIADSQISASSTQEYLWSPSAARLVSSRSGWFPRIPQAQPGEEWLQVDLGTPKTVKGVIIQGARGGDSITAVEARAFVRKFKVSYSLNGKDWEYIQDPRTQQPKLFEGNMHYDTPDIRRFDPIPAQYVRVYPERWSPAGIGMRLEVLGCDWTDSKPTVETLGPTVKSEETTTPYPTEEEATECGENCSFEDDKDLQLPSGFNCNFDFLEEPCGWMYDHAKWLRTTWASSSSPNDRTFPDDRNFLRLQSDSQREGQYARLISPPVHLPRSPVCMEFQYQATGGRGVALQVVREASQESKLLWVIREDQGGEWKHGRIILPSYDMEYQIVFEGVIGKGRSGEIAIDDIRISTDVPLENCMEPISAFAGENFKGGTLLPGTEPTVDTVPMQPIPAYWYYVMAAGGAVLVLVSVALALVLHYHRFRYAAKKTDHSITYKTSHYTNGAPLAVEPTLTIKLEQDRGSHC

SEQ ID NO: 56659 - protein, 901 aa, Homo sapiens
  Payload ID: 11139
  Gene Symbol: NRP2
  Gene Name: neuropilin 2
  ENSP ID: ENSP00000349632
MDMFPLTWVFLALYFSRHQVRGQPDPPCGGRLNSKDAGYITSPGYPQDYPSHQNCEWIVYAPEPNQKIVLNFNPHFEIEKHDCKYDFIEIRDGDSESADLLGKHCGNIAPPTIISSGSMLYIKFTSDYARQGAGFSLRYEIFKTGSEDCSKNFTSPNGTIESPGFPEKYPHNLDCTFTILAKPKMEIILQFLIFDLEHDPLQVGEGDCKYDWLDIWDGIPHVGPLIGKYCGTKTPSELRSSTGILSLTFHTDMAVAKDGFSARYYLVHQEPLENFQCNVPLGMESGRIANEQISASSTYSDGRWTPQQSRLHGDDNGWTPNLDSNKEYLQVDLRFLTMLTAIATQGAISRETQNGYYVKSYKLEVSTNGEDWMVYRHGKNHKVFQANNDATEVVLNKLHAPLLTRFVRIRPQTWHSGIALRLELFGCRVTDAPCSNMLGMLSGLIADSQISASSTQEYLWSPSAARLVSSRSGWFPRIPQAQPGEEWLQVDLGTPKTVKGVIIQGARGGDSITAVEARAFVRKFKVSYSLNGKDWEYIQDPRTQQPKLFEGNMHYDTPDIRRFDPIPAQYVRVYPERWSPAGIGMRLEVLGCDWTDSKPTVETLGPTVKSEETTTPYPTEEEATECGENCSFEDDKDLQLPSGFNCNFDFLEEPCGWMYDHAKWLRTTWASSSSPNDRTFPDDRNFLRLQSDSQREGQYARLISPPVHLPRSPVCMEFQYQATGGRGVALQVVREASQESKLLWVIREDQGGEWKHGRIILPSYDMEYQIVFEGVIGKGRSGEIAIDDIRISTDVPLENCMEPISAFAGGTLLPGTEPTVDTVPMQPIPAYWYYVMAAGGAVLVLVSVALALVLHYHRFRYAAKKTDHSITYKTSHYTNGAPLAVEPTLTIKLEQDRGSHC

SEQ ID NO: 56660 - protein, 926 aa, Homo sapiens
  Payload ID: 11139
  Gene Symbol: NRP2
  Gene Name: neuropilin 2
  ENSP ID: ENSP00000350432
MDMFPLTWVFLALYFSRHQVRGQPDPPCGGRLNSKDAGYITSPGYPQDYPSHQNCEWIVYAPEPNQKIVLNFNPHFEIEKHDCKYDFIEIRDGDSESADLLGKHCGNIAPPTIISSGSMLYIKFTSDYARQGAGFSLRYEIFKTGSEDCSKNFTSPNGTIESPGFPEKYPHNLDCTFTILAKPKMEIILQFLIFDLEHDPLQVGEGDCKYDWLDIWDGIPHVGPLIGKYCGTKTPSELRSSTGILSLTFHTDMAVAKDGFSARYYLVHQEPLENFQCNVPLGMESGRIANEQISASSTYSDGRWTPQQSRLHGDDNGWTPNLDSNKEYLQVDLRFLTMLTAIATQGAISRETQNGYYVKSYKLEVSTNGEDWMVYRHGKNHKVFQANNDATEVVLNKLHAPLLTRFVRIRPQTWHSGIALRLELFGCRVTDAPCSNMLGMLSGLIADSQISASSTQEYLWSPSAARLVSSRSGWFPRIPQAQPGEEWLQVDLGTPKTVKGVIIQGARGGDSITAVEARAFVRKFKVSYSLNGKDWEYIQDPRTQQPKLFEGNMHYDTPDIRRFDPIPAQYVRVYPERWSPAGIGMRLEVLGCDWTDSKPTVETLGPTVKSEETTTPYPTEEEATECGENCSFEDDKDLQLPSGFNCNFDFLEEPCGWMYDHAKWLRTTWASSSSPNDRTFPDDRNFLRLQSDSQREGQYARLISPPVHLPRSPVCMEFQYQATGGRGVALQVVREASQESKLLWVIREDQGGEWKHGRIILPSYDMEYQIVFEGVIGKGRSGEIAIDDIRISTDVPLENCMEPISAFAVDIPEIHEREGYEDEIDDEYEVDWSNSSSATSGSGAPSTDKEKSWLYTLDPILITIIAMSSLGVLLGATCAGLLLYCTCSYSGLSSRSCTTLENYNFELYDGLKHKVKMNHQKCCSEA

SEQ ID NO: 56661 - protein, 931 aa, Homo sapiens
  Payload ID: 11139
  Gene Symbol: NRP2
  Gene Name: neuropilin 2
  ENSP ID: ENSP00000353582
MDMFPLTWVFLALYFSRHQVRGQPDPPCGGRLNSKDAGYITSPGYPQDYPSHQNCEWIVYAPEPNQKIVLNFNPHFEIEKHDCKYDFIEIRDGDSESADLLGKHCGNIAPPTIISSGSMLYIKFTSDYARQGAGFSLRYEIFKTGSEDCSKNFTSPNGTIESPGFPEKYPHNLDCTFTILAKPKMEIILQFLIFDLEHDPLQVGEGDCKYDWLDIWDGIPHVGPLIGKYCGTKTPSELRSSTGILSLTFHTDMAVAKDGFSARYYLVHQEPLENFQCNVPLGMESGRIANEQISASSTYSDGRWTPQQSRLHGDDNGWTPNLDSNKEYLQVDLRFLTMLTAIATQGAISRETQNGYYVKSYKLEVSTNGEDWMVYRHGKNHKVFQANNDATEVVLNKLHAPLLTRFVRIRPQTWHSGIALRLELFGCRVTDAPCSNMLGMLSGLIADSQISASSTQEYLWSPSAARLVSSRSGWFPRIPQAQPGEEWLQVDLGTPKTVKGVIIQGARGGDSITAVEARAFVRKFKVSYSLNGKDWEYIQDPRTQQPKLFEGNMHYDTPDIRRFDPIPAQYVRVYPERWSPAGIGMRLEVLGCDWTDSKPTVETLGPTVKSEETTTPYPTEEEATECGENCSFEDDKDLQLPSGFNCNFDFLEEPCGWMYDHAKWLRTTWASSSSPNDRTFPDDRNFLRLQSDSQREGQYARLISPPVHLPRSPVCMEFQYQATGGRGVALQVVREASQESKLLWVIREDQGGEWKHGRIILPSYDMEYQIVFEGVIGKGRSGEIAIDDIRISTDVPLENCMEPISAFAGENFKVDIPEIHEREGYEDEIDDEYEVDWSNSSSATSGSGAPSTDKEKSWLYTLDPILITIIAMSSLGVLLGATCAGLLLYCTCSYSGLSSRSCTTLENYNFELYDGLKHKVKMNHQKCCSEA

SEQ ID NO: 56662 - protein, 555 aa, Homo sapiens
  Payload ID: 11139
  Gene Symbol: NRP2
  Gene Name: neuropilin 2
  Uniprot ID: O60462
  ENSP ID: ENSP00000387519
MDMFPLTWVFLALYFSRHQVRGQPDPPCGGRLNSKDAGYITSPGYPQDYPSHQNCEWIVYAPEPNQKIVLNFNPHFEIEKHDCKYDFIEIRDGDSESADLLGKHCGNIAPPTIISSGSMLYIKFTSDYARQGAGFSLRYEIFKTGSEDCSKNFTSPNGTIESPGFPEKYPHNLDCTFTILAKPKMEIILQFLIFDLEHDPLQVGEGDCKYDWLDIWDGIPHVGPLIGKYCGTKTPSELRSSTGILSLTFHTDMAVAKDGFSARYYLVHQEPLENFQCNVPLGMESGRIANEQISASSTYSDGRWTPQQSRLHGDDNGWTPNLDSNKEYLQVDLRFLTMLTAIATQGAISRETQNGYYVKSYKLEVSTNGEDWMVYRHGKNHKVFQANNDATEVVLNKLHAPLLTRFVRIRPQTWHSGIALRLELFGCRVTDAPCSNMLGMLSGLIADSQISASSTQEYLWSPSAARLVSSRSGWFPRIPQAQPGEEWLQVDLGTPKTVKGVIIQGARGGDSITAVEARAFVRKFKVSYSLNGKDWEYIQDPRTQQPKVGCSWRPL

SEQ ID NO: 56663 - protein, 101 aa, Homo sapiens
  Payload ID: 11139
  Gene Symbol: NRP2
  Gene Name: neuropilin 2
  ENSP ID: ENSP00000404279
MDMFPLTWVFLALYFSRHQVRGQPDPPCGGRLNSKDAGYITSPGYPQDYPSHQNCEWIVYAPEPNQKIVLNFNPHFEIEKHDCKYDFIEIRDGDSESADLL

SEQ ID NO: 56664 - protein, 909 aa, Homo sapiens
  Payload ID: 11139
  Gene Symbol: NRP2
  Gene Name: neuropilin 2
  ENSP ID: ENSP00000407626
MDMFPLTWVFLALYFSRHQVRGQPDPPCGGRLNSKDAGYITSPGYPQDYPSHQNCEWIVYAPEPNQKIVLNFNPHFEIEKHDCKYDFIEIRDGDSESADLLGKHCGNIAPPTIISSGSMLYIKFTSDYARQGAGFSLRYEIFKTGSEDCSKNFTSPNGTIESPGFPEKYPHNLDCTFTILAKPKMEIILQFLIFDLEHDPLQVGEGDCKYDWLDIWDGIPHVGPLIGKYCGTKTPSELRSSTGILSLTFHTDMAVAKDGFSARYYLVHQEPLENFQCNVPLGMESGRIANEQISASSTYSDGRWTPQQSRLHGDDNGWTPNLDSNKEYLQVDLRFLTMLTAIATQGAISRETQNGYYVKSYKLEVSTNGEDWMVYRHGKNHKVFQANNDATEVVLNKLHAPLLTRFVRIRPQTWHSGIALRLELFGCRVTDAPCSNMLGMLSGLIADSQISASSTQEYLWSPSAARLVSSRSGWFPRIPQAQPGEEWLQVDLGTPKTVKGVIIQGARGGDSITAVEARAFVRKFKVSYSLNGKDWEYIQDPRTQQPKLFEGNMHYDTPDIRRFDPIPAQYVRVYPERWSPAGIGMRLEVLGCDWTDSKPTVETLGPTVKSEETTTPYPTEEEATECGENCSFEDDKDLQLPSGFNCNFDFLEEPCGWMYDHAKWLRTTWASSSSPNDRTFPDDRNFLRLQSDSQREGQYARLISPPVHLPRSPVCMEFQYQATGGRGVALQVVREASQESKLLWVIREDQGGEWKHGRIILPSYDMEYQIVFEGVIGKGRSGEIAIDDIRISTDVPLENCMEPISAFADEYEVDWSNSSSATSGSGAPSTDKEKSWLYTLDPILITIIAMSSLGVLLGATCAGLLLYCTCSYSGLSSRSCTTLENYNFELYDGLKHKVKMNHQKCCSEA

SEQ ID NO: 56665 - protein, 398 aa, Homo sapiens
  Payload ID: 11140
  Gene Symbol: NPTN
  Gene Name: neuroplastin
  Uniprot ID: Q9Y639
  ENSP ID: ENSP00000290401
MSGSSLPSALALSLLLVSGSLLPGPGAAQNAGFVKSPMSETKLTGDAFELYCDVVGSPTPEIQWWYAEVNRAESFRQLWDGARKRRVTVNTAYGSNGVSVLRITRLTLEDSGTYECRASNDPKRNDLRQNPSITWIRAQATISVLQKPRIVTSEEVIIRDSPVLPVTLQCNLTSSSHTLTYSYWTKNGVELSATRKNASNMEYRINKPRAEDSGEYHCVYHFVSAPKANATIEVKAAPDITGHKRSENKNEGQDATMYCKSVGYPHPDWIWRKKENGMPMDIVNTSGRFFIINKENYTELNIVNLQITEDPGEYECNATNAIGSASVVTVLRVRSHLAPLWPFLGILAEIIILVVIIVVYEKRKRPDEVPDDDEPAGPMKTNSTNNHKDKNLRQRNTN

SEQ ID NO: 56666 - protein, 282 aa, Homo sapiens
  Payload ID: 11140
  Gene Symbol: NPTN
  Gene Name: neuroplastin
  Uniprot ID: Q9Y639
  ENSP ID: ENSP00000342958
MSGSSLPSALALSLLLVSGSLLPGPGAAQNEPRIVTSEEVIIRDSPVLPVTLQCNLTSSSHTLTYSYWTKNGVELSATRKNASNMEYRINKPRAEDSGEYHCVYHFVSAPKANATIEVKAAPDITGHKRSENKNEGQDATMYCKSVGYPHPDWIWRKKENGMPMDIVNTSGRFFIINKENYTELNIVNLQITEDPGEYECNATNAIGSASVVTVLRVRSHLAPLWPFLGILAEIIILVVIIVVYEKRKRPDEVPDDDEPAGPMKTNSTNNHKDKNLRQRNTN

SEQ ID NO: 56667 - protein, 152 aa, Homo sapiens
  Payload ID: 11140
  Gene Symbol: NPTN
  Gene Name: neuroplastin
  ENSP ID: ENSP00000455671
MSETKLTGDAFELYCDVVGSPTPEIQWWYAEVNRAESFRQLWDGARKRRVTVNTAYGSNGVSVLRITRLTLEDSGTYECRASNDPKRNDLRQNPSITWIRAQATISVLQKPRIVTSEEVIIRDSPVLPVTLQCNLTSSSHTLTYSYWTKNGV

SEQ ID NO: 56668 - protein, 308 aa, Homo sapiens
  Payload ID: 11140
  Gene Symbol: NPTN
  Gene Name: neuroplastin
  ENSP ID: ENSP00000456033
MSETKLTGDAFELYCDVVGSPTPEIQWWYAEVNRAESFRQLWDGARKRRVTVNTAYGSNGVSVLRITRLTLEDSGTYECRASNDPKRNDLRQNPSITWIRAQATISVLQKPRIVTSEEVIIRDSPVLPVTLQCNLTSSSHTLTYSYWTKNGVELSATRKNASNMEYRINKPRAEDSGEYHCVYHFVSAPKANATIEVKAAPDITGHKRSENKNEGQDATMYCKSVGYPHPDWIWRKKENGMPMDIVNTSGRFFIINKENYTELNIVNLQITEDPGEYECNATNAIGSASVVTVLRVRSHLAPLWPFLG

SEQ ID NO: 56669 - protein, 278 aa, Homo sapiens
  Payload ID: 11140
  Gene Symbol: NPTN
  Gene Name: neuroplastin
  Uniprot ID: Q9Y639
  ENSP ID: ENSP00000456349
MSGSSLPSALALSLLLVSGSLLPGPGAAQNEPRIVTSEEVIIRDSPVLPVTLQCNLTSSSHTLTYSYWTKNGVELSATRKNASNMEYRINKPRAEDSGEYHCVYHFVSAPKANATIEVKAAPDITGHKRSENKNEGQDATMYCKSVGYPHPDWIWRKKENGMPMDIVNTSGRFFIINKENYTELNIVNLQITEDPGEYECNATNAIGSASVVTVLRVRSHLAPLWPFLGILAEIIILVVIIVVYEKRKRPDEVPDAGPMKTNSTNNHKDKNLRQRNTN

SEQ ID NO: 56670 - protein, 394 aa, Homo sapiens
  Payload ID: 11140
  Gene Symbol: NPTN
  Gene Name: neuroplastin
  Uniprot ID: Q9Y639
  ENSP ID: ENSP00000457028
MSGSSLPSALALSLLLVSGSLLPGPGAAQNAGFVKSPMSETKLTGDAFELYCDVVGSPTPEIQWWYAEVNRAESFRQLWDGARKRRVTVNTAYGSNGVSVLRITRLTLEDSGTYECRASNDPKRNDLRQNPSITWIRAQATISVLQKPRIVTSEEVIIRDSPVLPVTLQCNLTSSSHTLTYSYWTKNGVELSATRKNASNMEYRINKPRAEDSGEYHCVYHFVSAPKANATIEVKAAPDITGHKRSENKNEGQDATMYCKSVGYPHPDWIWRKKENGMPMDIVNTSGRFFIINKENYTELNIVNLQITEDPGEYECNATNAIGSASVVTVLRVRSHLAPLWPFLGILAEIIILVVIIVVYEKRKRPDEVPDAGPMKTNSTNNHKDKNLRQRNTN

SEQ ID NO: 56671 - protein, 184 aa, Homo sapiens
  Payload ID: 11140
  Gene Symbol: NPTN
  Gene Name: neuroplastin
  ENSP ID: ENSP00000457470
MSGSSLPSALALSLLLVSGSLLPGPGAAQNAAPDITGHKRSENKNEGQDATMYCKSVGYPHPDWIWRKKENGMPMDIVNTSGRFFIINKENYTELNIVNLQITEDPGEYECNATNAIGSASVVTVLRVRSHLAPLWPFLGILAEIIILVVIIVVYEKRKRPDEVPDDDEPAGPMKTNSTNNHKD

SEQ ID NO: 56672 - protein, 170 aa, Homo sapiens
  Payload ID: 11141
  Gene Symbol: NTS
  Gene Name: neurotensin
  Uniprot ID: P30990
  ENSP ID: ENSP00000256010
MMAGMKIQLVCMLLLAFSSWSLCSDSEEEMKALEADFLTNMHTSKISKAHVPSWKMTLLNVCSLVNNLNSPAEETGEVHEEELVARRKLPTALDGFSLEAMLTIYQLHKICHSRAFQHWELIQEDILDTGNDKNGKEEVIKRKIPYILKRQLYENKPRRPYILKRDSYYY

SEQ ID NO: 56673 - protein, 95 aa, Homo sapiens
  Payload ID: 11141
  Gene Symbol: NTS
  Gene Name: neurotensin
  ENSP ID: ENSP00000448328
MMAGMKIQLVCMLLLAFSSWSLCSDSEEEMKALEADFLTNMHTSKLIQEDILDTGNDKNGKEEVIKRKIPYILKRQLYENKPRRPYILKRDSYYY

SEQ ID NO: 56674 - protein, 418 aa, Homo sapiens
  Payload ID: 11142
  Gene Symbol: NTSR1
  Gene Name: neurotensin receptor 1 (high affinity)
  Uniprot ID: P30989
  ENSP ID: ENSP00000359532
MRLNSSAPGTPGTPAADPFQRAQAGLEEALLAPGFGNASGNASERVLAAPSSELDVNTDIYSKVLVTAVYLALFVVGTVGNTVTAFTLARKKSLQSLQSTVHYHLGSLALSDLLTLLLAMPVELYNFIWVHHPWAFGDAGCRGYYFLRDACTYATALNVASLSVERYLAICHPFKAKTLMSRSRTKKFISAIWLASALLAVPMLFTMGEQNRSADGQHAGGLVCTPTIHTATVKVVIQVNTFMSFIFPMVVISVLNTIIANKLTVMVRQAAEQGQVCTVGGEHSTFSMAIEPGRVQALRHGVRVLRAVVIAFVVCWLPYHVRRLMFCYISDEQWTPFLYDFYHYFYMVTNALFYVSSTINPILYNLVSANFRHIFLATLACLCPVWRRRRKRPAFSRKADSVSSNHTLSSNATRETLY

SEQ ID NO: 56675 - protein, 410 aa, Homo sapiens
  Payload ID: 11143
  Gene Symbol: NTSR2
  Gene Name: neurotensin receptor 2
  Uniprot ID: O95665
  ENSP ID: ENSP00000303686
METSSPRPPRPSSNPGLSLDARLGVDTRLWAKVLFTALYALIWALGAAGNALSAHVVLKARAGRAGRLRHHVLSLALAGLLLLLVGVPVELYSFVWFHYPWVFGDLGCRGYYFVHELCAYATVLSVAGLSAERCLAVCQPLRARSLLTPRRTRWLVALSWAASLGLALPMAVIMGQKHELETADGEPEPASRVCTVLVSRTALQVFIQVNVLVSFVLPLALTAFLNGVTVSHLLALCSQVPSTSTPGSSTPSRLELLSEEGLLSFIVWKKTFIQGGQVSLVRHKDVRRIRSLQRSVQVLRAIVVMYVICWLPYHARRLMYCYVPDDAWTDPLYNFYHYFYMVTNTLFYVSSAVTPLLYNAVSSSFRKLFLEAVSSLCGEHHPMKRLPPKPQSPTLMDTASGFGDPPETRT

SEQ ID NO: 56676 - protein, 316 aa, Homo sapiens
  Payload ID: 11144
  Gene Symbol: NTM
  Gene Name: neurotrimin
  Uniprot ID: Q9P121
  ENSP ID: ENSP00000363916
MGVCGYLFLPWKCLVVVSLRLLFLVPTGVPVRSGDATFPKAMDNVTVRQGESATLRCTIDNRVTRVAWLNRSTILYAGNDKWCLDPRVVLLSNTQTQYSIEIQNVDVYDEGPYTCSVQTDNHPKTSRVHLIVQVSPKIVEISSDISINEGNNISLTCIATGRPEPTVTWRHISPKAVGFVSEDEYLEIQGITREQSGDYECSASNDVAAPVVRRVKVTVNYPPYISEAKGTGVPVGQKGTLQCEASAVPSAEFQWYKDDKRLIEGKKGVKVENRPFLSKLIFFNVSEHDYGNYTCVASNKLGHTNASIMLFGETVL

SEQ ID NO: 56677 - protein, 344 aa, Homo sapiens
  Payload ID: 11144
  Gene Symbol: NTM
  Gene Name: neurotrimin
  Uniprot ID: Q9P121
  ENSP ID: ENSP00000363918
MGVCGYLFLPWKCLVVVSLRLLFLVPTGVPVRSGDATFPKAMDNVTVRQGESATLRCTIDNRVTRVAWLNRSTILYAGNDKWCLDPRVVLLSNTQTQYSIEIQNVDVYDEGPYTCSVQTDNHPKTSRVHLIVQVSPKIVEISSDISINEGNNISLTCIATGRPEPTVTWRHISPKAVGFVSEDEYLEIQGITREQSGDYECSASNDVAAPVVRRVKVTVNYPPYISEAKGTGVPVGQKGTLQCEASAVPSAEFQWYKDDKRLIEGKKGVKVENRPFLSKLIFFNVSEHDYGNYTCVASNKLGHTNASIMLFGPGAVSEVSNGTSRRAGCVWLLPLLVLHLLLKF

SEQ ID NO: 56678 - protein, 344 aa, Homo sapiens
  Payload ID: 11144
  Gene Symbol: NTM
  Gene Name: neurotrimin
  Uniprot ID: Q9P121
  ENSP ID: ENSP00000363923
MKTIQPKMHNSISWAIFTGLAALCLFQGVPVRSGDATFPKAMDNVTVRQGESATLRCTIDNRVTRVAWLNRSTILYAGNDKWCLDPRVVLLSNTQTQYSIEIQNVDVYDEGPYTCSVQTDNHPKTSRVHLIVQVSPKIVEISSDISINEGNNISLTCIATGRPEPTVTWRHISPKAVGFVSEDEYLEIQGITREQSGDYECSASNDVAAPVVRRVKVTVNYPPYISEAKGTGVPVGQKGTLQCEASAVPSAEFQWYKDDKRLIEGKKGVKVENRPFLSKLIFFNVSEHDYGNYTCVASNKLGHTNASIMLFGPGAVSEVSNGTSRRAGCVWLLPLLVLHLLLKF

SEQ ID NO: 56679 - protein, 119 aa, Homo sapiens
  Payload ID: 11144
  Gene Symbol: NTM
  Gene Name: neurotrimin
  ENSP ID: ENSP00000387984
  MOD_RES (1)..(1): Any amino acid
XSAEFQWYKDDKRLIEGKKGVKVENRPFLSKLIFFNVSEHDYGNYTCVASNKLGHTNASIMLFELNEPTSSTLLQEVKTTALTPWKGPGAVSEVSNGTSRRAGCVWLLPLLVLHLLLKF

SEQ ID NO: 56680 - protein, 355 aa, Homo sapiens
  Payload ID: 11144
  Gene Symbol: NTM
  Gene Name: neurotrimin
  Uniprot ID: Q9P121
  ENSP ID: ENSP00000396722
MGVCGYLFLPWKCLVVVSLRLLFLVPTGVPVRSGDATFPKAMDNVTVRQGESATLRCTIDNRVTRVAWLNRSTILYAGNDKWCLDPRVVLLSNTQTQYSIEIQNVDVYDEGPYTCSVQTDNHPKTSRVHLIVQVSPKIVEISSDISINEGNNISLTCIATGRPEPTVTWRHISPKAVGFVSEDEYLEIQGITREQSGDYECSASNDVAAPVVRRVKVTVNYPPYISEAKGTGVPVGQKGTLQCEASAVPSAEFQWYKDDKRLIEGKKGVKVENRPFLSKLIFFNVSEHDYGNYTCVASNKLGHTNASIMLFEVKTTALTPWKGPGAVSEVSNGTSRRAGCVWLLPLLVLHLLLKF

SEQ ID NO: 56681 - protein, 18 aa, Homo sapiens
  Payload ID: 11144
  Gene Symbol: NTM
  Gene Name: neurotrimin
  ENSP ID: ENSP00000400205
MNGKRNGEGGKRWKWKGT

SEQ ID NO: 56682 - protein, 36 aa, Homo sapiens
  Payload ID: 11144
  Gene Symbol: NTM
  Gene Name: neurotrimin
  ENSP ID: ENSP00000409221
MNGKRNGEGGKRWKWKGTGVPVRSGDATFPKAMDNV

SEQ ID NO: 56683 - protein, 179 aa, Homo sapiens
  Payload ID: 11144
  Gene Symbol: NTM
  Gene Name: neurotrimin
  ENSP ID: ENSP00000416320
VGFVSEDEYLEIQGITREQSGDYECSASNDVAAPVVRRVKVTVNYPPYISEAKGTGVPVGQKGTLQCEASAVPSAEFQWYKDDKRLIEGKKGVKVENRPFLSKLIFFNVSEHDYGNYTCVASNKLGHTNASIMLFEVKTTALTPWKGPGAVSEVSNGTSRRAGCVWLLPLLVLHLLLKF

SEQ ID NO: 56684 - protein, 168 aa, Homo sapiens
  Payload ID: 11144
  Gene Symbol: NTM
  Gene Name: neurotrimin
  ENSP ID: ENSP00000437668
VGFVSEDEYLEIQGITREQSGDYECSASNDVAAPVVRRVKVTVNYPPYISEAKGTGVPVGQKGTLQCEASAVPSAEFQWYKDDKRLIEGKKGVKVENRPFLSKLIFFNVSEHDYGNYTCVASNKLGHTNASIMLFGPGAVSEVSNGTSRRAGCVWLLPLLVLHLLLKF

SEQ ID NO: 56685 - protein, 191 aa, Homo sapiens
  Payload ID: 11144
  Gene Symbol: NTM
  Gene Name: neurotrimin
  ENSP ID: ENSP00000448104
MNGKRNGEGGKRWKWKGTGVPVRSGDATFPKAMDNVTVRQGESATLRCTIDNRVTRVAWLNRSTILYAGNDKWCLDPRVVLLSNTQTQYSIEIQNVDVYDEGPYTCSVQTDNHPKTSRVHLIVQVSPKIVEISSDISINEGNNISLTCIATGRPEPTVTWRHISPKAVGFVSEDEYLEIQGITREQSGDYE

SEQ ID NO: 56686 - protein, 793 aa, Homo sapiens
  Payload ID: 11145
  Gene Symbol: NTRK1
  Gene Name: neurotrophic tyrosine kinase, receptor, type 1
  ENSP ID: ENSP00000351486
MLRGGRRGQLGWHSWAAGPGSLLAWLILASAGAAPCPDACCPHGSSGLRCTRDGALDSLHHLPGAENLTELYIENQQHLQHLELRDLRGLGELRNLTIVKSGLRFVAPDAFHFTPRLSRLNLSFNALESLSWKTVQGLSLQELVLSGNPLHCSCALRWLQRWEEEGLGGVPEQKLQCHGQGPLAHMPNASCGVPTLKVQVPNASVDVGDDVLLRCQVEGRGLEQAGWILTELEQSATVMKSGGLPSLGLTLANVTSDLNRKNVTCWAENDVGRAEVSVQVNVSFPASVQLHTAVEMHHWCIPFSVDGQPAPSLRWLFNGSVLNETSFIFTEFLEPAANETVRHGCLRLNQPTHVNNGNYTLLAANPFGQASASIMAAFMDNPFEFNPEDPIPDTNSTSGDPVEKKDETPFGVSVAVGLAVFACLFLSTLLLVLNKCGRRNKFGINRPAVLAPEDGLAMSLHFMTLGGSSLSPTEGKGSGLQGHIIENPQYFSDASPSGVHHIKRRDIVLKWELGEGAFGKVFLAECHNLLPEQDKMLVAVKALKEASESARQDFQREAELLTMLQHQHIVRFFGVCTEGRPLLMVFEYMRHGDLNRFLRSHGPDAKLLAGGEDVAPGPLGLGQLLAVASQVAAGMVYLAGLHFVHRDLATRNCLVGQGLVVKIGDFGMSRDIYSTDYYRVGGRTMLPIRWMPPESILYRKFTTESDVWSFGVVLWEIFTYGKQPWYQLSNTEAIDCITQGRELERPRACPPEVYAIMRGCWQREPQQRHSIKDVHARLQALAQAPPVYLDVLG

SEQ ID NO: 56687 - protein, 790 aa, Homo sapiens
  Payload ID: 11145
  Gene Symbol: NTRK1
  Gene Name: neurotrophic tyrosine kinase, receptor, type 1
  Uniprot ID: P04629
  ENSP ID: ENSP00000357179
MLRGGRRGQLGWHSWAAGPGSLLAWLILASAGAAPCPDACCPHGSSGLRCTRDGALDSLHHLPGAENLTELYIENQQHLQHLELRDLRGLGELRNLTIVKSGLRFVAPDAFHFTPRLSRLNLSFNALESLSWKTVQGLSLQELVLSGNPLHCSCALRWLQRWEEEGLGGVPEQKLQCHGQGPLAHMPNASCGVPTLKVQVPNASVDVGDDVLLRCQVEGRGLEQAGWILTELEQSATVMKSGGLPSLGLTLANVTSDLNRKNVTCWAENDVGRAEVSVQVNVSFPASVQLHTAVEMHHWCIPFSVDGQPAPSLRWLFNGSVLNETSFIFTEFLEPAANETVRHGCLRLNQPTHVNNGNYTLLAANPFGQASASIMAAFMDNPFEFNPEDPIPDTNSTSGDPVEKKDETPFGVSVAVGLAVFACLFLSTLLLVLNKCGRRNKFGINRPAVLAPEDGLAMSLHFMTLGGSSLSPTEGKGSGLQGHIIENPQYFSDACVHHIKRRDIVLKWELGEGAFGKVFLAECHNLLPEQDKMLVAVKALKEASESARQDFQREAELLTMLQHQHIVRFFGVCTEGRPLLMVFEYMRHGDLNRFLRSHGPDAKLLAGGEDVAPGPLGLGQLLAVASQVAAGMVYLAGLHFVHRDLATRNCLVGQGLVVKIGDFGMSRDIYSTDYYRVGGRTMLPIRWMPPESILYRKFTTESDVWSFGVVLWEIFTYGKQPWYQLSNTEAIDCITQGRELERPRACPPEVYAIMRGCWQREPQQRHSIKDVHARLQALAQAPPVYLDVLG

SEQ ID NO: 56688 - protein, 760 aa, Homo sapiens
  Payload ID: 11145
  Gene Symbol: NTRK1
  Gene Name: neurotrophic tyrosine kinase, receptor, type 1
  Uniprot ID: P04629
  ENSP ID: ENSP00000376120
MKEAALICLAPSVPPILTVKSWDTMQLRAARSRCTNLLAASYIENQQHLQHLELRDLRGLGELRNLTIVKSGLRFVAPDAFHFTPRLSRLNLSFNALESLSWKTVQGLSLQELVLSGNPLHCSCALRWLQRWEEEGLGGVPEQKLQCHGQGPLAHMPNASCGVPTLKVQVPNASVDVGDDVLLRCQVEGRGLEQAGWILTELEQSATVMKSGGLPSLGLTLANVTSDLNRKNVTCWAENDVGRAEVSVQVNVSFPASVQLHTAVEMHHWCIPFSVDGQPAPSLRWLFNGSVLNETSFIFTEFLEPAANETVRHGCLRLNQPTHVNNGNYTLLAANPFGQASASIMAAFMDNPFEFNPEDPIPDTNSTSGDPVEKKDETPFGVSVAVGLAVFACLFLSTLLLVLNKCGRRNKFGINRPAVLAPEDGLAMSLHFMTLGGSSLSPTEGKGSGLQGHIIENPQYFSDACVHHIKRRDIVLKWELGEGAFGKVFLAECHNLLPEQDKMLVAVKALKEASESARQDFQREAELLTMLQHQHIVRFFGVCTEGRPLLMVFEYMRHGDLNRFLRSHGPDAKLLAGGEDVAPGPLGLGQLLAVASQVAAGMVYLAGLHFVHRDLATRNCLVGQGLVVKIGDFGMSRDIYSTDYYRVGGRTMLPIRWMPPESILYRKFTTESDVWSFGVVLWEIFTYGKQPWYQLSNTEAIDCITQGRELERPRACPPEVYAIMRGCWQREPQQRHSIKDVHARLQALAQAPPVYLDVLG

SEQ ID NO: 56689 - protein, 796 aa, Homo sapiens
  Payload ID: 11145
  Gene Symbol: NTRK1
  Gene Name: neurotrophic tyrosine kinase, receptor, type 1
  Uniprot ID: P04629
  ENSP ID: ENSP00000431418
MLRGGRRGQLGWHSWAAGPGSLLAWLILASAGAAPCPDACCPHGSSGLRCTRDGALDSLHHLPGAENLTELYIENQQHLQHLELRDLRGLGELRNLTIVKSGLRFVAPDAFHFTPRLSRLNLSFNALESLSWKTVQGLSLQELVLSGNPLHCSCALRWLQRWEEEGLGGVPEQKLQCHGQGPLAHMPNASCGVPTLKVQVPNASVDVGDDVLLRCQVEGRGLEQAGWILTELEQSATVMKSGGLPSLGLTLANVTSDLNRKNVTCWAENDVGRAEVSVQVNVSFPASVQLHTAVEMHHWCIPFSVDGQPAPSLRWLFNGSVLNETSFIFTEFLEPAANETVRHGCLRLNQPTHVNNGNYTLLAANPFGQASASIMAAFMDNPFEFNPEDPIPVSFSPVDTNSTSGDPVEKKDETPFGVSVAVGLAVFACLFLSTLLLVLNKCGRRNKFGINRPAVLAPEDGLAMSLHFMTLGGSSLSPTEGKGSGLQGHIIENPQYFSDACVHHIKRRDIVLKWELGEGAFGKVFLAECHNLLPEQDKMLVAVKALKEASESARQDFQREAELLTMLQHQHIVRFFGVCTEGRPLLMVFEYMRHGDLNRFLRSHGPDAKLLAGGEDVAPGPLGLGQLLAVASQVAAGMVYLAGLHFVHRDLATRNCLVGQGLVVKIGDFGMSRDIYSTDYYRVGGRTMLPIRWMPPESILYRKFTTESDVWSFGVVLWEIFTYGKQPWYQLSNTEAIDCITQGRELERPRACPPEVYAIMRGCWQREPQQRHSIKDVHARLQALAQAPPVYLDVLG

SEQ ID NO: 56690 - protein, 388 aa, Homo sapiens
  Payload ID: 11145
  Gene Symbol: NTRK1
  Gene Name: neurotrophic tyrosine kinase, receptor, type 1
  ENSP ID: ENSP00000436804
MKEAALICLAPSVPPILTVKSWDTMQLRAARSRCTNLLAASYIENQQHLQHLELRDLRGLGELRNLTIVKSGLRFVAPDAFHFTPRLSRLNLSFNALESLSWKTVQGLSLQELVLSGNPLHCSCALRWLQRWEEEGLGGVPEQKLQCHGQGPLAHMPNASCGVPTLKVQVPNASVDVGDDVLLRCQVEGRGLEQAGWILTELEQSATVMSRPVCSCTRRWRCTTGASPSLWMGSRHRLCAGSSMAPCSMRPASSSLSSWSRQPMRPCGTGVCASTSPPTSTTATTRCWLPTPSARPPPPSWLPSWTTLSSSTPRTPSLTLTAHLETRWRRRTKHLLGSRWLWAWPSLPASSFLRCSLCSTNVDGETSLGSTARLCWLQRMGWPCPCIS

SEQ ID NO: 56691 - protein, 838 aa, Homo sapiens
  Payload ID: 11146
  Gene Symbol: NTRK2
  Gene Name: neurotrophic tyrosine kinase, receptor, type 2
  Uniprot ID: Q16620
  ENSP ID: ENSP00000277120
MSSWIRWHGPAMARLWGFCWLVVGFWRAAFACPTSCKCSASRIWCSDPSPGIVAFPRLEPNSVDPENITEIFIANQKRLEIINEDDVEAYVGLRNLTIVDSGLKFVAHKAFLKNSNLQHINFTRNKLTSLSRKHFRHLDLSELILVGNPFTCSCDIMWIKTLQEAKSSPDTQDLYCLNESSKNIPLANLQIPNCGLPSANLAAPNLTVEEGKSITLSCSVAGDPVPNMYWDVGNLVSKHMNETSHTQGSLRITNISSDDSGKQISCVAENLVGEDQDSVNLTVHFAPTITFLESPTSDHHWCIPFTVKGNPKPALQWFYNGAILNESKYICTKIHVTNHTEYHGCLQLDNPTHMNNGDYTLIAKNEYGKDEKQISAHFMGWPGIDDGANPNYPDVIYEDYGTAANDIGDTTNRSNEIPSTDVTDKTGREHLSVYAVVVIASVVGFCLLVMLFLLKLARHSKFGMKDFSWFGFGKVKSRQGVGPASVISNDDDSASPLHHISNGSNTPSSSEGGPDAVIIGMTKIPVIENPQYFGITNSQLKPDTFVQHIKRHNIVLKRELGEGAFGKVFLAECYNLCPEQDKILVAVKTLKDASDNARKDFHREAELLTNLQHEHIVKFYGVCVEGDPLIMVFEYMKHGDLNKFLRAHGPDAVLMAEGNPPTELTQSQMLHIAQQIAAGMVYLASQHFVHRDLATRNCLVGENLLVKIGDFGMSRDVYSTDYYRVGGHTMLPIRWMPPESIMYRKFTTESDVWSLGVVLWEIFTYGKQPWYQLSNNEVIECITQGRVLQRPRTCPQEVYELMLGCWQREPHMRKNIKGIHTLLQNLAKASPVYLDILG

SEQ ID NO: 56692 - protein, 553 aa, Homo sapiens
  Payload ID: 11146
  Gene Symbol: NTRK2
  Gene Name: neurotrophic tyrosine kinase, receptor, type 2
  Uniprot ID: Q16620
  ENSP ID: ENSP00000306167
MSSWIRWHGPAMARLWGFCWLVVGFWRAAFACPTSCKCSASRIWCSDPSPGIVAFPRLEPNSVDPENITEIFIANQKRLEIINEDDVEAYVGLRNLTIVDSGLKFVAHKAFLKNSNLQHINFTRNKLTSLSRKHFRHLDLSELILVGNPFTCSCDIMWIKTLQEAKSSPDTQDLYCLNESSKNIPLANLQIPNCGLPSANLAAPNLTVEEGKSITLSCSVAGDPVPNMYWDVGNLVSKHMNETSHTQGSLRITNISSDDSGKQISCVAENLVGEDQDSVNLTVHFAPTITFLESPTSDHHWCIPFTVKGNPKPALQWFYNGAILNESKYICTKIHVTNHTEYHGCLQLDNPTHMNNGDYTLIAKNEYGKDEKQISAHFMGWPGIDDGANPNYPDVIYEDYGTAANDIGDTTNRSNEIPSTDVTDKTGREHLSVYAVVVIASVVGFCLLVMLFLLKLARHSKFGMKDFSWFGFGKVKSRQGVGPASVISNDDDSASPLHHISNGSNTPSSSEGGPDAVIIGMTKIPVIENPQYFGITNSQLKPDTWPRGSPKTA

SEQ ID NO: 56693 - protein, 822 aa, Homo sapiens
  Payload ID: 11146
  Gene Symbol: NTRK2
  Gene Name: neurotrophic tyrosine kinase, receptor, type 2
  Uniprot ID: Q16620
  ENSP ID: ENSP00000314586
MSSWIRWHGPAMARLWGFCWLVVGFWRAAFACPTSCKCSASRIWCSDPSPGIVAFPRLEPNSVDPENITEIFIANQKRLEIINEDDVEAYVGLRNLTIVDSGLKFVAHKAFLKNSNLQHINFTRNKLTSLSRKHFRHLDLSELILVGNPFTCSCDIMWIKTLQEAKSSPDTQDLYCLNESSKNIPLANLQIPNCGLPSANLAAPNLTVEEGKSITLSCSVAGDPVPNMYWDVGNLVSKHMNETSHTQGSLRITNISSDDSGKQISCVAENLVGEDQDSVNLTVHFAPTITFLESPTSDHHWCIPFTVKGNPKPALQWFYNGAILNESKYICTKIHVTNHTEYHGCLQLDNPTHMNNGDYTLIAKNEYGKDEKQISAHFMGWPGIDDGANPNYPDVIYEDYGTAANDIGDTTNRSNEIPSTDVTDKTGREHLSVYAVVVIASVVGFCLLVMLFLLKLARHSKFGMKGPASVISNDDDSASPLHHISNGSNTPSSSEGGPDAVIIGMTKIPVIENPQYFGITNSQLKPDTFVQHIKRHNIVLKRELGEGAFGKVFLAECYNLCPEQDKILVAVKTLKDASDNARKDFHREAELLTNLQHEHIVKFYGVCVEGDPLIMVFEYMKHGDLNKFLRAHGPDAVLMAEGNPPTELTQSQMLHIAQQIAAGMVYLASQHFVHRDLATRNCLVGENLLVKIGDFGMSRDVYSTDYYRVGGHTMLPIRWMPPESIMYRKFTTESDVWSLGVVLWEIFTYGKQPWYQLSNNEVIECITQGRVLQRPRTCPQEVYELMLGCWQREPHMRKNIKGIHTLLQNLAKASPVYLDILG

SEQ ID NO: 56694 - protein, 477 aa, Homo sapiens
  Payload ID: 11146
  Gene Symbol: NTRK2
  Gene Name: neurotrophic tyrosine kinase, receptor, type 2
  Uniprot ID: Q16620
  ENSP ID: ENSP00000352906
MSSWIRWHGPAMARLWGFCWLVVGFWRAAFACPTSCKCSASRIWCSDPSPGIVAFPRLEPNSVDPENITEIFIANQKRLEIINEDDVEAYVGLRNLTIVDSGLKFVAHKAFLKNSNLQHINFTRNKLTSLSRKHFRHLDLSELILVGNPFTCSCDIMWIKTLQEAKSSPDTQDLYCLNESSKNIPLANLQIPNCGLPSANLAAPNLTVEEGKSITLSCSVAGDPVPNMYWDVGNLVSKHMNETSHTQGSLRITNISSDDSGKQISCVAENLVGEDQDSVNLTVHFAPTITFLESPTSDHHWCIPFTVKGNPKPALQWFYNGAILNESKYICTKIHVTNHTEYHGCLQLDNPTHMNNGDYTLIAKNEYGKDEKQISAHFMGWPGIDDGANPNYPDVIYEDYGTAANDIGDTTNRSNEIPSTDVTDKTGREHLSVYAVVVIASVVGFCLLVMLFLLKLARHSKFGMKGFVLFHKIPLDG

SEQ ID NO: 56695 - protein, 537 aa, Homo sapiens
  Payload ID: 11146
  Gene Symbol: NTRK2
  Gene Name: neurotrophic tyrosine kinase, receptor, type 2
  Uniprot ID: Q16620
  ENSP ID: ENSP00000365381
MSSWIRWHGPAMARLWGFCWLVVGFWRAAFACPTSCKCSASRIWCSDPSPGIVAFPRLEPNSVDPENITEIFIANQKRLEIINEDDVEAYVGLRNLTIVDSGLKFVAHKAFLKNSNLQHINFTRNKLTSLSRKHFRHLDLSELILVGNPFTCSCDIMWIKTLQEAKSSPDTQDLYCLNESSKNIPLANLQIPNCGLPSANLAAPNLTVEEGKSITLSCSVAGDPVPNMYWDVGNLVSKHMNETSHTQGSLRITNISSDDSGKQISCVAENLVGEDQDSVNLTVHFAPTITFLESPTSDHHWCIPFTVKGNPKPALQWFYNGAILNESKYICTKIHVTNHTEYHGCLQLDNPTHMNNGDYTLIAKNEYGKDEKQISAHFMGWPGIDDGANPNYPDVIYEDYGTAANDIGDTTNRSNEIPSTDVTDKTGREHLSVYAVVVIASVVGFCLLVMLFLLKLARHSKFGMKGPASVISNDDDSASPLHHISNGSNTPSSSEGGPDAVIIGMTKIPVIENPQYFGITNSQLKPDTWPRGSPKTA

SEQ ID NO: 56696 - protein, 822 aa, Homo sapiens; identical to SEQ ID NO: 56693
  Payload ID: 11146
  Gene Symbol: NTRK2
  Gene Name: neurotrophic tyrosine kinase, receptor, type 2
  Uniprot ID: Q16620
  ENSP ID: ENSP00000365386

SEQ ID NO: 56697 - protein, 838 aa, Homo sapiens; identical to SEQ ID NO: 56691
  Payload ID: 11146
  Gene Symbol: NTRK2
  Gene Name: neurotrophic tyrosine kinase, receptor, type 2
  Uniprot ID: Q16620
  ENSP ID: ENSP00000365387

SEQ ID NO: 56698 - protein, 477 aa, Homo sapiens; identical to SEQ ID NO: 56694
  Payload ID: 11146
  Gene Symbol: NTRK2
  Gene Name: neurotrophic tyrosine kinase, receptor, type 2
  Uniprot ID: Q16620
  ENSP ID: ENSP00000379221

SEQ ID NO: 56699 - protein, 612 aa, Homo sapiens
  Payload ID: 11147
  Gene Symbol: NTRK3
  Gene Name: neurotrophic tyrosine kinase, receptor, type 3
  Uniprot ID: Q16288
  ENSP ID: ENSP00000318328
MDVSLCPAKCSFWRIFLLGSVWLDYVGSVLACPANCVCSKTEINCRRPDDGNLFPLLEGQDSGNSNGNASINITDISRNITSIHIENWRSLHTLNAVDMELYTGLQKLTIKNSGLRSIQPRAFAKNPHLRYINLSSNRLTTLSWQLFQTLSLRELQLEQNFFNCSCDIRWMQLWQEQGEAKLNSQNLYCINADGSQLPLFRMNISQCDLPEISVSHVNLTVREGDNAVITCNGSGSPLPDVDWIVTGLQSINTHQTNLNWTNVHAINLTLVNVTSEDNGFTLTCIAENVVGMSNASVALTVYYPPRVVSLEEPELRLEHCIEFVVRGNPPPTLHWLHNGQPLRESKIIHVEYYQEGEISEGCLLFNKPTHYNNGNYTLIAKNPLGTANQTINGHFLKEPFPESTDNFILFDEVSPTPPITVTHKPEEDTFGVSIAVGLAAFACVLLVVLFVMINKYGRRSKFGMKGPVAVISGEEDSASPLHHINHGITTPSSLDAGPDTVVIGMTRIPVIENPQYFRQGHNCHKPDTWVFSNIDNHGILNLKDNRDHLVPSTHYIYEEPEVQSGEVSYPRSHGFREIMLNPISLPGHSKPLNHGIYVEDVNVYFSKGRHGF

SEQ ID NO: 56700 - protein, 817 aa, Homo sapiens
  Payload ID: 11147
  Gene Symbol: NTRK3
  Gene Name: neurotrophic tyrosine kinase, receptor, type 3
  Uniprot ID: Q16288
  ENSP ID: ENSP00000347397
MDVSLCPAKCSFWRIFLLGSVWLDYVGSVLACPANCVCSKTEINCRRPDDGNLFPLLEGQDSGNSNGNASINITDISRNITSIHIENWRSLHTLNAVDMELYTGLQKLTIKNSGLRSIQPRAFAKNPHLRYINLSSNRLTTLSWQLFQTLSLRELQLEQNFFNCSCDIRWMQLWQEQGEAKLNSQNLYCINADGSQLPLFRMNISQCDLPEISVSHVNLTVREGDNAVITCNGSGSPLPDVDWIVTGLQSINTHQTNLNWTNVHAINLTLVNVTSEDNGFTLTCIAENVVGMSNASVALTVYYPPRVVSLEEPELRLEHCIEFVVRGNPPPTLHWLHNGQPLRESKIIHVEYYQEGEISEGCLLFNKPTHYNNGNYTLIAKNPLGTANQTINGHFLKEPFPVDEVSPTPPITVTHKPEEDTFGVSIAVGLAAFACVLLVVLFVMINKYGRRSKFGMKGPVAVISGEEDSASPLHHINHGITTPSSLDAGPDTVVIGMTRIPVIENPQYFRQGHNCHKPDTYVQHIKRRDIVLKRELGEGAFGKVFLAECYNLSPTKDKMLVAVKALKDPTLAARKDFQREAELLTNLQHEHIVKFYGVCGDGDPLIMVFEYMKHGDLNKFLRAHGPDAMILVDGQPRQAKGELGLSQMLHIASQIASGMVYLASQHFVHRDLATRNCLVGANLLVKIGDFGMSRDVYSTDYYRVGGHTMLPIRWMPPESIMYRKFTTESDVWSFGVILWEIFTYGKQPWFQLSNTEVIECITQGRVLERPRVCPKEVYDVMLGCWQREPQQRLNIKEIYKILHALGKATPIYLDILG

SEQ ID NO: 56701 - protein, 831 aa, Homo sapiens
  Payload ID: 11147
  Gene Symbol: NTRK3
  Gene Name: neurotrophic tyrosine kinase, receptor, type 3
  Uniprot ID: Q16288
  ENSP ID: ENSP00000350356
MDVSLCPAKCSFWRIFLLGSVWLDYVGSVLACPANCVCSKTEINCRRPDDGNLFPLLEGQDSGNSNGNASINITDISRNITSIHIENWRSLHTLNAVDMELYTGLQKLTIKNSGLRSIQPRAFAKNPHLRYINLSSNRLTTLSWQLFQTLSLRELQLEQNFFNCSCDIRWMQLWQEQGEAKLNSQNLYCINADGSQLPLFRMNISQCDLPEISVSHVNLTVREGDNAVITCNGSGSPLPDVDWIVTGLQSINTHQTNLNWTNVHAINLTLVNVTSEDNGFTLTCIAENVVGMSNASVALTVYYPPRVVSLEEPELRLEHCIEFVVRGNPPPTLHWLHNGQPLRESKIIHVEYYQEGEISEGCLLFNKPTHYNNGNYTLIAKNPLGTANQTINGHFLKEPFPVDEVSPTPPITVTHKPEEDTFGVSIAVGLAAFACVLLVVLFVMINKYGRRSKFGMKGPVAVISGEEDSASPLHHINHGITTPSSLDAGPDTVVIGMTRIPVIENPQYFRQGHNCHKPDTYVQHIKRRDIVLKRELGEGAFGKVFLAECYNLSPTKDKMLVAVKALKDPTLAARKDFQREAELLTNLQHEHIVKFYGVCGDGDPLIMVFEYMKHGDLNKFLRAHGPDAMILVDGQPRQAKGELGLSQMLHIASQIASGMVYLASQHFVHRDLATRNCLVGANLLVKIGDFGMSRDVYSTDYYRLFNPSGNDFCIWCEVGGHTMLPIRWMPPESIMYRKFTTESDVWSFGVILWEIFTYGKQPWFQLSNTEVIECITQGRVLERPRVCPKEVYDVMLGCWQREPQQRLNIKEIYKILHALGKATPIYLDILG

SEQ ID NO: 56702 - protein, 839 aa, Homo sapiens
  Payload ID: 11147
  Gene Symbol: NTRK3
  Gene Name: neurotrophic tyrosine kinase, receptor, type 3
  Uniprot ID: Q16288
  ENSP ID: ENSP00000354207
MDVSLCPAKCSFWRIFLLGSVWLDYVGSVLACPANCVCSKTEINCRRPDDGNLFPLLEGQDSGNSNGNASINITDISRNITSIHIENWRSLHTLNAVDMELYTGLQKLTIKNSGLRSIQPRAFAKNPHLRYINLSSNRLTTLSWQLFQTLSLRELQLEQNFFNCSCDIRWMQLWQEQGEAKLNSQNLYCINADGSQLPLFRMNISQCDLPEISVSHVNLTVREGDNAVITCNGSGSPLPDVDWIVTGLQSINTHQTNLNWTNVHAINLTLVNVTSEDNGFTLTCIAENVVGMSNASVALTVYYPPRVVSLEEPELRLEHCIEFVVRGNPPPTLHWLHNGQPLRESKIIHVEYYQEGEISEGCLLFNKPTHYNNGNYTLIAKNPLGTANQTINGHFLKEPFPESTDNFILFDEVSPTPPITVTHKPEEDTFGVSIAVGLAAFACVLLVVLFVMINKYGRRSKFGMKGPVAVISGEEDSASPLHHINHGITTPSSLDAGPDTVVIGMTRIPVIENPQYFRQGHNCHKPDTYVQHIKRRDIVLKRELGEGAFGKVFLAECYNLSPTKDKMLVAVKALKDPTLAARKDFQREAELLTNLQHEHIVKFYGVCGDGDPLIMVFEYMKHGDLNKFLRAHGPDAMILVDGQPRQAKGELGLSQMLHIASQIASGMVYLASQHFVHRDLATRNCLVGANLLVKIGDFGMSRDVYSTDYYRLFNPSGNDFCIWCEVGGHTMLPIRWMPPESIMYRKFTTESDVWSFGVILWEIFTYGKQPWFQLSNTEVIECITQGRVLERPRVCPKEVYDVMLGCWQREPQQRLNIKEIYKILHALGKATPIYLDILG

SEQ ID NO: 56703 - protein, 825 aa, Homo sapiens
  Payload ID: 11147
  Gene Symbol: NTRK3
  Gene Name: neurotrophic tyrosine kinase, receptor, type 3
  Uniprot ID: Q16288
  ENSP ID: ENSP00000377990
MDVSLCPAKCSFWRIFLLGSVWLDYVGSVLACPANCVCSKTEINCRRPDDGNLFPLLEGQDSGNSNGNASINITDISRNITSIHIENWRSLHTLNAVDMELYTGLQKLTIKNSGLRSIQPRAFAKNPHLRYINLSSNRLTTLSWQLFQTLSLRELQLEQNFFNCSCDIRWMQLWQEQGEAKLNSQNLYCINADGSQLPLFRMNISQCDLPEISVSHVNLTVREGDNAVITCNGSGSPLPDVDWIVTGLQSINTHQTNLNWTNVHAINLTLVNVTSEDNGFTLTCIAENVVGMSNASVALTVYYPPRVVSLEEPELRLEHCIEFVVRGNPPPTLHWLHNGQPLRESKIIHVEYYQEGEISEGCLLFNKPTHYNNGNYTLIAKNPLGTANQTINGHFLKEPFPESTDNFILFDEVSPTPPITVTHKPEEDTFGVSIAVGLAAFACVLLVVLFVMINKYGRRSKFGMKGPVAVISGEEDSASPLHHINHGITTPSSLDAGPDTVVIGMTRIPVIENPQYFRQGHNCHKPDTYVQHIKRRDIVLKRELGEGAFGKVFLAECYNLSPTKDKMLVAVKALKDPTLAARKDFQREAELLTNLQHEHIVKFYGVCGDGDPLIMVFEYMKHGDLNKFLRAHGPDAMILVDGQPRQAKGELGLSQMLHIASQIASGMVYLASQHFVHRDLATRNCLVGANLLVKIGDFGMSRDVYSTDYYRVGGHTMLPIRWMPPESIMYRKFTTESDVWSFGVILWEIFTYGKQPWFQLSNTEVIECITQGRVLERPRVCPKEVYDVMLGCWQREPQQRLNIKEIYKILHALGKATPIYLDILG

SEQ ID NO: 56704 - protein, 617 aa, Homo sapiens
  Payload ID: 11147
  Gene Symbol: NTRK3
  Gene Name: neurotrophic tyrosine kinase, receptor, type 3
  ENSP ID: ENSP00000437773
MELYTGLQKLTIKNSGLRSIQPRAFAKNPHLRYINLSSNRLTTLSWQLFQTLSLRELQLEQNFFNCSCDIRWMQLWQEQGEAKLNSQNLYCINADGSQLPLFRMNISQCDLPEISVSHVNLTVREGDNAVITCNGSGSPLPDVDWIVTGLQSINTHQTNLNWTNVHAINLTLVNVTSEDNGFTLTCIAENVVGMSNASVALTVYYPPRVVSLEEPELRLEHCIEFVVRGNPPPTLHWLHNGQPLRESKIIHVEYYQEGEISEGCLLFNKPTHYNNGNYTLIAKNPLGTANQTINGHFLKEPFPESTDNFILFDEVSPTPPITVTHKPEEDTFGVSIAVGLAAFACVLLVVLFVMINKYGRRSKFGMKGPVAVISGEEDSASPLHHINHGITTPSSLDAGPDTVVIGMTRIPVIENPQYFRQGHNCHKPDTYVQHIKRRDIVLKRELGEGAFGKVFLAECYNLSPTKDKMLVAVKALKDPTLAARKDFQREAELLTNLQHEHIVKFYGVCGDGDPLIMVFEYMKHGDLNKFLRAHGPDAMILVDGQPRQAKGELGLSQMLHIASQIASGMVYLASQHFVHRDLATRNCLVGANLLVKIGDFGMSRDVYSTDYYRVVQA

SEQ ID NO: 56705 - protein, 612 aa, Homo sapiens; identical to SEQ ID NO: 56699
  Payload ID: 11147
  Gene Symbol: NTRK3
  Gene Name: neurotrophic tyrosine kinase, receptor, type 3
  Uniprot ID: Q16288
  ENSP ID: ENSP00000444673

SEQ ID NO: 56706 - protein, 705 aa, Homo sapiens
  Payload ID: 11147
  Gene Symbol: NTRK3
  Gene Name: neurotrophic tyrosine kinase, receptor, type 3
  ENSP ID: ENSP00000453511
MDVSLCPAKCSFWRIFLLGSVWLDYVGSVLACPANCVCSKTEINCRRPDDGNLFPLLEGQDSGNSNGNASINITDISRNITSIHIENWRSLHTLNAVDMELYTGLQKLTIKNSGLRSIQPRAFAKNPHLRYINLSSNRLTTLSWQLFQTLSLRELQLEQNFFNCSCDIRWMQLWQEQGEAKLNSQNLYCINADGSQLPLFRMNISQCDLPEISVSHVNLTVREGDNAVITCNGSGSPLPDVDWIVTGLQSINTHQTNLNWTNVHAINLTLVNVTSEDNGFTLTCIAENVVGMSNASVALTVYYPPRVVSLEEPELRLEHCIEFVVRGNPPPTLHWLHNGQPLRESKIIHVEYYQEGEISEGCLLFNKPTHYNNGNYTLIAKNPLGTANQTINGHFLKEPFPVDEVSPTPPITVTHKPEEDTFGVSIAVGLAAFACVLLVVLFVMINKYGRRSKFGMKGPVAVISGEEDSASPLHHINHGITTPSSLDAGPDTVVIGMTRIPVIENPQYFRQGHNCHKPDTYVQHIKRRDIVLKRELGEGAFGKVFLAECYNLSPTKDKMLVAVKALKDPTLAARKDFQREAELLTNLQHEHIVKFYGVCGDGDPLIMVFEYMKHGDLNKFLRAHGPDAMILVDGQPRQAKGELGLSQMLHIASQIASGMVYLASQHFVHRDLATRNCLVGANLLVKIGDFGMSRDVYSTDYYRVK

SEQ ID NO: 56707 - protein, 817 aa, Homo sapiens; identical to SEQ ID NO: 56700
  Payload ID: 11147
  Gene Symbol: NTRK3
  Gene Name: neurotrophic tyrosine kinase, receptor, type 3
  Uniprot ID: Q16288
  ENSP ID: ENSP00000453959

SEQ ID NO: 56708 - protein, 146 aa, Homo sapiens
  Payload ID: 11147
  Gene Symbol: NTRK3
  Gene Name: neurotrophic tyrosine kinase, receptor, type 3
  ENSP ID: ENSP00000473315
  MOD_RES (1)..(1): Any amino acid
XGVCGDGDPLIMVFEYMKHGDLNKFLRAHGPDAMILVDGQPRQAKGELGLSQMLHIASQIASGMVYLASQHFVHRDLATRNCLVGANLLVKIGDFGMSRDVYSTDYYRYTSAKALEECSDLSDRENTVKDSLYELIPPDRLCRHED

SEQ ID NO: 56709 - protein, 85 aa, Homo sapiens
  Payload ID: 11147
  Gene Symbol: NTRK3
  Gene Name: neurotrophic tyrosine kinase, receptor, type 3
  ENSP ID: ENSP00000473475
VGMSNASVALTVYFDEVSPTPPITVTHKPEEDTFGVSIAVGLAAFACVLLVVLFVMINKYGRRSKFGMKDGLELLAVLLKCDSKQ

SEQ ID NO: 56710 - protein, 90 aa, Homo sapiens
  Payload ID: 11147
  Gene Symbol: NTRK3
  Gene Name: neurotrophic tyrosine kinase, receptor, type 3
  ENSP ID: ENSP00000473656
MELYTGLQKLTIKNSGLRSIQPRAFAKNPHLRYINLSSNRLTTLSWQLFQTLSLRELQLEQNFFNCSCDIRWMQLWQEQGEAKLNSQNLY

SEQ ID NO: 56711 - protein, 49 aa, Homo sapiens
  Payload ID: 11147
  Gene Symbol: NTRK3
  Gene Name: neurotrophic tyrosine kinase, receptor, type 3
  ENSP ID: ENSP00000480693
THKPEEDTFGVPWLSSVVRRTQPAHCTTSTTASPRPRHWMPGPTLWSLA

SEQ ID NO: 56712 - protein, 839 aa, Homo sapiens; identical to SEQ ID NO: 56702
  Payload ID: 11147
  Gene Symbol: NTRK3
  Gene Name: neurotrophic tyrosine kinase, receptor, type 3
  Uniprot ID: Q16288
  ENSP ID: ENSP00000485864

SEQ ID NO: 56713 - protein, 864 aa, Homo sapiens
  Payload ID: 11147
  Gene Symbol: NTRK3
  Gene Name: neurotrophic tyrosine kinase, receptor, type 3
  ENSP ID: ENSP00000486784
MDVSLCPAKCSFWRIFLLGSVWLDYVGSVLACPANCVCSKTEINCRRPDDGNLFPLLEGQDSGNSNGNASINITDISRNITSIHIENWRSLHTLNAVDMELYTGLQKLTIKNSGLRSIQPRAFAKNPHLRYINLSSNRLTTLSWQLFQTLSLRELQLEQNFFNCSCDIRWMQLWQEQGEAKLNSQNLYCINADGSQLPLFRMNISQCDLPEISVSHVNLTVREGDNAVITCNGSGSPLPDVDWIVTGLQSINTHQTNLNWTNVHAINLTLVNVTSEDNGFTLTCIAENVVGMSNASVALTVYYPPRVVSLEEPELRLEHCIEFVVRGNPPPTLHWLHNGQPLRESKIIHVEYYQEGEISEGCLLFNKPTHYNNGNYTLIAKNPLGTANQTINGHFLKEPFPESTDNFILFDEVSPTPPITVTHKPEEDTFGVSIAVGLAAFACVLLVVLFVMINKYGRRSKFGMKGPVAVISGEEDSASPLHHINHGITTPSSLDAGPDTVVIGMTRIPVIENPQYFRQGHNCHKPDTYVQHIKRRDIVLKRELGEGAFGKVFLAECYNLSPTKDKMLVAVKALKDPTLAARKDFQREAELLTNLQHEHIVKFYGVCGDGDPLIMVFEYMKHGDLNKFLRAHGPDAMILVDGQPRQAKGELGLSQMLHIASQIASGMVYLASQHFVHRDLATRNCLVGANLLVKIGDFGMSRDVYSTDYYREGPCQKGPFSVVWQRQRLAATAASTLFNPSGNDFCIWCEVGGHTMLPIRWMPPESIMYRKFTTESDVWSFGVILWEIFTYGKQPWFQLSNTEVIECITQGRVLERPRVCPKEVYDVMLGCWQREPQQRLNIKEIYKILHALGKATPIYLDILG

SEQ ID NO: 56714 - protein, 257 aa, Homo sapiens
  Payload ID: 11148
  Gene Symbol: NTF3
  Gene Name: neurotrophin 3
  Uniprot ID: P20783
  ENSP ID: ENSP00000328738
MSILFYVIFLAYLRGIQGNNMDQRSLPEDSLNSLIIKLIQADILKNKLSKQMVDVKENYQSTLPKAEAPREPERGGPAKSAFQPVIAMDTELLRQQRRYNSPRVLLSDSTPLEPPPLYLMEDYVGSPVVANRTSRRKRYAEHKSHRGEYSVCDSESLWVTDKSSAIDIRGHQVTVLGEIKTGNSPVKQYFYETRCKEARPVKNGCRGIDDKHWNSQCKTSQTYVRALTSENNKLVGWRWIRIDTSCVCALSRKIGRT

SEQ ID NO: 56715 - protein, 270 aa, Homo sapiens
  Payload ID: 11148
  Gene Symbol: NTF3
  Gene Name: neurotrophin 3
  Uniprot ID: P20783
  ENSP ID: ENSP00000397297
MVTFATILQVNKVMSILFYVIFLAYLRGIQGNNMDQRSLPEDSLNSLIIKLIQADILKNKLSKQMVDVKENYQSTLPKAEAPREPERGGPAKSAFQPVIAMDTELLRQQRRYNSPRVLLSDSTPLEPPPLYLMEDYVGSPVVANRTSRRKRYAEHKSHRGEYSVCDSESLWVTDKSSAIDIRGHQVTVLGEIKTGNSPVKQYFYETRCKEARPVKNGCRGIDDKHWNSQCKTSQTYVRALTSENNKLVGWRWIRIDTSCVCALSRKIGRT

SEQ ID NO: 56716 - protein, 210 aa, Homo sapiens
  Payload ID: 11149
  Gene Symbol: NTF4
  Gene Name: neurotrophin 4
  Uniprot ID: P34130
  ENSP ID: ENSP00000469455
MLPLPSCSLPILLLFLLPSVPIESQPPPSTLPPFLAPEWDLLSPRVVLSRGAPAGPPLLFLLEAGAFRESAGAPANRSRRGVSETAPASRRGELAVCDAVSGWVTDRRTAVDLRGREVEVLGEVPAAGGSPLRQYFFETRCKADNAEEGGPGAGGGGCRGVDRRHWVSECKAKQSYVRALTADAQGRVGWRWIRIDTACVCTLLSRTGRA

SEQ ID NO: 56717 - protein, 153 aa, Homo sapiens
  Payload ID: 11149
  Gene Symbol: NTF4
  Gene Name: neurotrophin 4
  ENSP ID: ENSP00000470689
MLPLPSCSLPILLLFLLPSVPIESQPPPSTLPPFLAPEWDLLSPRVVLSRGAPAGPPLLFLLEAGAFRESAGAPANRSRRGSTVADPLPPTAKQDSRIWAFDEVLSRWETTSGSAYVPKTHGGPCAQPRAPEPADPTRTVGIKDSGEKLRHRS

SEQ ID NO: 56718 - protein, 143 aa, Homo sapiens
  Payload ID: 11149
  Gene Symbol: NTF4
  Gene Name: neurotrophin 4
  ENSP ID: ENSP00000471508
MLPLPSCSLPILLLFLLPSVPIESQPPPSTLPPFLAPEWDLLSPRVVLSRGAPAGPPLLFLLEAGAFRESAGAPANRSRRGVSETAPASRRGELAVCDAVSGWVTDRRTAVDLRGREVEVLGEVPAAGGSPLRQYFFETRCKA

SEQ ID NO: 56719 - protein, 197 aa, Homo sapiens
  Payload ID: 11150
  Gene Symbol: NRTN
  Gene Name: neurturin
  Uniprot ID: Q99748
  ENSP ID: ENSP00000302648
MQRWKAAALASVLCSSVLSIWMCREGLLLSHRLGPALVPLHRLPRTLDARIARLAQYRALLQGAPDAMELRELTPWAGRPPGPRRRAGPRRRRARARLGARPCGLRELEVRVSELGLGYASDETVLFRYCAGACEAAARVYDLGLRRLRQRRRLRRERVRAQPCCRPTAYEDEVSFLDAHSRYHTVHELSARECACV

SEQ ID NO: 56720 - protein, 307 aa, Homo sapiens
  Payload ID: 11151
  Gene Symbol: NCEH1
  Gene Name: neutral cholesterol ester hydrolase 1
  ENSP ID: ENSP00000392934
  MOD_RES (1)..(1): Any amino acid
XGGLRVVSPFPLCQPAGEPSQGKMRSSCVLLTALVALAAYYVYIPLPGSVSDPWKLMLLDATFRGAQQVSNLIHYLGLSHHLLALNFIIVSFGKKSAWSSAQVKVTDTDFDGVEVRVFEGPPKPEEPLKRSVVYIHGGGWALASASASWSPSDEIRYYDELCTAMAEELNAVIVSIEYRLVPKVYFPEQIHDVVRATKYFLKPEVLQKYMVDPGRICISGDSAGGNLAAALGQQFTQDASLKNKLKLQALIYPVLQALDFNTPSYQQNVNTPILPRYVMVKYWVDYFKGNYDFVQAMIVNNHTSLDV

SEQ ID NO: 56721 - protein, 93 aa, Homo sapiens
  Payload ID: 11151
  Gene Symbol: NCEH1
  Gene Name: neutral cholesterol ester hydrolase 1
  ENSP ID: ENSP00000402196
MSSCRGQKVAGGLRVVSPFPLCQPAGEPSQGKMRSSCVLLTALVALAAYYVYIPLPGSVSDPWKLMLLDATFRGAQQVKSGIMMSCVQQWLRN

SEQ ID NO: 56722 - protein, 440 aa, Homo sapiens
  Payload ID: 11151
  Gene Symbol: NCEH1
  Gene Name: neutral cholesterol ester hydrolase 1
  ENSP ID: ENSP00000418571
MSSCRGQKVAGGLRVVSPFPLCQPAGEPSQGKMRSSCVLLTALVALAAYYVYIPLPGSVSDPWKLMLLDATFRGAQQVSNLIHYLGLSHHLLALNFIIVSFGKKSAWSSAQVKVTDTDFDGVEVRVFEGPPKPEEPLKRSVVYIHGGGWALASAKIRYYDELCTAMAEELNAVIVSIEYRLVPKVYFPEQIHDVVRATKYFLKPEVLQKYMVDPGRICISGDSAGGNLAAALGQQFTQDASLKNKLKLQALIYPVLQALDFNTPSYQQNVNTPILPRYVMVKYWVDYFKGNYDFVQAMIVNNHTSLDVEEAAAVRARLNWTSLLPASFTKNYKPVVQTTGNARIVQELPQLLDARSAPLIADQAVLQLLPKTYILTCEHDVLRDDGIMYAKRLESAGVEVTLDHFEDGFHGCMIFTSWPTNFSVGIRTRNSYIKWLDQNL

SEQ ID NO: 56723 - protein, 448 aa, Homo sapiens
  Payload ID: 11151
  Gene Symbol: NCEH1
  Gene Name: neutral cholesterol ester hydrolase 1
  ENSP ID: ENSP00000442464
MSSCRGQKVAGGLRVVSPFPLCQPAGEPSQGKMRSSCVLLTALVALAAYYVYIPLPGSVSDPWKLMLLDATFRGAQQVSNLIHYLGLSHHLLALNFIIVSFGKKSAWSSAQVKVTDTDFDGVEVRVFEGPPKPEEPLKRSVVYIHGGGWALASASASWSPSDEIRYYDELCTAMAEELNAVIVSIEYRLVPKVYFPEQIHDVVRATKYFLKPEVLQKYMVDPGRICISGDSAGGNLAAALGQQFTQDASLKNKLKLQALIYPVLQALDFNTPSYQQNVNTPILPRYVMVKYWVDYFKGNYDFVQAMIVNNHTSLDVEEAAAVRARLNWTSLLPASFTKNYKPVVQTTGNARIVQELPQLLDARSAPLIADQAVLQLLPKTYILTCEHDVLRDDGIMYAKRLESAGVEVTLDHFEDGFHGCMIFTSWPTNFSVGIRTRNSYIKWLDQNL

SEQ ID NO: 56724 - protein, 275 aa, Homo sapiens
  Payload ID: 11151
  Gene Symbol: NCEH1
  Gene Name: neutral cholesterol ester hydrolase 1
  Uniprot ID: Q6PIU2
  ENSP ID: ENSP00000443227
MAEELNAVIVSIEYRLVPKVYFPEQIHDVVRATKYFLKPEVLQKYMVDPGRICISGDSAGGNLAAALGQQFTQDASLKNKLKLQALIYPVLQALDFNTPSYQQNVNTPILPRYVMVKYWVDYFKGNYDFVQAMIVNNHTSLDVEEAAAVRARLNWTSLLPASFTKNYKPVVQTTGNARIVQELPQLLDARSAPLIADQAVLQLLPKTYILTCEHDVLRDDGIMYAKRLESAGVEVTLDHFEDGFHGCMIFTSWPTNFSVGIRTRNSYIKWLDQNL

SEQ ID NO: 56725 - protein, 917 aa, Homo sapiens
  Payload ID: 11152
  Gene Symbol: NSMAF
  Gene Name: neutral sphingomyelinase (N-SMase) activation associated factor
  Uniprot ID: Q92636
  ENSP ID: ENSP00000038176
MAFIRKKQQEQQLQLYSKERFSLLLLNLEEYYFEQHRANHILHKGSHHERKIRGSLKICSKSVIFEPDSISQPIIKIPLRDCIKIGKHGENGANRHFTKAKSGGISLIFSQVYFIKEHNVVAPYKIERGKMEYVFELDVPGKVEDVVETLLQLHRASCLDKLGDQTAMITAILQSRLARTSFDKNRFQNISEKLHMECKAEMVTPLVTNPGHVCITDTNLYFQPLNGYPKPVVQITLQDVRRIYKRRHGLMPLGLEVFCTEDDLCSDIYLKFYEPQDRDDLYFYIATYLEHHVAEHTAESYMLQWQRGHLSNYQYLLHLNNLADRSCNDLSQYPVFPWIIHDYSSSELDLSNPGTFRDLSKPVGALNKERLERLLTRYQEMPEPKFMYGSHYSSPGYVLFYLVRIAPEYMLCLQNGRFDNADRMFNSIAETWKNCLDGATDFKELIPEFYGDDVSFLVNSLKLDLGKRQGGQMVDDVELPPWASSPEDFLQKSKDALESNYVSEHLHEWIDLIFGYKQKGSDAVGAHNVFHPLTYEGGVDLNSIQDPDEKVAMLTQILEFGQTPKQLFVTPHPRRITPKFKSLSQTSSYNASMADSPGEESFEDLTEESKTLAWNNITKLQLHEHYKIHKEAVTGITVSRNGSSVFTTSQDSTLKMFSKESKMLQRSISFSNMALSSCLLLPGDATVITSSWDNNVYFYSIAFGRRQDTLMGHDDAVSKICWHDNRLYSASWDSTVKVWSGVPAEMPGTKRHHFDLLAELEHDVSVDTISLNAASTLLVSGTKEGTVNIWDLTTATLMHQIPCHSGIVCDTAFSPDSRHVLSTGTDGCLNVIDVQTGMLISSMTSDEPQRCFVWDGNSVLSGSQSGELLVWDLLGAKISERIQGHTGAVTCIWMNEQCSSIITGGEDRQIIFWKLQY

SEQ ID NO: 56726 - protein, 948 aa, Homo sapiens
  Payload ID: 11152
  Gene Symbol: NSMAF
  Gene Name: neutral sphingomyelinase (N-SMase) activation associated factor
  Uniprot ID: Q92636
  ENSP ID: ENSP00000411012
MTGQARFHRGAEACRAIRQCRSRRPRAAHPEGRAGSGRGSRHASPGVRRGGFSLLLLNLEEYYFEQHRANHILHKGSHHERKIRGSLKICSKSVIFEPDSISQPIIKIPLRDCIKIGKHGENGANRHFTKAKSGGISLIFSQVYFIKEHNVVAPYKIERGKMEYVFELDVPGKVEDVVETLLQLHRASCLDKLGDQTAMITAILQSRLARTSFDKNRFQNISEKLHMECKAEMVTPLVTNPGHVCITDTNLYFQPLNGYPKPVVQITLQDVRRIYKRRHGLMPLGLEVFCTEDDLCSDIYLKFYEPQDRDDLYFYIATYLEHHVAEHTAESYMLQWQRGHLSNYQYLLHLNNLADRSCNDLSQYPVFPWIIHDYSSSELDLSNPGTFRDLSKPVGALNKERLERLLTRYQEMPEPKFMYGSHYSSPGYVLFYLVRIAPEYMLCLQNGRFDNADRMFNSIAETWKNCLDGATDFKELIPEFYGDDVSFLVNSLKLDLGKRQGGQMVDDVELPPWASSPEDFLQKSKDALESNYVSEHLHEWIDLIFGYKQKGSDAVGAHNVFHPLTYEGGVDLNSIQDPDEKVAMLTQILEFGQTPKQLFVTPHPRRITPKFKSLSQTSSYNASMADSPGEESFEDLTEESKTLAWNNITKLQLHEHYKIHKEAVTGITVSRNGSSVFTTSQDSTLKMFSKESKMLQRSISFSNMALSSCLLLPGDATVITSSWDNNVYFYSIAFGRRQDTLMGHDDAVSKICWHDNRLYSASWDSTVKVWSGVPAEMPGTKRHHFDLLAELEHDVSVDTISLNAASTLLVSGTKEGTVNIWDLTTATLMHQIPCHSGIVCDTAFSPDSRHVLSTGTDGCLNVIDVQTGMLISSMTSDEPQRCFVWDGNSVLSGSQSGELLVWDLLGAKISERIQGHTGAVTCIWMNEQCSSIITGGEDRQIIFWKLQY

SEQ ID NO: 56727 - protein, 65 aa, Homo sapiens
  Payload ID: 11152
  Gene Symbol: NSMAF
  Gene Name: neutral sphingomyelinase (N-SMase) activation associated factor
  ENSP ID: ENSP00000430195
MAFIRKKQQEQQLQLYSKERFSLLLLNLEEYYFEQHRANHILHKGSHHERPRNNSVAISTKNLVS

SEQ ID NO: 56728 - protein, 54 aa, Homo sapiens
  Payload ID: 11152
  Gene Symbol: NSMAF
  Gene Name: neutral sphingomyelinase (N-SMase) activation associated factor
  ENSP ID: ENSP00000430982
MAFIRKKQQEQQLQLYSKERFSLLLLNLEEYYFEQHRANHILHKGSHHERTYPG

SEQ ID NO: 56729 - protein, 390 aa, Homo sapiens
  Payload ID: 11153
  Gene Symbol: NCF1
  Gene Name: neutrophil cytosolic factor 1
  Uniprot ID: P14598
  ENSP ID: ENSP00000289473
MGDTFIRHIALLGFEKRFVPSQHYVYMFLVKWQDLSEKVVYRRFTEIYEFHKTLKEMFPIEAGAINPENRIIPHLPAPKWFDGQRAAENRQGTLTEYCSTLMSLPTKISRCPHLLDFFKVRPDDLKLPTDNQTKKPETYLMPKDGKSTATDITGPIILQTYRAIANYEKTSGSEMALSTGDVVEVVEKSESGWWFCQMKAKRGWIPASFLEPLDSPDETEDPEPNYAGEPYVAIKAYTAVEGDEVSLLEGEAVEVIHKLLDGWWVIRKDDVTGYFPSMYLQKSGQDVSQAQRQIKRGAPPRRSSIRNAHSIHQRSRKRLSQDAYRRNSVRFLQQRRRQARPGPQSPGSPLEEERQTQRSKPQPAVPPRPSADLILNRCSESTKRKLASAV

SEQ ID NO: 56730 - protein, 163 aa, Homo sapiens
  Payload ID: 11153
  Gene Symbol: NCF1
  Gene Name: neutrophil cytosolic factor 1
  ENSP ID: ENSP00000392870
  MOD_RES (1)..(1): Any amino acid
XYMFLVKWQDLSEKVVYRRFTEIYEFHKTLKEMFPIEAGAINPENRIIPHLPAPKWFDGQRAAENRQGTLTEYCSTLMSLPTKISRCPHLLDFFKVRPDDLKLPTDNQAPEGGRGRAQWLTRIIPALWKVEDKKARDILDAQRWQEYRDRHHRPHHPADVPRH

SEQ ID NO: 56731 - protein, 146 aa, Homo sapiens
  Payload ID: 11153
  Gene Symbol: NCF1
  Gene Name: neutrophil cytosolic factor 1
  ENSP ID: ENSP00000401935
  MOD_RES (1)..(1): Any amino acid
XYMFLVKWQDLSEKVVYRRFTEIYEFHRWDFAMLPRLVSNSWTQVILPPQPPKLLGLQKTLKEMFPIEAGAINPENRIIPHLPAPKWFDGQRAAENRQGTLTEYCSTLMSLPTKISRCPHLLDFFKVRPDDLKLPTDNQTKKPETY

SEQ ID NO: 56732 - protein, 52 aa, Homo sapiens
  Payload ID: 11153
  Gene Symbol: NCF1
  Gene Name: neutrophil cytosolic factor 1
  ENSP ID: ENSP00000484502
  MOD_RES (1)..(1): Any amino acid
XYMFLVKWQDLSEKVVYRRFTEIYEFHLPSGLTGSGPPRTARAHLPSTAARS

SEQ ID NO: 56733 - protein, 526 aa, Homo sapiens
  Payload ID: 11154
  Gene Symbol: NCF2
  Gene Name: neutrophil cytosolic factor 2
  Uniprot ID: P19878
  ENSP ID: ENSP00000356505
MSLVEAISLWNEGVLAADKKDWKGALDAFSAVQDPHSRICFNIGCMYTILKNMTEAEKAFTRSINRDKHLAVAYFQRGMLYYQTEKYDLAIKDLKEALIQLRGNQLIDYKILGLQFKLFACEVLYNIAFMYAKKEEWKKAEEQLALATSMKSEPRHSKIDKAMECVWKQKLYEPVVIPVGKLFRPNERQVAQLAKKDYLGKATVVASVVDQDSFSGFAPLQPQAAEPPPRPKTPEIFRALEGEAHRVLFGFVPETKEELQVMPGNIVFVLKKGNDNWATVMFNGQKGLVPCNYLEPVELRIHPQQQPQEESSPQSDIPAPPSSKAPGRPQLSPGQKQKEEPKEVKLSVPMPYTLKVHYKYTVVMKTQPGLPYSQVRDMVSKKLELRLEHTKLSYRPRDSNELVPLSEDSMKDAWGQVKNYCLTLWCENTVGDQGFPDEPKESEKADANNQTTEPQLKKGSQVEALFSYEATQPEDLEFQEGDIILVLSKVNEEWLEGECKGKVGIFPKVFVEDCATTDLESTRREV

SEQ ID NO: 56734 - protein, 526 aa, Homo sapiens; identical to SEQ ID NO: 56733
  Payload ID: 11154
  Gene Symbol: NCF2
  Gene Name: neutrophil cytosolic factor 2
  Uniprot ID: P19878
  ENSP ID: ENSP00000356506

SEQ ID NO: 56735 - protein, 56 aa, Homo sapiens
  Payload ID: 11154
  Gene Symbol: NCF2
  Gene Name: neutrophil cytosolic factor 2
  ENSP ID: ENSP00000397228
MPYTLKVHYKYTVVMKTQPGLPYSQVRDMVSKKLELRLEHTKLSYRPRDSNELVPL

SEQ ID NO: 56736 - protein, 481 aa, Homo sapiens
  Payload ID: 11154
  Gene Symbol: NCF2
  Gene Name: neutrophil cytosolic factor 2
  Uniprot ID: P19878
  ENSP ID: ENSP00000399294
MSLVEAISLWNEGVLAADKKDWKGALDAFSAVQDPHSRICFNIGCMYTILKNMTEAEKAFTRSINRDKHLAVAYFQRGMLYYQTEKYDLAIKDLKEALIQLRGNQLIDYKILGLQFKLFACEKQKLYEPVVIPVGKLFRPNERQVAQLAKKDYLGKATVVASVVDQDSFSGFAPLQPQAAEPPPRPKTPEIFRALEGEAHRVLFGFVPETKEELQVMPGNIVFVLKKGNDNWATVMFNGQKGLVPCNYLEPVELRIHPQQQPQEESSPQSDIPAPPSSKAPGRPQLSPGQKQKEEPKEVKLSVPMPYTLKVHYKYTVVMKTQPGLPYSQVRDMVSKKLELRLEHTKLSYRPRDSNELVPLSEDSMKDAWGQVKNYCLTLWCENTVGDQGFPDEPKESEKADANNQTTEPQLKKGSQVEALFSYEATQPEDLEFQEGDIILVLSKVNEEWLEGECKGKVGIFPKVFVEDCATTDLESTRREV

SEQ ID NO: 56737 - protein, 143 aa, Homo sapiens
  Payload ID: 11154
  Gene Symbol: NCF2
  Gene Name: neutrophil cytosolic factor 2
  ENSP ID: ENSP00000406198
MPGNIVFVLKKGNDNWATVMFNGQKGLVPCNYLEPVELRIHPQQQPQEESSPQSDIPAPPSSKAPGRPQLSPGQKQKEEPKEVKLSVPMPYTLKVHYKYTVVMKTQPGLPYSQVRDMVSKKLELRLEHTKLSYRPRDSNELVP

SEQ ID NO: 56738 - protein, 445 aa, Homo sapiens
  Payload ID: 11154
  Gene Symbol: NCF2
  Gene Name: neutrophil cytosolic factor 2
  Uniprot ID: P19878
  ENSP ID: ENSP00000407217
MSLVEAISLWNEGVLAADKKDWKGALDAFSAVQDPHSRICFNIGCMYTILKNMTEAEKAFTRSINRDKHLAVAYFQRGMLYYQTEKYDLAIKDLKEALIQLRGNQLIDYKILGLQFKLFACEVVASVVDQDSFSGFAPLQPQAAEPPPRPKTPEIFRALEGEAHRVLFGFVPETKEELQVMPGNIVFVLKKGNDNWATVMFNGQKGLVPCNYLEPVELRIHPQQQPQEESSPQSDIPAPPSSKAPGRPQLSPGQKQKEEPKEVKLSVPMPYTLKVHYKYTVVMKTQPGLPYSQVRDMVSKKLELRLEHTKLSYRPRDSNELVPLSEDSMKDAWGQVKNYCLTLWCENTVGDQGFPDEPKESEKADANNQTTEPQLKKGSQVEALFSYEATQPEDLEFQEGDIILVLSKVNEEWLEGECKGKVGIFPKVFVEDCATTDLESTRREV

SEQ ID NO: 56739 - protein, 339 aa, Homo sapiens
  Payload ID: 11155
  Gene Symbol: NCF4
  Gene Name: neutrophil cytosolic factor 4, 40kDa
  Uniprot ID: Q15080
  ENSP ID: ENSP00000248899
MAVAQQLRAESDFEQLPDDVAISANIADIEEKRGFTSHFVFVIEVKTKGGSKYLIYRRYRQFHALQSKLEERFGPDSKSSALACTLPTLPAKVYVGVKQEIAEMRIPALNAYMKSLLSLPVWVLMDEDVRIFFYQSPYDSEQVPQALRRLRPRTRKVKSVSPQGNSVDRMAAPRAEALFDFTGNSKLELNFKAGDVIFLLSRINKDWLEGTVRGATGIFPLSFVKILKDFPEEDDPTNWLRCYYYEDTISTIKDIAVEEDLSSTPLLKDLLELTRREFQREDIALNYRDAEGDLVRLLSDEDVALMVRQARGLPSQKRLFPWKLHITQKDNYRVYNTMP

SEQ ID NO: 56740 - protein, 348 aa, Homo sapiens
  Payload ID: 11155
  Gene Symbol: NCF4
  Gene Name: neutrophil cytosolic factor 4, 40kDa
  Uniprot ID: Q15080
  ENSP ID: ENSP00000380334
MAVAQQLRAESDFEQLPDDVAISANIADIEEKRGFTSHFVFVIEVKTKGGSKYLIYRRYRQFHALQSKLEERFGPDSKSSALACTLPTLPAKVYVGVKQEIAEMRIPALNAYMKSLLSLPVWVLMDEDVRIFFYQSPYDSEQVPQALRRLRPRTRKVKSVSPQGNSVDRMAAPRAEALFDFTGNSKLELNFKAGDVIFLLSRINKDWLEGTVRGATGIFPLSFVKILKDFPEEDDPTNWLRCYYYEDTISTIKSVAWEGGACPAFLPSLRPLPLTSPSHGSLSHSKAPSGSQMSHNAVTSHQRPGWPGQPHSPFPHPTPHFQPDASLLQPVTPLGTSRWRKISAALPY

SEQ ID NO: 56741 - protein, 166 aa, Homo sapiens
  Payload ID: 11155
  Gene Symbol: NCF4
  Gene Name: neutrophil cytosolic factor 4, 40kDa
  ENSP ID: ENSP00000414958
MRIPALNAYMKSLLSLPVWVLMDEDVRIFFYQSPYDSEQVPQALRRLRPRTRKVKSVSPQGNSVDRMAAPRAEALFDFTGNSKLELNFKAGDVIFLLSRINKDWLEGTVRGATGIFPLSFVKILKDFPEEDDPTNWLRCYYYEDTISTIKSVAWEGGACPAFLPSL

SEQ ID NO: 56742 - protein, 348 aa, Homo sapiens
  Payload ID: 11155
  Gene Symbol: NCF4
  Gene Name: neutrophil cytosolic factor 4, 40kDa
  Uniprot ID: Q15080
  ENSP ID: ENSP00000483977
MAVAQQLRAESDFEQLPDDVAISANIADIEEKRGFTSHFVFVIEVKTKGGSKYLIYRRYRQFHALQSKLEERFGPDSKSSALACTLPTLPAKVYVGVKQEIAEMRIPALNAYMKSLLSLPVWVLMDEDVRIFFYQSPYDSEQVPQALRRLRPRTRKVKSVSPQGNSVDRMAAPRAEALFDFTGNSKLELNFKAGDVIFLLSRINKDWLEGTVRGATGIFPLSFVKILKDFPEEDDPTNWLRCYYYEDTISTIKSVAWEGGACPAFLPSLRPPPLTSPSHGSLSHSKAPSGSQMSHNAVTSHQRPGWPGQPHSPFPHPTPHFQPDASLLQPVTPLGTSRWRKISAALPY

SEQ ID NO: 56743 - protein, 300 aa, Homo sapiens
  Payload ID: 11155
  Gene Symbol: NCF4
  Gene Name: neutrophil cytosolic factor 4, 40kDa
  ENSP ID: ENSP00000486446
MAVAQQLRAESDFEQLPDDVAISANIADIEEKRGFTSHFVFVIEVKTKGGSKYLIYRRYRQFHALQSKLEERFGPDSKSSALACTLPTLPAKVYVGVKQEIAEMRIPALNAYMKSLLSLPVWVLMDEDVRIFFYQSPYDSEQVPQALRRLRPRTRKVKSVSPQGNSVDRMAAPRAEALFDFTGNSKLELNFKAGDVIFLLSRINKDWLEGTVRGATGIFPLSFVKILKDFPEEDDPTNWLRCYYYEDTISTIKDIAVEEDLSSTPLLKDLLELTRREFQREDIALNYRDAEGDLVRLLSD

SEQ ID NO: 56744 - protein, 348 aa, Homo sapiens; identical to SEQ ID NO: 56742
  Payload ID: 11155
  Gene Symbol: NCF4
  Gene Name: neutrophil cytosolic factor 4, 40kDa
  Uniprot ID: Q15080
  ENSP ID: ENSP00000486471

SEQ ID NO: 56745 - protein, 166 aa, Homo sapiens; identical to SEQ ID NO: 56741
  Payload ID: 11155
  Gene Symbol: NCF4
  Gene Name: neutrophil cytosolic factor 4, 40kDa
  ENSP ID: ENSP00000486744

SEQ ID NO: 56746 - protein, 611 aa, Homo sapiens
  Payload ID: 11156
  Gene Symbol: NEXN
  Gene Name: nexilin (F actin binding protein)
  Uniprot ID: Q0ZGT2
  ENSP ID: ENSP00000327363
MNDISQKAEIKEMLASDDEEDVSSKVEKAYVPKLTGTVKGRFAEMEKQRQEEQRKRTEEERKRRIEQDMLEKRKIQRELAKRAEQIEDINNTGTESASEEGDDSLLITVVPVKSYKTSGKMKKNFEDLEKEREEKERIKYEEDKRIRYEEQRPSLKEAKCLSLVMDDEIESEAKKESLSPGKLKLTFEELERQRQENRKKQAEEEARKRLEEEKRAFEEARRQMVNEDEENQDTAKIFKGYRPGKLKLSFEEMERQRREDEKRKAEEEARRRIEEEKKAFAEARRNMVVDDDSPEMYKTISQEFLTPGKLEINFEELLKQKMEEEKRRTEEERKHKLEMEKQEFEQLRQEMGEEEEENETFGLSREYEELIKLKRSGSIQAKNLKSKFEKIGQLSEKEIQKKIEEERARRRAIDLEIKEREAENFHEEDDVDVRPARKSEAPFTHKVNMKARFEQMAKAREEEEQRRIEEQKLLRMQFEQREIDAALQKKREEEEEEEGSIMNGSTAEDEEQTRSGAPWFKKPLKNTSVVDSEPVRFTVKVTGEPKPEITWWFEGEILQDGEDYQYIERGETYCLYLPETFPEDGGEYMCKAVNNKGSAASTCILTIESKN

SEQ ID NO: 56747 - protein, 675 aa, Homo sapiens
  Payload ID: 11156
  Gene Symbol: NEXN
  Gene Name: nexilin (F actin binding protein)
  Uniprot ID: Q0ZGT2
  ENSP ID: ENSP00000333938
MNDISQKAEILLSSSKPVPKTYVPKLGKGDVKDKFEAMQRAREERNQRRSRDEKQRRKEQYIREREWNRRKQEIKEMLASDDEEDVSSKVEKAYVPKLTGTVKGRFAEMEKQRQEEQRKRTEEERKRRIEQDMLEKRKIQRELAKRAEQIEDINNTGTESASEEGDDSLLITVVPVKSYKTSGKMKKNFEDLEKEREEKERIKYEEDKRIRYEEQRPSLKEAKCLSLVMDDEIESEAKKESLSPGKLKLTFEELERQRQENRKKQAEEEARKRLEEEKRAFEEARRQMVNEDEENQDTAKIFKGYRPGKLKLSFEEMERQRREDEKRKAEEEARRRIEEEKKAFAEARRNMVVDDDSPEMYKTISQEFLTPGKLEINFEELLKQKMEEEKRRTEEERKHKLEMEKQEFEQLRQEMGEEEEENETFGLSREYEELIKLKRSGSIQAKNLKSKFEKIGQLSEKEIQKKIEEERARRRAIDLEIKEREAENFHEEDDVDVRPARKSEAPFTHKVNMKARFEQMAKAREEEEQRRIEEQKLLRMQFEQREIDAALQKKREEEEEEEGSIMNGSTAEDEEQTRSGAPWFKKPLKNTSVVDSEPVRFTVKVTGEPKPEITWWFEGEILQDGEDYQYIERGETYCLYLPETFPEDGGEYMCKAVNNKGSAASTCILTIESKN

SEQ ID NO: 56748 - protein, 576 aa, Homo sapiens
  Payload ID: 11156
  Gene Symbol: NEXN
  Gene Name: nexilin (F actin binding protein)
  ENSP ID: ENSP00000343928
  MOD_RES (1)..(1): Any amino acid
XVKGRFAEMEKQRQEEQRKRTEEERKRRIEQDMLEKRKIQRELAKRAEQIEDINNTGTESASEEGDDSLLITVVPVKSYKTSGKMKKNFEDLEKEREEKERIKYEEDKRIRYEEQRPSLKEAKCLSLVMDDEIESEAKKESLSPGKLKLTFEELERQRQENRKKQAEEEARKRLEEEKRAFEEARRQMVNEDEENQDTAKIFKGYRPGKLKLSFEEMERQRREDEKRKAEEEARRRIEEEKKAFAEARRNMVVDDDSPEMYKTISQEFLTPGKLEINFEELLKQKMEEEKRRTEEERKHKLEMEKQEFEQLRQEMGEEEEENETFGLSREYEELIKLKRSGSIQAKNLKSKFEKIGQLSEKEIQKKIEEERARRRAIDLEIKEREAENFHEEDDVDVRPARKSEAPFTHKVNMKARFEQMAKAREEEEQRRIEEQKLLRMQFEQREIDAALQKKREEEEEEEGSIMNGSTAEDEEQTRSGAPWFKKPLKNTSVVDSEPVRFTVKVTGEPKPEITWWFEGEILQDGEDYQYIERGETYCLYLPETFPEDGGEYMCKAVNNKGSAASTCILTIETDDY

SEQ ID NO: 56749 - protein, 321 aa, Homo sapiens
  Payload ID: 11156
  Gene Symbol: NEXN
  Gene Name: nexilin (F actin binding protein)
  ENSP ID: ENSP00000383814
MNDISQKAEIKEMLASDDEEDVSSKVEKAYVPKLTGTVKGRFAEMEKQRQEEQRKRTEEERKRRIEQDMLEKRKIQRELAKRAEQIEDINNTGTESASEEGDDSLLITVVPVKSYKTSGKMKKNFEDLEKEREEKERIKYEEDKRIRYEEQRPSLKEAKCLSLVMDDEIESEAKKESLSPGKLKLTFEELERQRQENRKKQAEEEARKRLEEEKRAFEEARRQMVNEDEENQDTAKIFKGYRPGKLKLSFEEMERQRREDEKRKAEEEARRRIEEEKKAFAEARRNMVVDDDSPEMYKTISQEFLTPGKLEINFEELLKQK

SEQ ID NO: 56750 - protein, 435 aa, Homo sapiens
  Payload ID: 11156
  Gene Symbol: NEXN
  Gene Name: nexilin (F actin binding protein)
  ENSP ID: ENSP00000411902
MNDISQKAEILLSSSKPVPKTYVPKLGKGDVKDKFEAMQRAREERNQRRSRDEKQRRKEQYIREREWNRRKQEIKEMLASDDEEDVSSKVEKAYVPKLTGTVKGRFAEMEKQRQEEQRKRTEEERKRRIEQDMLEKRKIQRELAKRAEQEGDDSLLITVVPVKSYKTSGKMKKNFEDLEKEREEKERIKYEEDKRIRYEEQRPSLKEAKCLSLVMDDEIESEAKKESLSPGKLKLTFEELERQRQENRKKQAEEEARKRLEEEKRAFEEARRQMVNEDEENQDTAKIFKGYRPGKLKLSFEEMERQRREDEKRKAEEEARRRIEEEKKAFAEARRNMVVDDDSPEMYKTISQEFLTPGKLEINFEELLKQKMEEEKRRTEEERKHKLEMEKQEFEQLRQEMGEEEEENETFGLSREYEELIKLKRSGSIQAKNLK

SEQ ID NO: 56751 - protein, 270 aa, Homo sapiens
  Payload ID: 11157
  Gene Symbol: NFAM1
  Gene Name: NFAT activating protein with ITAM motif 1
  Uniprot ID: Q8NET5
  ENSP ID: ENSP00000333680
MENQPVRWRALPGLPRPPGLPAAPWLLLGVLLLPGTLRLAGGQSVTHTGLPIMASLANTAISFSCRITYPYTPQFKVFTVSYFHEDLQGQRSPKKPTNCHPGLGTENQSHTLDCQVTLVLPGASATGTYYCSVHWPHSTVRGSGTFILVRDAGYREPPQSPQKLLLFGFTGLLSVLSVVGTALLLWNKKRMRGPGKDPTRKCPDPRSASSPKQHPSESVYTALQRRETEVYACIENEDGSSPTAKQSPLSQERPHRFEDDGELNLVYENL

SEQ ID NO: 56752 - protein, 164 aa, Homo sapiens
  Payload ID: 11157
  Gene Symbol: NFAM1
  Gene Name: NFAT activating protein with ITAM motif 1
  ENSP ID: ENSP00000347650
MENQPVRWRALPGLPRPPGLPAAPWLLLGVLLLPGTLRLAGGQSVTHTGLPIMASLANTAISFSCRITYPYTPQFKVFTVSYFHEDLQGQRSPKKPTNCHPGLGTENQSHTLDCQVTLVLPGASATGTYYCSVHWPHSTVRGSGTFILVRETRFRHVGQAGLES

SEQ ID NO: 56753 - protein, 415 aa, Homo sapiens
  Payload ID: 11158
  Gene Symbol: NKAP
  Gene Name: NFKB activating protein
  Uniprot ID: Q8N5F7
  ENSP ID: ENSP00000360464
MAPVSGSRSPDREASGSGGRRRSSSKSPKPSKSARSPRGRRSRSHSCSRSGDRNGLTHQLGGLSQGSRNQSYRSRSRSRSRERPSAPRGIPFASASSSVYYGSYSRPYGSDKPWPSLLDKEREESLRQKRLSERERIGELGAPEVWGLSPKNPEPDSDEHTPVEDEEPKKSTTSASTSEEEKKKKSSRSKERSKKRRKKKSSKRKHKKYSEDSDSDSDSETDSSDEDNKRRAKKAKKKEKKKKHRSKKYKKKRSKKSRKESSDSSSKESQEEFLENPWKDRTKAEEPSDLIGPEAPKTLTSQDDKPLNYGHALLPGEGAAMAEYVKAGKRIPRRGEIGLTSEEIASFECSGYVMSGSRHRRMEAVRLRKENQIYSADEKRALASFNQEERRKRENKILASFREMVYRKTKGKDDK

SEQ ID NO: 56754 - protein, 402 aa, Homo sapiens
  Payload ID: 11159
  Gene Symbol: NKAPL
  Gene Name: NFKB activating protein-like
  Uniprot ID: Q5M9Q1
  ENSP ID: ENSP00000345716
MPPVSRSSYSEDIVGSRRRRRSSSGSPPSPQSRCSSWDGCSRSHSRGREGLRPPWSELDVGALYPFSRSGSRGRLPRFRNYAFASSWSTSYSGYRYHRHCYAEERQSAEDYEKEESHRQRRLKERERIGELGAPEVWGPSPKFPQLDSDEHTPVEDEEEVTHQKSSSSDSNSEEHRKKKTSRSRNKKKRKNKSSKRKHRKYSDSDSNSESDTNSDSDDDKKRVKAKKKKKKKKHKTKKKKNKKTKKESSDSSCKDSEEDLSEATWMEQPNVADTMDLIGPEAPIIHTSQDEKPLKYGHALLPGEGAAMAEYVKAGKRIPRRGEIGLTSEEIGSFECSGYVMSGSRHRRMEAVRLRKENQIYSADEKRALASFNQEERRKRESKILASFREMVHKKTKEKDDK

SEQ ID NO: 56755 - protein, 192 aa, Homo sapiens
  Payload ID: 11160
  Gene Symbol: NKIRAS1
  Gene Name: NFKB inhibitor interacting Ras-like 1
  Uniprot ID: Q9NYS0
  ENSP ID: ENSP00000373411
MGKGCKVVVCGLLSVGKTAILEQLLYGNHTIGMEDCETMEDVYMASVETDRGVKEQLHLYDTRGLQEGVELPKHYFSFADGFVLVYSVNNLESFQRVELLKKEIDKFKDKKEVAIVVLGNKIDLSEQRQVDAEVAQQWAKSEKVRLWEVTVTDRKTLIEPFTLLASKLSQPQSKSSFPLPGRKNKGNSNSEN

SEQ ID NO: 56756 - protein, 192 aa, Homo sapiens; identical to SEQ ID NO: 56755
  Payload ID: 11160
  Gene Symbol: NKIRAS1
  Gene Name: NFKB inhibitor interacting Ras-like 1
  Uniprot ID: Q9NYS0
  ENSP ID: ENSP00000392307

SEQ ID NO: 56757 - protein, 192 aa, Homo sapiens; identical to SEQ ID NO: 56755
  Payload ID: 11160
  Gene Symbol: NKIRAS1
  Gene Name: NFKB inhibitor interacting Ras-like 1
  Uniprot ID: Q9NYS0
  ENSP ID: ENSP00000393785

SEQ ID NO: 56758 - protein, 192 aa, Homo sapiens; identical to SEQ ID NO: 56755
  Payload ID: 11160
  Gene Symbol: NKIRAS1
  Gene Name: NFKB inhibitor interacting Ras-like 1
  Uniprot ID: Q9NYS0
  ENSP ID: ENSP00000394214

SEQ ID NO: 56759 - protein, 192 aa, Homo sapiens
  Payload ID: 11160
  Gene Symbol: NKIRAS1
  Gene Name: NFKB inhibitor interacting Ras-like 1
  ENSP ID: ENSP00000396063
MGKGCKVVVCGLLSVGKTAILEQLLYGNHTIGMEDCETMEDVYMASVETDRGVKEQLHLYDTRGLQEGVELPKHYFSFADGFVLVYSVNNLESFQRVELLKKEIDKFKDKKEATIVVLGNKIDLSEQRQVDAEVAQQWAKSEKVRLWEVTVTDRKTLIEPFTLLASKLSQPQSKSSFPLPGRKNKGNSNSEN

SEQ ID NO: 56760 - protein, 192 aa, Homo sapiens; identical to SEQ ID NO: 56755
  Payload ID: 11160
  Gene Symbol: NKIRAS1
  Gene Name: NFKB inhibitor interacting Ras-like 1
  Uniprot ID: Q9NYS0
  ENSP ID: ENSP00000400385

SEQ ID NO: 56761 - protein, 192 aa, Homo sapiens; identical to SEQ ID NO: 56759
  Payload ID: 11160
  Gene Symbol: NKIRAS1
  Gene Name: NFKB inhibitor interacting Ras-like 1
  ENSP ID: ENSP00000406543

SEQ ID NO: 56762 - protein, 192 aa, Homo sapiens; identical to SEQ ID NO: 56759
  Payload ID: 11160
  Gene Symbol: NKIRAS1
  Gene Name: NFKB inhibitor interacting Ras-like 1
  ENSP ID: ENSP00000415225

SEQ ID NO: 56763 - protein, 192 aa, Homo sapiens; identical to SEQ ID NO: 56755
  Payload ID: 11160
  Gene Symbol: NKIRAS1
  Gene Name: NFKB inhibitor interacting Ras-like 1
  Uniprot ID: Q9NYS0
  ENSP ID: ENSP00000483749

SEQ ID NO: 56764 - protein, 191 aa, Homo sapiens
  Payload ID: 11161
  Gene Symbol: NKIRAS2
  Gene Name: NFKB inhibitor interacting Ras-like 2
  Uniprot ID: Q9NYR9
  ENSP ID: ENSP00000303580
MGKSCKVVVCGQASVGKTSILEQLLYGNHVVGSEMIETQEDIYVGSIETDRGVREQVRFYDTRGLRDGAELPRHCFSCTDGYVLVYSTDSRESFQRVELLKKEIDKSKDKKEVTIVVLGNKCDLQEQRRVDPDVAQHWAKSEKVKLWEVSVADRRSLLEPFVYLASKMTQPQSKSAFPLSRKNKGSGSLDG

SEQ ID NO: 56765 - protein, 229 aa, Homo sapiens
  Payload ID: 11161
  Gene Symbol: NKIRAS2
  Gene Name: NFKB inhibitor interacting Ras-like 2
  ENSP ID: ENSP00000312773
MGKSCKVVVCGQASVGKTSILEQLLYGNHVVGSEMIETQEDIYVGSIETDRGVREQVRFYDTRGLRDGAELPRHCFSCTDGYVLVYSTDSRESFQRVELLKKEIDKSKDKKEGLTLPPRLECSGMITAHCSLNLPRLRWSSCLSPLLRLQVTIVVLGNKCDLQEQRRVDPDVAQHWAKSEKVKLWEVSVADRRSLLEPFVYLASKMTQPQSKSAFPLSRKNKGSGSLDG

SEQ ID NO: 56766 - protein, 191 aa, Homo sapiens; identical to SEQ ID NO: 56764
  Payload ID: 11161
  Gene Symbol: NKIRAS2
  Gene Name: NFKB inhibitor interacting Ras-like 2
  Uniprot ID: Q9NYR9
  ENSP ID: ENSP00000377458

SEQ ID NO: 56767 - protein, 191 aa, Homo sapiens; identical to SEQ ID NO: 56764
  Payload ID: 11161
  Gene Symbol: NKIRAS2
  Gene Name: NFKB inhibitor interacting Ras-like 2
  Uniprot ID: Q9NYR9
  ENSP ID: ENSP00000377459

SEQ ID NO: 56768 - protein, 191 aa, Homo sapiens; identical to SEQ ID NO: 56764
  Payload ID: 11161
  Gene Symbol: NKIRAS2
  Gene Name: NFKB inhibitor interacting Ras-like 2
  Uniprot ID: Q9NYR9
  ENSP ID: ENSP00000377463

SEQ ID NO: 56769 - protein, 135 aa, Homo sapiens
  Payload ID: 11161
  Gene Symbol: NKIRAS2
  Gene Name: NFKB inhibitor interacting Ras-like 2
  Uniprot ID: Q9NYR9
  ENSP ID: ENSP00000401976
MGKSCKVVVCGQASVGKTSILEQLLYGNHVVGSEMIETQEDIYVGSIETDRGVREQVTIVVLGNKCDLQEQRRVDPDVAQHWAKSEKVKLWEVSVADRRSLLEPFVYLASKMTQPQSKSAFPLSRKNKGSGSLDG

SEQ ID NO: 56770 - protein, 41 aa, Homo sapiens
  Payload ID: 11161
  Gene Symbol: NKIRAS2
  Gene Name: NFKB inhibitor interacting Ras-like 2
  ENSP ID: ENSP00000419929
MGKSCKVVVCGQASVGKTSILEQLLYGNHVVGHHRGPWQQV

SEQ ID NO: 56771 - protein, 42 aa, Homo sapiens
  Payload ID: 11161
  Gene Symbol: NKIRAS2
  Gene Name: NFKB inhibitor interacting Ras-like 2
  ENSP ID: ENSP00000465588
MGKSCKVVVCGQASVGKTSILEQLLYGNHVVDSFLILYQVRR

SEQ ID NO: 56772 - protein, 97 aa, Homo sapiens
  Payload ID: 11161
  Gene Symbol: NKIRAS2
  Gene Name: NFKB inhibitor interacting Ras-like 2
  Uniprot ID: Q9NYR9
  ENSP ID: ENSP00000465633
MGKSCKVVVCGQASVGKTSILEQLLYGNHVVGSEMIETQEDIYVGSIETDRGVREQIAESLFSVWSCSRRRLTNPRTRRRSPSWSLATSVTYRSSGV

SEQ ID NO: 56773 - protein, 58 aa, Homo sapiens
  Payload ID: 11161
  Gene Symbol: NKIRAS2
  Gene Name: NFKB inhibitor interacting Ras-like 2
  ENSP ID: ENSP00000466135
MGKSCKVVVCGQASVGKTSILEQLLYGNHVVGSEMIETQEDIYVGSIETDRGVREQHR

SEQ ID NO: 56774 - protein, 46 aa, Homo sapiens
  Payload ID: 11161
  Gene Symbol: NKIRAS2
  Gene Name: NFKB inhibitor interacting Ras-like 2
  ENSP ID: ENSP00000468081
MGKSCKVVVCGQASVGKTSILEQLLYGNHVVGSEMIETQEDIYVGS

SEQ ID NO: 56775 - protein, 140 aa, Homo sapiens
  Payload ID: 11161
  Gene Symbol: NKIRAS2
  Gene Name: NFKB inhibitor interacting Ras-like 2
  ENSP ID: ENSP00000468245
MIETQEDIYVGSIETDRGVREQVRFYDTRGLRDGAELPRHCFSCTDGYVLVYSTDSRESFQRVELLKKEIDKSKDKKEVTIVVLGNKCDLQEQRRVDPDVAQHWAKSEKVKLWEVSVADRRSLLEPFVYLASKMTQPQSK

SEQ ID NO: 56776 - protein, 690 aa, Homo sapiens
  Payload ID: 11162
  Gene Symbol: NKRF
  Gene Name: NFKB repressing factor
  Uniprot ID: O15226
  ENSP ID: ENSP00000304803
MEKILQMAEGIDIGEMPSYDLVLSKPSKGQKRHLSTCDGQNPPKKQAGSKFHARPRFEPVHFVASSSKDERQEDPYGPQTKEVNEQTHFASMPRDIYQDYTQDSFSIQDGNSQYCDSSGFILTKDQPVTANMYFDSGNPAPSTTSQQANSQSTPEPSPSQTFPESVVAEKQYFIEKLTATIWKNLSNPEMTSGSDKINYTYMLTRCIQACKTNPEYIYAPLKEIPPADIPKNKKLLTDGYACEVRCQNIYLTTGYAGSKNGSRDRATELAVKLLQKRIEVRVVRRKFKHTFGEDLVVCQIGMSSYEFPPALKPPEDLVVLGKDASGQPIFNASAKHWTNFVITENANDAIGILNNSASFNKMSIEYKYEMMPNRTWRCRVFLQDHCLAEGYGTKKTSKHAAADEALKILQKTQPTYPSVKSSQCHTGSSPRGSGKKKDIKDLVVYENSSNPVCTLNDTAQFNRMTVEYVYERMTGLRWKCKVILESEVIAEAVGVKKTVKYEAAGEAVKTLKKTQPTVINNLKKGAVEDVISRNEIQGRSAEEAYKQQIKEDNIGNQLLRKMGWTGGGLGKSGEGIREPISVKEQHKREGLGLDVERVNKIAKRDIEQIIRNYARSESHTDLTFSRELTNDERKQIHQIAQKYGLKSKSHGVGHDRYLVVGRKRRKEDLLDQLKQEGQVGHYELVMPQAN

SEQ ID NO: 56777 - protein, 690 aa, Homo sapiens; identical to SEQ ID NO: 56776
  Payload ID: 11162
  Gene Symbol: NKRF
  Gene Name: NFKB repressing factor
  Uniprot ID: O15226
  ENSP ID: ENSP00000360582

SEQ ID NO: 56778 - protein, 705 aa, Homo sapiens
  Payload ID: 11162
  Gene Symbol: NKRF
  Gene Name: NFKB repressing factor
  Uniprot ID: O15226
  ENSP ID: ENSP00000442308
MGFMLPLIFRYSPRLMEKILQMAEGIDIGEMPSYDLVLSKPSKGQKRHLSTCDGQNPPKKQAGSKFHARPRFEPVHFVASSSKDERQEDPYGPQTKEVNEQTHFASMPRDIYQDYTQDSFSIQDGNSQYCDSSGFILTKDQPVTANMYFDSGNPAPSTTSQQANSQSTPEPSPSQTFPESVVAEKQYFIEKLTATIWKNLSNPEMTSGSDKINYTYMLTRCIQACKTNPEYIYAPLKEIPPADIPKNKKLLTDGYACEVRCQNIYLTTGYAGSKNGSRDRATELAVKLLQKRIEVRVVRRKFKHTFGEDLVVCQIGMSSYEFPPALKPPEDLVVLGKDASGQPIFNASAKHWTNFVITENANDAIGILNNSASFNKMSIEYKYEMMPNRTWRCRVFLQDHCLAEGYGTKKTSKHAAADEALKILQKTQPTYPSVKSSQCHTGSSPRGSGKKKDIKDLVVYENSSNPVCTLNDTAQFNRMTVEYVYERMTGLRWKCKVILESEVIAEAVGVKKTVKYEAAGEAVKTLKKTQPTVINNLKKGAVEDVISRNEIQGRSAEEAYKQQIKEDNIGNQLLRKMGWTGGGLGKSGEGIREPISVKEQHKREGLGLDVERVNKIAKRDIEQIIRNYARSESHTDLTFSRELTNDERKQIHQIAQKYGLKSKSHGVGHDRYLVVGRKRRKEDLLDQLKQEGQVGHYELVMPQAN

SEQ ID NO: 56779 - protein, 387 aa, Homo sapiens
  Payload ID: 11162
  Gene Symbol: NKRF
  Gene Name: NFKB repressing factor
  ENSP ID: ENSP00000481262
MEKILQMAEGIDIGEMPSYDLVLSKPSKGQKRHLSTCDGQNPPKKQAGSKFHARPRFEPVHFVASSSKDERQEDPYGPQTKEVNEQTHFASMPRDIYQDYTQDSFSIQDGNSQYCDSSGFILTKDQPVTANMYFDSGNPAPSTTSQQANSQSTPEPSPSQTFPESVVAEKQYFIEKLTATIWKNLSNPEMTSGSDKINYTYMLTRCIQACKTNPEYIYAPLKEIPPADIPKNKKLLTDGYACEVRCQNIYLTTGYAGSKNGSRDRATELAVKLLQKRIEVRVVRRKFKHTFGEDLVVCQIGMSSYEFPPALKPPEDLVVLGKDASGQPIFNASAKHWTNFVITENANDAIGILNNSASFNKMSIEYKYEMMPNRTWRSSVFTRSLLS

SEQ ID NO: 56780 - protein, 189 aa, Homo sapiens
  Payload ID: 11163
  Gene Symbol: NFS1
  Gene Name: NFS1 cysteine desulfurase
  ENSP ID: ENSP00000304740
MLLRAAWRRAAVAVTAAPGPKPAAPTRGLRLRVGDRAPQSAVPADTAAAPEVGPVLRPLYMDVQATTPLDPRVLDAMLPYLINYYGNPHSRTHAYGWESEAAMERARQQVASLIGADPREIIFTSGATESNNIAIKTESHSVIQAGVQWHDLDSLQAPPPGFTPFSCLSLLSSWDYRRPPPHPANFLYF

SEQ ID NO: 56781 - protein, 397 aa, Homo sapiens
  Payload ID: 11163
  Gene Symbol: NFS1
  Gene Name: NFS1 cysteine desulfurase
  Uniprot ID: Q9Y697
  ENSP ID: ENSP00000363198
MDVQATTPLDPRVLDAMLPYLINYYGNPHSRTHAYGWESEAAMERARQQVASLIGADPREIIFTSGATESNNIAIKGVARFYRSRKKHLITTQTEHKCVLDSCRSLEAEGFQVTYLPVQKSGIIDLKELEAAIQPDTSLVSVMTVNNEIGVKQPIAEIGRICSSRKVYFHTDAAQAVGKIPLDVNDMKIDLMSISGHKIYGPKGVGAIYIRRRPRVRVEALQSGGGQERGMRSGTVPTPLVVGLGAACEVAQQEMEYDHKRISKLSERLIQNIMKSLPDVVMNGDPKHHYPGCINLSFAYVEGESLLMALKDVALSSGSACTSASLEPSYVLRAIGTDEDLAHSSIRFGIGRFTTEEEVDYTVEKCIQHVKRLREMSPLWEMVQDGIDLKSIKWTQH

SEQ ID NO: 56782 - protein, 457 aa, Homo sapiens
  Payload ID: 11163
  Gene Symbol: NFS1
  Gene Name: NFS1 cysteine desulfurase
  Uniprot ID: Q9Y697
  ENSP ID: ENSP00000363205
MLLRAAWRRAAVAVTAAPGPKPAAPTRGLRLRVGDRAPQSAVPADTAAAPEVGPVLRPLYMDVQATTPLDPRVLDAMLPYLINYYGNPHSRTHAYGWESEAAMERARQQVASLIGADPREIIFTSGATESNNIAIKGVARFYRSRKKHLITTQTEHKCVLDSCRSLEAEGFQVTYLPVQKSGIIDLKELEAAIQPDTSLVSVMTVNNEIGVKQPIAEIGRICSSRKVYFHTDAAQAVGKIPLDVNDMKIDLMSISGHKIYGPKGVGAIYIRRRPRVRVEALQSGGGQERGMRSGTVPTPLVVGLGAACEVAQQEMEYDHKRISKLSERLIQNIMKSLPDVVMNGDPKHHYPGCINLSFAYVEGESLLMALKDVALSSGSACTSASLEPSYVLRAIGTDEDLAHSSIRFGIGRFTTEEEVDYTVEKCIQHVKRLREMSPLWEMVQDGIDLKSIKWTQH

SEQ ID NO: 56783 - protein, 397 aa, Homo sapiens; identical to SEQ ID NO: 56781
  Payload ID: 11163
  Gene Symbol: NFS1
  Gene Name: NFS1 cysteine desulfurase
  Uniprot ID: Q9Y697
  ENSP ID: ENSP00000380570

SEQ ID NO: 56784 - protein, 204 aa, Homo sapiens
  Payload ID: 11163
  Gene Symbol: NFS1
  Gene Name: NFS1 cysteine desulfurase
  ENSP ID: ENSP00000392871
MDVQATTPLDPRVLDAMLPYLINYYGNPHSRTHAYGWESEAAMERARQQVASLIGADPREIIFTSGATESNNIAIKGVARFYRSRKKHLITTQTEHKCVLDSCRSLEAEGFQVTYLPVQKSGIIDLKELEAAIQPDTSLVSVMTVNNEIGVKQPIAEIGRICSSRKVYFHTDAAQAVGKIPLDVNDMKIDLMSISGHKIYGPKV

SEQ ID NO: 56785 - protein, 107 aa, Homo sapiens
  Payload ID: 11163
  Gene Symbol: NFS1
  Gene Name: NFS1 cysteine desulfurase
  ENSP ID: ENSP00000393482
MDVQATTPLDPRVLDAMLPYLINYYGNPHSRTHAYGWESEAAMERARQQVASLIGADPREIIFTSGATESNNIAIKGVARFYRSRKKHLITTQTEHKCVLDSCRSLE

SEQ ID NO: 56786 - protein, 87 aa, Homo sapiens
  Payload ID: 11163
  Gene Symbol: NFS1
  Gene Name: NFS1 cysteine desulfurase
  ENSP ID: ENSP00000393669
MDVQATTPLDPRVLDAMLPYLINYYGNPHSRTHAYGWESEAAMERARQQVASLIGADPREIIFTSGATESNNIAIKMESHPVAQARV

SEQ ID NO: 56787 - protein, 147 aa, Homo sapiens
  Payload ID: 11163
  Gene Symbol: NFS1
  Gene Name: NFS1 cysteine desulfurase
  ENSP ID: ENSP00000397572
MLLRAAWRRAAVAVTAAPGPKPAAPTRGLRLRVGDRAPQSAVPADTAAAPEVGPVLRPLYMDVQATTPLDPRVLDAMLPYLINYYGNPHSRTHAYGWESEAAMERARQQVASLIGADPREIIFTSGATESNNIAIKMESHPVAQARV

SEQ ID NO: 56788 - protein, 406 aa, Homo sapiens
  Payload ID: 11163
  Gene Symbol: NFS1
  Gene Name: NFS1 cysteine desulfurase
  Uniprot ID: Q9Y697
  ENSP ID: ENSP00000440897
MLLRAAWRRAAVAVTAAPGPKPAAPTRGLRLRVGDRAPQSAVPADTAAAPEVGPVLRPLYMDVQATTPLDPRVLDAMLPYLINYYGNPHSRTHAYGWESEAAMERARQQVASLIGADPREIIFTSGATESNNIAIKELEAAIQPDTSLVSVMTVNNEIGVKQPIAEIGRICSSRKVYFHTDAAQAVGKIPLDVNDMKIDLMSISGHKIYGPKGVGAIYIRRRPRVRVEALQSGGGQERGMRSGTVPTPLVVGLGAACEVAQQEMEYDHKRISKLSERLIQNIMKSLPDVVMNGDPKHHYPGCINLSFAYVEGESLLMALKDVALSSGSACTSASLEPSYVLRAIGTDEDLAHSSIRFGIGRFTTEEEVDYTVEKCIQHVKRLREMSPLWEMVQDGIDLKSIKWTQH

SEQ ID NO: 56789 - protein, 230 aa, Homo sapiens
  Payload ID: 11164
  Gene Symbol: NFU1
  Gene Name: NFU1 iron-sulfur cluster scaffold
  Uniprot ID: Q9UMS0
  ENSP ID: ENSP00000306965
MLKNPYTIKKQPLHQFVQRPLFPLPAAFYHPVRYMFIQTQDTPNPNSLKFIPGKPVLETRTMDFPTPAAAFRSPLARQLFRIEGVKSVFFGPDFITVTKENEELDWNLLKPDIYATIMDFFASGLPLVTEETPSGEAGSEEDDEVVAMIKELLDTRIRPTVQEDGGDVIYKGFEDGIVQLKLQGSCTSCPSSIITLKNGIQNMLQFYIPEVEGVEQVMDDESDEKEANSP

SEQ ID NO: 56790 - protein, 113 aa, Homo sapiens
  Payload ID: 11164
  Gene Symbol: NFU1
  Gene Name: NFU1 iron-sulfur cluster scaffold
  Uniprot ID: Q9UMS0
  ENSP ID: ENSP00000377842
MDFFASGLPLVTEETPSGEAGSEEDDEVVAMIKELLDTRIRPTVQEDGGDVIYKGFEDGIVQLKLQGSCTSCPSSIITLKNGIQNMLQFYIPEVEGVEQVMDDESDEKEANSP

SEQ ID NO: 56791 - protein, 254 aa, Homo sapiens
  Payload ID: 11164
  Gene Symbol: NFU1
  Gene Name: NFU1 iron-sulfur cluster scaffold
  Uniprot ID: Q9UMS0
  ENSP ID: ENSP00000387219
MAATARRGWGAAAVAAGLRRRFCHMLKNPYTIKKQPLHQFVQRPLFPLPAAFYHPVRYMFIQTQDTPNPNSLKFIPGKPVLETRTMDFPTPAAAFRSPLARQLFRIEGVKSVFFGPDFITVTKENEELDWNLLKPDIYATIMDFFASGLPLVTEETPSGEAGSEEDDEVVAMIKELLDTRIRPTVQEDGGDVIYKGFEDGIVQLKLQGSCTSCPSSIITLKNGIQNMLQFYIPEVEGVEQVMDDESDEKEANSP

SEQ ID NO: 56792 - protein, 39 aa, Homo sapiens
  Payload ID: 11164
  Gene Symbol: NFU1
  Gene Name: NFU1 iron-sulfur cluster scaffold
  ENSP ID: ENSP00000393338
MLKNPYTIKKQPLHQFVQRPLFPLPAAFYHPGSYLGLKE

SEQ ID NO: 56793 - protein, 42 aa, Homo sapiens
  Payload ID: 11164
  Gene Symbol: NFU1
  Gene Name: NFU1 iron-sulfur cluster scaffold
  ENSP ID: ENSP00000405495
MLKNPYTIKKQPLHQFVQRPLFPLPAAFYHPGSHYVAQAKVQ

SEQ ID NO: 56794 - protein, 99 aa, Homo sapiens
  Payload ID: 11164
  Gene Symbol: NFU1
  Gene Name: NFU1 iron-sulfur cluster scaffold
  ENSP ID: ENSP00000415102
MDFFASGLPLVTEETPSGEAGSEEDDEVVAMIKELLDTRIRPTVQEDGGDVIYKGFEDGIVQLKLQGSCTSCPSSIITLKNGIQNMLQFYIPEVEGVEQ

SEQ ID NO: 56795 - protein, 96 aa, Homo sapiens
  Payload ID: 11164
  Gene Symbol: NFU1
  Gene Name: NFU1 iron-sulfur cluster scaffold
  ENSP ID: ENSP00000417693
MDFFASGLPLVTEETPSGEAGSEEDDEVVAMIKELLDTRIRPTVQEDGGDVIYKGFEDGIVQLKLQGSCTSCPSSIITLKNGIQNMLQFYIPEVEG

SEQ ID NO: 56796 - protein, 113 aa, Homo sapiens; identical to SEQ ID NO: 56790
  Payload ID: 11164
  Gene Symbol: NFU1
  Gene Name: NFU1 iron-sulfur cluster scaffold
  Uniprot ID: Q9UMS0
  ENSP ID: ENSP00000418598

SEQ ID NO: 56797 - protein, 126 aa, Homo sapiens
  Payload ID: 11164
  Gene Symbol: NFU1
  Gene Name: NFU1 iron-sulfur cluster scaffold
  ENSP ID: ENSP00000418882
ENEELDWNLLKPDIYATIMDFFASGLPLVTEETPSGEAGSEEDDEVVAMIKELLDTRIRPTVQEDGGDVIYKGFEDGIVQLKLQGSCTSCPSSIITLKNGIQNMLQFYIPEVEGVEQEYNTAPCHQ

SEQ ID NO: 56798 - protein, 487 aa, Homo sapiens
  Payload ID: 11165
  Gene Symbol: NAB1
  Gene Name: NGFI-A binding protein 1 (EGR1 binding protein 1)
  Uniprot ID: Q13506
  ENSP ID: ENSP00000336894
MAAALPRTLGELQLYRILQKANLLSYFDAFIQQGGDDVQQLCEAGEEEFLEIMALVGMASKPLHVRRLQKALRDWVTNPGLFNQPLTSLPVSSIPIYKLPEGSPTWLGISCSSYERSSNAREPHLKIPKCAATTCVQSLGQGKSDVVGSLALQSVGESRLWQGHHATESEHSLSPADLGSPASPKESSEALDAAAALSVAECVERMAPTLPKSDLNEVKELLKTNKKLAKMIGHIFEMNDDDPHKEEEIRKYSAIYGRFDSKRKDGKHLTLHELTVNEAAAQLCVKDNALLTRRDELFALARQISREVTYKYTYRTTKSKCGERDELSPKRIKVEDGFPDFQDSVQTLFQQARAKSEELAALSSQQPEKVMAKQMEFLCNQAGYERLQHAERRLSAGLYRQSSEEHSPNGLTSDNSDGQGERPLNLRMPNLQNRQPHHFVVDGELSRLYPSEAKSHSSESLGILKDYPHSAFTLEKKVIKTEPEDSR

SEQ ID NO: 56799 - protein, 486 aa, Homo sapiens
  Payload ID: 11165
  Gene Symbol: NAB1
  Gene Name: NGFI-A binding protein 1 (EGR1 binding protein 1)
  ENSP ID: ENSP00000386682
MAAALPRTLGELQLYRILQKANLLSYFDAFIQQGGDDVQQLCEAGEEEFLEIMALVGMASKPLHVRRLQKALRDWVTNPGLFNQPLTSLPVSSIPIYKLPEGSPTWLGISCSSYERSSNAREPHLKIPKCAATTCVQSLGQGKSDVVGSLALQSVGESRLWQGHHATESEHSLSPADLGSPASPKESSEALDAAAALSVAECVERMAPTLPKSDLNEVKELLKTNKKLAKMIGHIFEMNDDDPHKEEEIRKYSAIYGRFDSKRKDGKHLTLHELTVNEAAAQLCVKDNALLTRRDELFALARQISREVTYKYTYRTTKSKCGERDELSPKRIKVEDGFPDFQDSVQTLFQQARAKSEELAALSSQPEKVMAKQMEFLCNQAGYERLQHAERRLSAGLYRQSSEEHSPNGLTSDNSDGQGERPLNLRMPNLQNRQPHHFVVDGELSRLYPSEAKSHSSESLGILKDYPHSAFTLEKKVIKTEPEDSR

SEQ ID NO: 56800 - protein, 487 aa, Homo sapiens; identical to SEQ ID NO: 56798
  Payload ID: 11165
  Gene Symbol: NAB1
  Gene Name: NGFI-A binding protein 1 (EGR1 binding protein 1)
  Uniprot ID: Q13506
  ENSP ID: ENSP00000387089

SEQ ID NO: 56801 - protein, 152 aa, Homo sapiens
  Payload ID: 11165
  Gene Symbol: NAB1
  Gene Name: NGFI-A binding protein 1 (EGR1 binding protein 1)
  ENSP ID: ENSP00000388301
MAAALPRTLGELQLYRILQKANLLSYFDAFIQQGGDDVQQLCEAGEEEFLEIMALVGMASKPLHVRRLQKALRDWVTNPGLFNQPLTSLPVSSIPIYKLPEGSPTWLGISCSSYERSSNAREPHLKIPKCAATTCVQSLGQGKSDVVGSLAL

SEQ ID NO: 56802 - protein, 240 aa, Homo sapiens
  Payload ID: 11165
  Gene Symbol: NAB1
  Gene Name: NGFI-A binding protein 1 (EGR1 binding protein 1)
  ENSP ID: ENSP00000390914
  MOD_RES (1)..(1): Any amino acid
XKELLKTNKKLAKMIGHIFEMNDDDPHKEEEIRKYSAIYGRFDSKRKDGKHLTLHELTVNEAAAQLCVKDNALLTRRDELFALARQISREVTYKYTYRTTKSKCGERDELSPKRIKVEQPEKVMAKQMEFLCNQAGYERLQHAERRLSAGLYRQSSEEHSPNGLTSDNSDGQGERPLNLRMPNLQNRQPHHFVVDGELSRLYPSEAKSHSSESLGILKDYPHSAFTLEKKVIKTEPEDSR

SEQ ID NO: 56803 - protein, 84 aa, Homo sapiens
  Payload ID: 11165
  Gene Symbol: NAB1
  Gene Name: NGFI-A binding protein 1 (EGR1 binding protein 1)
  ENSP ID: ENSP00000395444
MALVGMASKPLHVRRLQKALRDWVTNPGLFNQPLTSLPVSSIPIYKLPEGSPTWLGISCSSYERSSNAREPHLKIPKCAATTCV

SEQ ID NO: 56804 - protein, 100 aa, Homo sapiens
  Payload ID: 11165
  Gene Symbol: NAB1
  Gene Name: NGFI-A binding protein 1 (EGR1 binding protein 1)
  ENSP ID: ENSP00000397014
MAAALPRTLGELQLYRILQKANLLSYFDAFIQQGGDDVQQLCEAGEEEFLEIMALVGMASKPLHVRRLQKALRDWVTNPGLFNQPLTSLPVSSIPIYKLP

SEQ ID NO: 56805 - protein, 62 aa, Homo sapiens
  Payload ID: 11165
  Gene Symbol: NAB1
  Gene Name: NGFI-A binding protein 1 (EGR1 binding protein 1)
  ENSP ID: ENSP00000403243
MAAALPRTLGELQLYRILQKANLLSYFDAFIQQGGDDVQQLCEAGEEEFLEIMALVGMASKP

SEQ ID NO: 56806 - protein, 157 aa, Homo sapiens
  Payload ID: 11165
  Gene Symbol: NAB1
  Gene Name: NGFI-A binding protein 1 (EGR1 binding protein 1)
  ENSP ID: ENSP00000404104
MAAALPRTLGELQLYRILQKANLLSYFDAFIQQGGDDVQQLCEAGEEEFLEIMALVGMASKPLHVRRLQKALRDWVTNPGLFNQPLTSLPVSSIPIYKLPEGSPTWLGISCSSYERSSNAREPHLKIPKCAATTCVQSLGQGKSDVVGSLALQSVGE

SEQ ID NO: 56807 - protein, 525 aa, Homo sapiens
  Payload ID: 11166
  Gene Symbol: NAB2
  Gene Name: NGFI-A binding protein 2 (EGR1 binding protein 2)
  Uniprot ID: Q15742
  ENSP ID: ENSP00000300131
MHRAPSPTAEQPPGGGDSARRTLQPRLKPSARAMALPRTLGELQLYRVLQRANLLSYYETFIQQGGDDVQQLCEAGEEEFLEIMALVGMATKPLHVRRLQKALREWATNPGLFSQPVPAVPVSSIPLFKISETAGTRKGSMSNGHGSPGEKAGSARSFSPKSPLELGEKLSPLPGGPGAGDPRIWPGRSTPESDVGAGGEEEAGSPPFSPPAGGGVPEGTGAGGLAAGGTGGGPDRLEPEMVRMVVESVERIFRSFPRGDAGEVTSLLKLNKKLARSVGHIFEMDDNDSQKEEEIRKYSIIYGRFDSKRREGKQLSLHELTINEAAAQFCMRDNTLLLRRVELFSLSRQVARESTYLSSLKGSRLHPEELGGPPLKKLKQEVGEQSHPEIQQPPPGPESYVPPYRPSLEEDSASLSGESLDGHLQAVGSCPRLTPPPADLPLALPAHGLWSRHILQQTLMDEGLRLARLVSHDRVGRLSPCVPAKPPLAEFEEGLLDRCPAPGPHPALVEGRRSSVKVEAEASRQ

SEQ ID NO: 56808 - protein, 461 aa, Homo sapiens
  Payload ID: 11166
  Gene Symbol: NAB2
  Gene Name: NGFI-A binding protein 2 (EGR1 binding protein 2)
  Uniprot ID: Q15742
  ENSP ID: ENSP00000341491
MHRAPSPTAEQPPGGGDSARRTLQPRLKPSARAMALPRTLGELQLYRVLQRANLLSYYETFIQQGGDDVQQLCEAGEEEFLEIMALVGMATKPLHVRRLQKALREWATNPGLFSQPVPAVPVSSIPLFKISETAGTRKGSMSNGHGSPGEKAGSARSFSPKSPLELGEKLSPLPGGPGAGDPRIWPGRSTPESDVGAGGEEEAGSPPFSPPAGGGVPEGTGAGGLAAGGTGGGPDRLEPEMVRMVVESVERIFRSFPRGDAGEVTSLLKLNKKLARSVGHIFEMDDNDSQKEEEIRKYSIIYGRFDSKRREGKQLSLHELTINEAAAQFCMRDNTLLLRRVELFSLSRQVARESTYLSSLKGSRLHPEELGGPPLKKLKQEVGEQSHPEIQQPPPGPESYVPPYRPSLEEDSASLSGESLDGHLQEFEEGLLDRCPAPGPHPALVEGRRSSVKVEAEASRQ

SEQ ID NO: 56809 - protein, 240 aa, Homo sapiens
  Payload ID: 11167
  Gene Symbol: NGLY1
  Gene Name: N-glycanase 1
  ENSP ID: ENSP00000280699
  MOD_RES (1)..(1): Any amino acid
XSGSASPAVAELCQNTPETFLEASKLLLTYADNILRNPNDEKYRSIRIGNTAFSTRLLPVRGAVECLFEMGFEEGETHLIFPKKASVEQLQKIRDLIAIERSSRLDGSNKSHKVKSSQQPAASTQLPTTPSSNPSGLNQHTRNRQGQSSDPPSASTVAADSAILEVLQSNIQHVLVYENPALQEKALACIPVQELKRKSQEKLSRARKLDKDIITLRNFWKQDVDGVASGPIVLHCAAEL

SEQ ID NO: 56810 - protein, 654 aa, Homo sapiens [sequence omitted]

SEQ ID NO: 56811 - protein, 633 aa, Homo sapiens
  Payload ID: 11167
  Gene Symbol: NGLY1
  Gene Name: N-glycanase 1
  ENSP ID: ENSP00000307980
AALGSSSGSASPAVAELCQNTPETFLEASKLLLTYADNILRNPNDEKYRSIRIGNTAFSTRLLPVRGAVECLFEMGFEEGETHLIFPKKASVEQLQKIRDLIAIERSSRLDGSNKSHKVKSSQQPAASTQLPTTPSSNPSGLNQHTRNRQGQSSDPPSASTVAADSAILEVLQSNIQHVLVYENPALQEKALACIPVQELKRKSQEKLSRARKLDKGINISDEDFLLLELLHWFKEEFFHWVNNVLCSKCGGQTRSRDRSLLPSDDELKWGAKEVEDHYCDACQFSNRFPRYNNPEKLLETRCGRCGEWANCFTLCCRAVGFEARYVWDYTELQRTLSLKLTTLKEIGKTFLRISKRQKLIQVVDVTWRYSCKHEEVIARRTKVKEALLRDTINGLNKQRQLFLSENRRKELLQRIIVELVEFISPKTPKPGELGGRISGSVAWRVARGEMGLQRKETLFIPCENEKISKQLHLCYNIVKDRYVRVSNNNQTISGWENGVWKMESIFRKVETDWHMVYLARKEGSSFAYISWKFECGSVGLKVDSISIRTSSQTFQTGTVEWKLRSDTAQVELTGDNSLHSYADFSGATEVILEAELSRGDGDVAWQHTQLFRQSLNDHEENCLEIIIKFSDL

SEQ ID NO: 56812 - protein, 558 aa, Homo sapiens
  Payload ID: 11167
  Gene Symbol: NGLY1
  Gene Name: N-glycanase 1
  Uniprot ID: Q96IV0
  ENSP ID: ENSP00000379886
MAAAALGSSSGSASPAVAELCQNTPETFLEASKLLLTYADNILRNPNDEKYRSIRIGNTAFSTRLLPVRGAVECLFEMGFEEGETHLIFPKKASVEQLQKIRDLIAIERSSRLDGSNKSHKVKSSQQPAASTQLPTTPSSNPSGLNQHTRNRQGQSSDPPSASTVAADSAILEVLQSNIQHVLVYENPALQEKALACIPVQELKRKSQEKLSRARKLDKGINISDEDFLLLELLHWFKEEFFHWVNNVLCSKCGGQTRSRDRSLLPSDDELKWGAKEVEDHYCDACQFSNRFPRYNNPEKLLETRCGRCGEWANCFTLCCRAVGFEARYVWDYTDHVWTEVYSPSQQRWLHCDACEDVCDKPLLYEIGWGKKLSYVIAFSKDEVVDVTWRYSCKHEEVIARRTKVKEALLRDTINGLNKQRQLFLSENRRKELLQRIIVELVEFISPKTPKPGELGGRISGSVAWRVARGEMGLQRKETLFIPCENEKISKQLHLCYNIVKDRYVRVSNNNQTISGWENGVWKMESIFRKVETDWHMITVFTPMLIFLVPLKLFWKQN

SEQ ID NO: 56813 - protein, 636 aa, Homo sapiens
  Payload ID: 11167
  Gene Symbol: NGLY1
  Gene Name: N-glycanase 1
  Uniprot ID: Q96IV0
  ENSP ID: ENSP00000387430
MAAAALGSSSGSASPAVAELCQNTPETFLEASKLLLTYADNILRNPNDEKYRSIRIGNTAFSTRLLPVRGAVECLFEMGFEEGETHLIFPKKASVEQLQKIRDLIAIERSSRLDGSNKSHKVKSSQQPAASTQLPTTPSSNPSGLNQHTRNRQGQSSDPPSASTVAADSAILEVLQSNIQHVLVYENPALQEKALACIPVQELKRKSQEKLSRARKLDKGINISDEDFLLLELLHWFKEEFFHWVNNVLCSKCGGQTRSRDRSLLPSDDELKWGAKEVEDHYCDACQFSNRFPRYNNPEKLLETRCGRCGEWANCFTLCCRAVGFEARYVWDYTELQRTLSLKLTTLKEIGKTFLRISKRQKLIQVVDVTWRYSCKHEEVIARRTKVKEALLRDTINGLNKQRQLFLSENRRKELLQRIIVELVEFISPKTPKPGELGGRISGSVAWRVARGEMGLQRKETLFIPCENEKISKQLHLCYNIVKDRYVRVSNNNQTISGWENGVWKMESIFRKVETDWHMVYLARKEGSSFAYISWKFECGSVGLKVDSISIRTSSQTFQTGTVEWKLRSDTAQVELTGDNSLHSYADFSGATEVILEAELSRGDGDVAWQHTQLFRQSLNDHEENCLEIIIKFSDL

SEQ ID NO: 56814 - protein, 612 aa, Homo sapiens
  Payload ID: 11167
  Gene Symbol: NGLY1
  Gene Name: N-glycanase 1
  Uniprot ID: Q96IV0
  ENSP ID: ENSP00000389888
MRNPNDEKYRSIRIGNTAFSTRLLPVRGAVECLFEMGFEEGETHLIFPKKASVEQLQKIRDLIAIERSSRLDGSNKSHKVKSSQQPAASTQLPTTPSSNPSGLNQHTRNRQGQSSDPPSASTVAADSAILEVLQSNIQHVLVYENPALQEKALACIPVQELKRKSQEKLSRARKLDKGINISDEDFLLLELLHWFKEEFFHWVNNVLCSKCGGQTRSRDRSLLPSDDELKWGAKEVEDHYCDACQFSNRFPRYNNPEKLLETRCGRCGEWANCFTLCCRAVGFEARYVWDYTDHVWTEVYSPSQQRWLHCDACEDVCDKPLLYEIGWGKKLSYVIAFSKDEVVDVTWRYSCKHEEVIARRTKVKEALLRDTINGLNKQRQLFLSENRRKELLQRIIVELVEFISPKTPKPGELGGRISGSVAWRVARGEMGLQRKETLFIPCENEKISKQLHLCYNIVKDRYVRVSNNNQTISGWENGVWKMESIFRKVETDWHMVYLARKEGSSFAYISWKFECGSVGLKVDSISIRTSSQTFQTGTVEWKLRSDTAQVELTGDNSLHSYADFSGATEVILEAELSRGDGDVAWQHTQLFRQSLNDHEENCLEIIIKFSDL

SEQ ID NO: 56815 - protein, 114 aa, Homo sapiens
  Payload ID: 11167
  Gene Symbol: NGLY1
  Gene Name: N-glycanase 1
  ENSP ID: ENSP00000412946
MGFEEGETHLIFPKKASVEQLQKIRDLIAIERSSRLDGSNKSHKVKSSQQPAASTQLPTTPSSNPSGLNQHTRNRQGQSSDPPSASTVAADSAILEVLQSNIQHVLVYENPALQ

SEQ ID NO: 56816 - protein, 726 aa, Homo sapiens
  Payload ID: 11168
  Gene Symbol: NHLRC2
  Gene Name: NHL repeat containing 2
  Uniprot ID: Q8NBF2
  ENSP ID: ENSP00000358307
MAAPGGRGRSLSGLLPAQTSLEYALLDAVTQQEKDSLVYQYLQKVDGWEQDLSVPEFPEGLEWLNTEEPISVYKDLCGKIVVLDFFTYCCINCIHLLPDLHALEHTYSDKDGLLIIGVHSAKFPNEKVLDNIKSAVLRYNITHPMVNDADASLWQELEVSCWPTLVILGPRGNMLFSLIGEGHKDKLFLYTSIALKYYKDRGQIRDNKIGIKLYKDSLPPSPLLFPGKVTVDQVTDRLVIADTGHHRILVVWKNGQIQYSIGGPNPGRKDGIFSESTFNSPQGVAIMNNIIYVADTENHLIRKIDLEAEKVSTVAGIGIQGTDKEGGAKGEQQPISSPWDVVFGTSGSEVQRGDILWIAMAGTHQIWALLLDSGKLPKKNELTKGTCLRFAGSGNEENRNNAYPHKAGFAQPSGLSLASEDPWSCLFVADSESSTVRTVSLKDGAVKHLVGGERDPMNLFAFGDVDGVGINAKLQHPLGVTWDKKRNLLYVADSYNHKIKVVDPKTKNCTTLAGTGDTNNVTSSSFTESTFNEPGGLCIGENGELLYVADTNNHQIKVMDLETKMVSVLPIFRSENAVVDGPFLVEKQKTLPKLPKSAPSIRLSPVTACAGQTLQFKLRLDLPSGSKLTEGVSSCWFLTAEGNEWLLQGQIAAGDIENISSQPTISLQIPDDCLSLEAIVSVSVFLYYCSADSSACMMKAILFSQPLQITDTQQGCIAPVELRYVF

SEQ ID NO: 56817 - protein, 280 aa, Homo sapiens
  Payload ID: 11169
  Gene Symbol: NHLRC3
  Gene Name: NHL repeat containing 3
  Uniprot ID: Q5JS37
  ENSP ID: ENSP00000368919
MARFWVCVAGAGFFLAFLVLHSRFCGSPVLRNFTFAVSWRTEKILYRLDVGWPKHPEYFTGTTFCVAVDSLNGLVYIGQRGDNIPKILVFTEDGYFLRAWNYTVDTPHGIFAASTLYEQSVWITDVGSDFMILWLHGENGTGPAKFNIPHSVTLDSAGRVWVADRGNKRIQVFDKDTGEWLGAWNNCFTEEGPSSVRFTPDGKYLIVAQLNLSRLSVVAAPPVGSIGECSVISTIQLADQVLPHLLEVDRKTGAVYVAEIGAKQVQKYVPLNSYVPSFGS

SEQ ID NO: 56818 - protein, 347 aa, Homo sapiens
  Payload ID: 11169
  Gene Symbol: NHLRC3
  Gene Name: NHL repeat containing 3
  Uniprot ID: Q5JS37
  ENSP ID: ENSP00000368920
MARFWVCVAGAGFFLAFLVLHSRFCGSPVLRNFTFAVSWRTEKILYRLDVGWPKHPEYFTGTTFCVAVDSLNGLVYIGQRGDNIPKILVFTEDGYFLRAWNYTVDTPHGIFAASTLYEQSVWITDVGSGFFGHTVKKYSSFGDLVQVLGTPGKKGTSLNPLQFDNPAELYVEDTGDIYIVDGDGGLNNRLIKLSQDFMILWLHGENGTGPAKFNIPHSVTLDSAGRVWVADRGNKRIQVFDKDTGEWLGAWNNCFTEEGPSSVRFTPDGKYLIVAQLNLSRLSVVAAPPVGSIGECSVISTIQLADQVLPHLLEVDRKTGAVYVAEIGAKQVQKYVPLNSYVPSFGS

SEQ ID NO: 56819 - protein, 150 aa, Homo sapiens
  Payload ID: 11169
  Gene Symbol: NHLRC3
  Gene Name: NHL repeat containing 3
  ENSP ID: ENSP00000418127
MILWLHGENGTGPAKFNIPHSVTLDSAGRVWVADRGNKRIQVFDKDTGEWLGAWNNCFTEEGPSSVRFTPDGKYLIVAQLNLSRLSVVAAPPVGSIGECSVISTIQLADQVLPHLLEVDRKTGAVYVAEIGAKQVQKYVPLNSYVPSFGS

SEQ ID NO: 56820 - protein, 153 aa, Homo sapiens
  Payload ID: 11169
  Gene Symbol: NHLRC3
  Gene Name: NHL repeat containing 3
  ENSP ID: ENSP00000484853
MARFWVCVAGAGFFLAFLVLHSRFCGSPVLRNFTFAVSWRTEKILYRLDVGWPKHPEYFTGTTFCVAVDSLNGLVYIGQRGDNIPKILVFTEDGYFLRAWNYTVDTPHGIFAASTLYEQSVWITDVGSDFMILWLHGENGTGPAKFNIPHSVT

SEQ ID NO: 56821 - protein, 123 aa, Homo sapiens
  Payload ID: 11170
  Gene Symbol: NHLRC4
  Gene Name: NHL repeat containing 4
  Uniprot ID: P0CG21
  ENSP ID: ENSP00000410858
MLGLEGPCWVGPGPDGGLAVSEEFGDVRLFGSARQPLGSLGGWTGHTFGCPAGICSNSEGNVIVADEQRRQVTLFPRAGPPICLVSEGLGQPLGVACAPQGQLLVADAKDNSIKVYQGLKELA

SEQ ID NO: 56822 - protein, 123 aa, Homo sapiens; identical to SEQ ID NO: 56821
  Payload ID: 11170
  Gene Symbol: NHLRC4
  Gene Name: NHL repeat containing 4
  Uniprot ID: P0CG21
  ENSP ID: ENSP00000442223

SEQ ID NO: 56823 - protein, 395 aa, Homo sapiens
  Payload ID: 11171
  Gene Symbol: NHLRC1
  Gene Name: NHL repeat containing E3 ubiquitin protein ligase 1
  Uniprot ID: Q6VVB1
  ENSP ID: ENSP00000345464
MAAEASESGPALHELMREAEISLLECKVCFEKFGHRQQRRPRNLSCGHVVCLACVAALAHPRTLALECPFCRRACRGCDTSDCLPVLHLIELLGSALRQSPAAHRAAPSAPGALTCHHTFGGWGTLVNPTGLALCPKTGRVVVVHDGRRRVKIFDSGGGCAHQFGEKGDAAQDIRYPVDVTITNDCHVVVTDAGDRSIKVFDFFGQIKLVIGGQFSLPWGVETTPQNGIVVTDAEAGSLHLLDVDFAEGVLRRTERLQAHLCNPRGVAVSWLTGAIAVLEHPLALGTGVCSTRVKVFSSSMQLVGQVDTFGLSLYFPSKITASAVTFDHQGNVIVADTSGPAILCLGKPEEFPVPKPMVTHGLSHPVALTFTKENSLLVLDTASHSIKVYKVDWG

SEQ ID NO: 56824 - protein, 153 aa, Homo sapiens
  Payload ID: 11172
  Gene Symbol: NHP2
  Gene Name: NHP2 ribonucleoprotein
  Uniprot ID: Q9NX24
  ENSP ID: ENSP00000274606
MTKIKADPDGPEAQAEACSGERTYQELLVNQNPIAQPLASRRLTRKLYKCIKKAVKQKQIRRGVKEVQKFVNKGEKGIMVLAGDTLPIEVYCHLPVMCEDRNLPYVYIPSKTDLGAAAGSKRPTCVIMVKPHEEYQEAYDECLEEVQSLPLPL

SEQ ID NO: 56825 - protein, 90 aa, Homo sapiens
  Payload ID: 11172
  Gene Symbol: NHP2
  Gene Name: NHP2 ribonucleoprotein
  ENSP ID: ENSP00000366276
MTKIKADPDGPEAQAEACSGERTYQELLVNQNPIAQPLASRRLTRKLYKCIKKAVKQKQIRRGVKEVQKFVNKGEKGTWVQPQAPSAPPV

SEQ ID NO: 56826 - protein, 135 aa, Homo sapiens
  Payload ID: 11172
  Gene Symbol: NHP2
  Gene Name: NHP2 ribonucleoprotein
  ENSP ID: ENSP00000423803
MTKIKADPDGPEAQAEACSGERTYQELLVNQNPIAQPLASRRLTRKLYKCIKKAVKQKQIRRGVKEVQKFVNKGEKGIMVLAGDTLPIEVYCHLPVMCEDRNLPYVYIPSKTFPSCKVGIPAQALWLTPVILVLW

SEQ ID NO: 56827 - protein, 132 aa, Homo sapiens
  Payload ID: 11172
  Gene Symbol: NHP2
  Gene Name: NHP2 ribonucleoprotein
  ENSP ID: ENSP00000423849
MTKIKADPDGPEAQAEACSGERTYQELLVNQNPIAQPLASRRLTRKLYKCIKKAVKQKQIRRGVKEVQKFVNKGEKGIMVLAGDTLPIEVYCHLPVMCEDRNLPYVYIPSKTVRSTWPPDLAQHWGVWDSLP

SEQ ID NO: 56828 - protein, 85 aa, Homo sapiens
  Payload ID: 11172
  Gene Symbol: NHP2
  Gene Name: NHP2 ribonucleoprotein
  ENSP ID: ENSP00000431126
DSSVVAAVKQKQIRRGVKEVQKFVNKGEKGIMVLAGDTLPIEVYCHLPVMCEDRNLPYVYIPSKTVRSTWPPDLAQHWGVWDSLP

SEQ ID NO: 56829 - protein, 221 aa, Homo sapiens
  Payload ID: 11173
  Gene Symbol: NHSL1
  Gene Name: NHS-like 1
  ENSP ID: ENSP00000344582
MFCLKAVSNLDEESRWTVHYTAPWHQQENVFLPTTRPPCVEDLHRQAKLNLKSVLRECDKLRHDGYRSSQYYSQGPTFAANASPFCDDYQDEDEETDQKCSLSSSEEERFISIRRPKTPASSDFSDLNTQTNWTKSLPLPTPEEKMRQQAQTVQADVVPINITASGTGQDDADGHSVYTPDHYSTLGRFNSCRSAGQRSETRDSSCQTEDVKVVPPSMRRI

SEQ ID NO: 56830 - protein, 1606 aa, Homo sapiens
  Payload ID: 11173
  Gene Symbol: NHSL1
  Gene Name: NHS-like 1
  Uniprot ID: Q5SYE7
  ENSP ID: ENSP00000344672
MVVFINAKIKSLIKLFKKKTVSNLDEESRWTVHYTAPWHQQENVFLPTTRPPCVEDLHRQAKLNLKSVLRECDKLRHDGYRSSQYYSQGPTFAANASPFCDDYQDEDEETDQKCSLSSSEEERFISIRRPKTPASSDFSDLNTQTNWTKSLPLPTPEEKMRQQAQTVQADVVPINITGENFDRQASLRRSLIYTDTLVRRPKKVKRRKTITGVPDNIQKELASGTGQDDADGHSVYTPDHYSTLGRFNSCRSAGQRSETRDSSCQTEDVKVVPPSMRRIRAQKGQGIAAQMGHFSGSSGNMSVLSDSAGIVFPSRLDSDAGFHSLPRSGARANIQSLEPRLGALGPAGDMNGTFLYQRGHPQADENLGHLGGASGTGTLLRPKSQELRHFESENIMSPACVVSPHATYSTSIIPNATLSSSSEVIAIPTAQSAGQRESKSSGSSHARIKSRDHLISRHAVKGDPQSPGRHWNEGHATILSQDLDPHSPGEPALLSLCDSAVPLNAPANRENGSQAMPYNCRNNLAFPAHPQDVDGKSESSYSGGGGHSSSEPWEYKSSGNGRASPLKPHLATPGYSTPTSNMSSCSLDQTSNKEDAGSLYSEDHDGYCASVHTDSGHGSGNLCNSSDGFGNPRHSVINVFVGRAQKNQGDRSNYQDKSLSRNISLKKAKKPPLPPSRTDSLRRIPKKSSQCNGQVLNESLIATLQHSLQLSLPGKSGSSPSQSPCSDLEEPWLPRSRSQSTVSAGSSMTSATTPNVYSLCGATPSQSDTSSVKSEYTDPWGYYIDYTGMQEDPGNPAGGCSTSSGVPTGNGPVRHVQEGSRATMPQVPGGSVKPKIMSPEKSHRVISPSSGYSSQSNTPTALTPVPVFLKSVSPANGKGKPKPKVPERKSSLISSVSISSSSTSLSSSTSTEGSGTMKKLDPAVGSPPAPPPPPVPSPPFPCPADRSPFLPPPPPVTDCSQGSPLPHSPVFPPPPPEALIPFCSPPDWCLSPPRPALSPILPDSPVSLPLPPPLLPSSEPPPAPPLDPKFMKDTRPPFTNSGQPESSRGSLRPPSTKEETSRPPMPLITTEALQMVQLRPVRKNSGAEAAQLSERTAQEQRTPVAPQYHLKPSAFLKSRNSTNEMESESQPASVTSSLPTPAKSSSQGDHGSAAERGGPVSRSPGAPSAGEAEARPSPSTTPLPDSSPSRKPPPISKKPKLFLVVPPPQKDFAVEPAENVSEALRAVPSPTTGEEGSVHSREAKESSAAQAGSHATHPGTSVLEGGAAGSMSPSRVEANVPMVQPDVSPAPKQEEPAENSADTGGDGESCLSQQDGAAGVPETNAAGSSSEACDFLKEDGNDEVMTPSRPRTTEDLFAAIHRSKRKVLGRRDSDDDHSRNHSPSPPVTPTGAAPSLASPKQVGSIQRSIRKSSTSSDNFKALLLKKGSRSDTSARMSAAEMLKNTDPRFQRSRSEPSPDAPESPSSCSPSKNRRAQEEWAKNEGLMPRSLSFSGPRYGRSRTPPSAASSRYSMRNRIQSSPMTVISEGEGEAVEPVDSIARGALGAAEGCSLDGLAREEMDEGGLLCGEGPAASLQPQAPGPVDGTASAEGREPSPQCGGSLSEES

SEQ ID NO: 56831 - protein, 1610 aa, Homo sapiens
  Payload ID: 11173
  Gene Symbol: NHSL1
  Gene Name: NHS-like 1
  Uniprot ID: Q5SYE7
  ENSP ID: ENSP00000394546
MKKEGSSGSFRLQPNTGSLSRAVSWINFSSLSRQTKRLFRSDGELSVCGQQVEVDDENWIYRAQPRKAVSNLDEESRWTVHYTAPWHQQENVFLPTTRPPCVEDLHRQAKLNLKSVLRECDKLRHDGYRSSQYYSQGPTFAANASPFCDDYQDEDEETDQKCSLSSSEEERFISIRRPKTPASSDFSDLNTQTNWTKSLPLPTPEEKMRQQAQTVQADVVPINITASGTGQDDADGHSVYTPDHYSTLGRFNSCRSAGQRSETRDSSCQTEDVKVVPPSMRRIRAQKGQGIAAQMGHFSGSSGNMSVLSDSAGIVFPSRLDSDAGFHSLPRSGARANIQSLEPRLGALGPAGDMNGTFLYQRGHPQADENLGHLGGASGTGTLLRPKSQELRHFESENIMSPACVVSPHATYSTSIIPNATLSSSSEVIAIPTAQSAGQRESKSSGSSHARIKSRDHLISRHAVKGDPQSPGRHWNEGHATILSQDLDPHSPGEPALLSLCDSAVPLNAPANRENGSQAMPYNCRNNLAFPAHPQDVDGKSESSYSGGGGHSSSEPWEYKSSGNGRASPLKPHLATPGYSTPTSNMSSCSLDQTSNKEDAGSLYSEDHDGYCASVHTDSGHGSGNLCNSSDGFGNPRHSVINVFVGRAQKNQGDRSNYQDKSLSRNISLKKAKKPPLPPSRTDSLRRIPKKSSQCNGQVLNESLIATLQHSLQLSLPGKSGSSPSQSPCSDLEEPWLPRSRSQSTVSAGSSMTSATTPNVYSLCGATPSQSDTSSVKSEYTDPWGYYIDYTGMQEDPGNPAGGCSTSSGVPTGNGPVRHVQEGSRATMPQVPGGSVKPKIMSPEKSHRVISPSSGYSSQSNTPTALTPVPVFLKSVSPANGKGKPKPKVPERKSSLISSVSISSSSTSLSSSTSTEGSGTMKKLDPAVGSPPAPPPPPVPSPPFPCPADRSPFLPPPPPVTDCSQGSPLPHSPVFPPPPPEALIPFCSPPDWCLSPPRPALSPILPDSPVSLPLPPPLLPSSEPPPAPPLDPKFMKDTRPPFTNSGQPESSRGSLRPPSTKEETSRPPMPLITTEALQMVQLRPVRKNSGAEAAQLSERTAQEQRTPVAPQYHLKPSAFLKSRNSTNEMESESQPASVTSSLPTPAKSSSQGDHGSAAERGGPVSRSPGAPSAGEAEARPSPSTTPLPDSSPSRKPPPISKKPKLFLVVPPPQKDFAVEPAENVSEALRAVPSPTTGEEGSVHSREAKESSAAQAGSHATHPGTSVLEGGAAGSMSPSRVEANVPMVQPDVSPAPKQEEPAENSADTGGDGESCLSQQDGAAGVPETNAAGSSSEACDFLKEDGNDEVMTPSRPRTTEDLFAAIHRSKRKVLGRRDSDDDHSRNHSPSPPVTPTGAAPSLASPKQVGSIQRSIRKSSTSSDNFKALLLKKGSRSDTSARMSAAEMLKNTDPRFQRSRSEPSPDAPESPSSCSPSKNRRAQEEWAKNEGLMPRSLSFSGPRYGRSRTPPSAASSRYSMRNRIQSSPMTVISEGEGEAVEPVDSIARGALGAAEGCSLDGLAREEMDEGGLLCGEGPAASLQPQAPGPVDGTASAEGREPSPQCGGSLSEES

SEQ ID NO: 56832 - protein, 169 aa, Homo sapiens
  Payload ID: 11173
  Gene Symbol: NHSL1
  Gene Name: NHS-like 1
  ENSP ID: ENSP00000433523
  MOD_RES (1)..(1): Any amino acid
XAALGHRTAALHRRLDALQAAAARLDHRRVKIPVSNLDEESRWTVHYTAPWHQQENVFLPTTRPPCVEDLHRQAKLNLKSVLRECDKLRHDGYRSSQYYSQGPTFAANASPFCDDYQDEDEETDQKCSLSSSEEERFISIRRPKTPASSDFSDLNTQTNWTKSLPLPTP

SEQ ID NO: 56833 - protein, 137 aa, Homo sapiens
  Payload ID: 11173
  Gene Symbol: NHSL1
  Gene Name: NHS-like 1
  ENSP ID: ENSP00000434958
MNVIYCLESVTDSSFPWGAVAVSNLDEESRWTVHYTAPWHQQENVFLPTTRPPCVEDLHRQAKLNLKSVLRECDKLRHDGYRSSQYYSQGPTFAANASPFCDDYQDEDEETDQKCSLSSSEEERFISIRRPKTPASS

SEQ ID NO: 56834 - protein, 709 aa, Homo sapiens
  Payload ID: 11174
  Gene Symbol: NHSL2
  Gene Name: NHS-like 2
  Uniprot ID: Q5HYW2
  ENSP ID: ENSP00000424079
MESMGMVYSVPSSCNGPTESTFSTSWKGDAFTYMTPSATSQSNQVNENGKNPSCGNSWVSLNKVPPLVPKEAATLLVARDNPAGCSGSAGYPERLIQQRHMPERPSKIGLLTSGTSRLETGPGGASRFRERSLSVPTDSGTTDVDYDEEQKANEACALPFASTSSEGSNSADNIASLSAQQEAQHRRQRSKSISLRKAKKKPSPPTRSVSLVKDEPGLLPEGGSALPKDQRPKSLCLSLEHQGHHSSHPDAQGHPAIPNHKDPESTQFSHHWYLTDWKSGDTYQSLSSSSTATGTTVIECTQVQGSSESLASPSTSRATTPSQLSIEVEAREISSPGRPPGLMSPSSGYSSQSETPTPTVSMSLTLGHLPPPSSSVRVRPVVPERKSSLPPTSPMEKFPKSRLSFDLPLTSSPNLDLSGMSISIRSKTKVSRHHSETNFGVKLAQKTNPNQPIMPMVTQSDLRSVRLRSVSKSEPEDDIESPEYAEEPRAEEVFTLPERKTKPPVAEKPPVARRPPSLVHKPPSVPEEYALTSPTLAMPPRSSIQHARPLPQDSYTVVRKPKPSSFPDGRSPGESTAPSSLVFTPFASSSDAFFSGTQQPPQGSVEDEGPKVRVLPERISLQSQEEAEKKKGKIPPPVPKKPSVLYLPLTSPTAQMEAYVAEPRLPLSPIITLEEDTKCPATGDDLQSLGQRVTSTPQADSEREASPLG

SEQ ID NO: 56835 - protein, 835 aa, Homo sapiens
  Payload ID: 11174
  Gene Symbol: NHSL2
  Gene Name: NHS-like 2
  ENSP ID: ENSP00000487835
MERTDSVTLFWIRGGHSNSPAGSVAHSTTSDIRPSHSVPEGVHGRVAVGQDARFPSLTSPVLRTPSSEPDEPHQARSGPNPPGMESMGMVYSVPSSCNGPTESTFSTSWKGDAFTYMTPSATSQSNQVNENGKNPSCGNSWVSLNKVPPLVPKEAATLLVARDNPAGCSGSAGYPERLIQQRHMPERPSKIGLLTSGTSRLETGPGGASRFRERSLSVPTDSGTTDVDYDEEQKANEACALPFASTSSEGSNSADNIASLSAQQEAQHRRQRSKSISLRKAKKKPSPPTRSVSLVKDEPGLLPEGGSALPKDQRPKSLCLSLEHQGHHSSHPDAQGHPAIPNHKDPESTQFSHHWYLTDWKSGDTYQSLSSSSTATGTTVIECTQVQGSSESLASPSTSRATTPSQLSIEVEAREISSPGRPPGLMSPSSGYSSQSETPTPTVSMSLTLGHLPPPSSSVRVRPVVPERKSSLPPTSPMEKFPKSRLSFDLPLTSSPNLDLSGMSISIRSKTKVSRHHSETNFGVKLAQKTNPNQPIMPMVTQSDLRSVRLRSVSKSEPEDDIESPEYAEEPRAEEVFTLPERKTKPPVAEKPPVARRPPSLVHKPPSVPEEYALTSPTLAMPPRSSIQHARPLPQDSYTVVRKPKPSSFPDGRSPGESTAPSSLVFTPFASSSDAFFSGTQQPPQGSVEDEGPKVRVLPERISLQSQEEAEKKKGKIPPPVPKKPSVLYLPLTSPTAQMEAYVAEPRLPLSPIITLEEDTKCPATGDDLQSLGQRVTSTPQADSEREASPLGSSVEPGTEEKSLISDKTAEWIAEDDDDVFVASRTTEDLFTVIH

SEQ ID NO: 56836 - protein, 1225 aa, Homo sapiens
  Payload ID: 11174
  Gene Symbol: NHSL2
  Gene Name: NHS-like 2
  ENSP ID: ENSP00000488668
MPFYRRTVVPQRLCPRNPPQQLAELRDVSHLAALSLLRQLADLCGHSLALLEDLEGHLLALGRRTDSLYRRTVRLRRRLPCRLLGPEEDEEELAAANSGRENATATAHSRSSWRQPVNVFLSSGRPPSVEELLREAQLNLQSLLQEEYEEQYSEARLVGQTFRSSDEATKPTPNPRPQSARRLEFILMPTKRQLSEDETTTQGVRAPEASLSLSTTADKQTAWNSLFPLPILEEKRWPQLCSTQSDIVPINISGQQFDKHASLRHSLFNTETAVNPKSTLRRRRTIIGFSNFSQRDQGHSNSPAGSVAHSTTSDIRPSHSVPEGVHGRVAVGQDARFPSLTSPVLRTPSSEPDEPHQARSGPNPPGMESMGMVYSVPSSCNGPTESTFSTSWKGDAFTYMTPSATSQSNQVNENGKNPSCGNSWVSLNKVPPLVPKEAATLLVARDNPAGCSGSAGYPERLIQQRHMPERPSKIGLLTSGTSRLETGPGGASRFRERSLSVPTDSGTTDVDYDEEQKANEACALPFASTSSEGSNSADNIASLSAQQEAQHRRQRSKSISLRKAKKKPSPPTRSVSLVKDEPGLLPEGGSALPKDQRPKSLCLSLEHQGHHSSHPDAQGHPAIPNHKDPESTQFSHHWYLTDWKSGDTYQSLSSSSTATGTTVIECTQVQGSSESLASPSTSRATTPSQLSIEVEAREISSPGRPPGLMSPSSGYSSQSETPTPTVSMSLTLGHLPPPSSSVRVRPVVPERKSSLPPTSPMEKFPKSRLSFDLPLTSSPNLDLSGMSISIRSKTKVSRHHSETNFGVKLAQKTNPNQPIMPMVTQSDLRSVRLRSVSKSEPEDDIESPEYAEEPRAEEVFTLPERKTKPPVAEKPPVARRPPSLVHKPPSVPEEYALTSPTLAMPPRSSIQHARPLPQDSYTVVRKPKPSSFPDGRSPGESTAPSSLVFTPFASSSDAFFSGTQQPPQGSVEDEGPKVRVLPERISLQSQEEAEKKKGKIPPPVPKKPSVLYLPLTSPTAQMEAYVAEPRLPLSPIITLEEDTKCPATGDDLQSLGQRVTSTPQADSEREASPLGSSVEPGTEEKSLISDKTAEWIAEDDDDVFVASRTTEDLFTVIHRSKRKLLGWKEPGEAFVGGRTSSHSPIKNTAESPISESTATAGSGSSANLDAGRNDDFKALLQKKGSKATPRSRPSAAELLKTTNPLARRIIAQFSKDYETTDNPST

SEQ ID NO: 56837 - protein, 950 aa, Homo sapiens
  Payload ID: 11174
  Gene Symbol: NHSL2
  Gene Name: NHS-like 2
  ENSP ID: ENSP00000488715
MMGNSHHKQPRSKSQSRMHSATGHSNSPAGSVAHSTTSDIRPSHSVPEGVHGRVAVGQDARFPSLTSPVLRTPSSEPDEPHQARSGPNPPGMESMGMVYSVPSSCNGPTESTFSTSWKGDAFTYMTPSATSQSNQVNENGKNPSCGNSWVSLNKVPPLVPKEAATLLVARDNPAGCSGSAGYPERLIQQRHMPERPSKIGLLTSGTSRLETGPGGASRFRERSLSVPTDSGTTDVDYDEEQKANEACALPFASTSSEGSNSADNIASLSAQQEAQHRRQRSKSISLRKAKKKPSPPTRSVSLVKDEPGLLPEGGSALPKDQRPKSLCLSLEHQGHHSSHPDAQGHPAIPNHKDPESTQFSHHWYLTDWKSGDTYQSLSSSSTATGTTVIECTQVQGSSESLASPSTSRATTPSQLSIEVEAREISSPGRPPGLMSPSSGYSSQSETPTPTVSMSLTLGHLPPPSSSVRVRPVVPERKSSLPPTSPMEKFPKSRLSFDLPLTSSPNLDLSGMSISIRSKTKVSRHHSETNFGVKLAQKTNPNQPIMPMVTQSDLRSVRLRSVSKSEPEDDIESPEYAEEPRAEEVFTLPERKTKPPVAEKPPVARRPPSLVHKPPSVPEEYALTSPTLAMPPRSSIQHARPLPQDSYTVVRKPKPSSFPDGRSPGESTAPSSLVFTPFASSSDAFFSGTQQPPQGSVEDEGPKVRVLPERISLQSQEEAEKKKGKIPPPVPKKPSVLYLPLTSPTAQMEAYVAEPRLPLSPIITLEEDTKCPATGDDLQSLGQRVTSTPQADSEREASPLGSSVEPGTEEKSLISDKTAEWIAEDDDDVFVASRTTEDLFTVIHRSKRKLLGWKEPGEAFVGGRTSSHSPIKNTAESPISESTATAGSGSSANLDAGRNDDFKALLQKKGSKATPRSRPSAAELLKTTNPLARRIIAQFSKDYETTDNPST

SEQ ID NO: 56838 - protein, 754 aa, Homo sapiens
  Payload ID: 11175
  Gene Symbol: NBN
  Gene Name: nibrin
  Uniprot ID: O60934
  ENSP ID: ENSP00000265433
MWKLLPAAGPAGGEPYRLLTGVEYVVGRKNCAILIENDQSISRNHAVLTANFSVTNLSQTDEIPVLTLKDNSKYGTFVNEEKMQNGFSRTLKSGDGITFGVFGSKFRIEYEPLVACSSCLDVSGKTALNQAILQLGGFTVNNWTEECTHLVMVSVKVTIKTICALICGRPIVKPEYFTEFLKAVESKKQPPQIESFYPPLDEPSIGSKNVDLSGRQERKQIFKGKTFIFLNAKQHKKLSSAVVFGGGEARLITEENEEEHNFFLAPGTCVVDTGITNSQTLIPDCQKKWIQSIMDMLQRQGLRPIPEAEIGLAVIFMTTKNYCDPQGHPSTGLKTTTPGPSLSQGVSVDEKLMPSAPVNTTTYVADTESEQADTWDLSERPKEIKVSKMEQKFRMLSQDAPTVKESCKTSSNNNSMVSNTLAKMRIPNYQLSPTKLPSINKSKDRASQQQQTNSIRNYFQPSTKKRERDEENQEMSSCKSARIETSCSLLEQTQPATPSLWKNKEQHLSENEPVDTNSDNNLFTDTDLKSIVKNSASKSHAAEKLRSNKKREMDDVAIEDEVLEQLFKDTKPELEIDVKVQKQEEDVNVRKRPRMDIETNDTFSDEAVPESSKISQENEIGKKRELKEDSLWSAKEISNNDKLQDDSEMLPKKLLLTEFRSLVIKNSTSRNPSGINDDYGQLKNFKKFKKVTYPGAGKLPHIIGGSDLIAHHARKNTELEEWLRQEMEVQNQHAKEESLADDLFRYNPYLKRRR

SEQ ID NO: 56839 - protein, 58 aa, Homo sapiens
  Payload ID: 11175
  Gene Symbol: NBN
  Gene Name: nibrin
  ENSP ID: ENSP00000379551
MWKLLPAAGPAGGEPYRLLTGVEYVVGRKNCAILIENDQSISRNHAVLTANFSVTNLV

SEQ ID NO: 56840 - protein, 672 aa, Homo sapiens
  Payload ID: 11175
  Gene Symbol: NBN
  Gene Name: nibrin
  ENSP ID: ENSP00000386924
MQNGFSRTLKSGDGITFGVFGSKFRIEYEPLVACSSCLDVSGKTALNQAILQLGGFTVNNWTEECTHLVMVSVKVTIKTICALICGRPIVKPEYFTEFLKAVESKKQPPQIESFYPPLDEPSIGSKNVDLSGRQERKQIFKGKTFIFLNAKQHKKLSSAVVFGGGEARLITEENEEEHNFFLAPGTCVVDTGITNSQTLIPDCQKKWIQSIMDMLQRQGLRPIPEAEIGLAVIFMTTKNYCDPQGHPSTGLKTTTPGPSLSQGVSVDEKLMPSAPVNTTTYVADTESEQADTWDLSERPKEIKVSKMEQKFRMLSQDAPTVKESCKTSSNNNSMVSNTLAKMRIPNYQLSPTKLPSINKSKDRASQQQQTNSIRNYFQPSTKKRERDEENQEMSSCKSARIETSCSLLEQTQPATPSLWKNKEQHLSENEPVDTNSDNNLFTDTDLKSIVKNSASKSHAAEKLRSNKKREMDDVAIEDEVLEQLFKDTKPELEIDVKVQKQEEDVNVRKRPRMDIETNDTFSDEAVPESSKISQENEIGKKRELKEDSLWSAKEISNNDKLQDDSEMLPKKLLLTEFRSLVIKNSTSRNPSGINDDYGQLKNFKKFKKVTYPGAGKLPHIIGGSDLIAHHARKNTELEEWLRQEMEVQNQHAKEESLADDLFRYNPYLKRRR

SEQ ID NO: 56841 - protein, 58 aa, Homo sapiens; identical to SEQ ID NO: 56839
  Payload ID: 11175
  Gene Symbol: NBN
  Gene Name: nibrin
  ENSP ID: ENSP00000428252

SEQ ID NO: 56842 - protein, 164 aa, Homo sapiens
  Payload ID: 11175
  Gene Symbol: NBN
  Gene Name: nibrin
  ENSP ID: ENSP00000428717
MQNGFSRTLKSGDGITFGVFGSKFRIEYEPLVACSSCLDVSGKTALNQAILQLGGFTVNNWTEECTHLVMVSVKVTIKTICALICGRPIVKPEYFTEFLKAVESKKQPPQIESFYPPLDEPSIGSKNVDLSGRQERKQIFKGKTFIFLNAKQHKKLSSAVVFGG

SEQ ID NO: 56843 - protein, 92 aa, Homo sapiens
  Payload ID: 11175
  Gene Symbol: NBN
  Gene Name: nibrin
  ENSP ID: ENSP00000429971
MQNGFSRTLKSGDGITFGVFGSKFRIEYEPLVACSSCLDVSGKTALNQAILQLGGFTVNNWTEECTHLVMVSVKVTIKTICALICGRPIVKP

SEQ ID NO: 56844 - protein, 159 aa, Homo sapiens
  Payload ID: 11175
  Gene Symbol: NBN
  Gene Name: nibrin
  ENSP ID: ENSP00000430983
MWKLLPAAGPAGGEPYRLLTGVEYVVGRKNCAILIENDQSISRNHAVLTANFSVTNLSQTDEIPVLTLKDNSKYGTFVNEEKMQNGFSRTLKSGDGITFGVFGSKFSFYPPLDEPSIGSKNVDLSGRQERKQIFKGKTFIFLNAKQHKKLSSAVVFGGG

SEQ ID NO: 56845 - protein, 124 aa, Homo sapiens
  Payload ID: 11175
  Gene Symbol: NBN
  Gene Name: nibrin
  ENSP ID: ENSP00000484487
KVQKQEEDVNVRKRPRMDIETNDTFSDEAVPESSKISQENEIGKKRELKEDSLWSAKEISVTYPGAGKLPHIIGGSDLIAHHARKNTELEEWLRQEMEVQNQHAKEESLADDLFRYNPYLKRRR

SEQ ID NO: 56846 - protein, 563 aa, Homo sapiens
  Payload ID: 11176
  Gene Symbol: NCLN
  Gene Name: nicalin
  Uniprot ID: Q969V3
  ENSP ID: ENSP00000246117
MLEEAGEVLENMLKASCLPLGFIVFLPAVLLLVAPPLPAADAAHEFTVYRMQQYDLQGQPYGTRNAVLNTEARTMAAEVLSRRCVLMRLLDFSYEQYQKALRQSAGAVVIILPRAMAAVPQDVVRQFMEIEPEMLAMETAVPVYFAVEDEALLSIYKQTQAASASQGSASAAEVLLRTATANGFQMVTSGVQSKAVSDWLIASVEGRLTGLGGEDLPTIVIVAHYDAFGVAPWLSLGADSNGSGVSVLLELARLFSRLYTYKRTHAAYNLLFFASGGGKFNYQGTKRWLEDNLDHTDSSLLQDNVAFVLCLDTVGRGSSLHLHVSKPPREGTLQHAFLRELETVAAHQFPEVRFSMVHKRINLAEDVLAWEHERFAIRRLPAFTLSHLESHRDGQRSSIMDVRSRVDSKTLTRNTRIIAEALTRVIYNLTEKGTPPDMPVFTEQMQIQQEQLDSVMDWLTNQPRAAQLVDKDSTFLSTLEHHLSRYLKDVKQHHVKADKRDPEFVFYDQLKQVMNAYRVKPAVFDLLLAVGIAAYLGMAYVAVQHFSLLYKTVQRLLVKAKTQ

SEQ ID NO: 56847 - protein, 282 aa, Homo sapiens
  Payload ID: 11176
  Gene Symbol: NCLN
  Gene Name: nicalin
  ENSP ID: ENSP00000466296
  MOD_RES (1)..(1): Any amino acid
XYQGTKRWLEDNLDHTDSSLLQDNVAFVLCLDTVGRGSSLHLHVSKPPREGTLQHAFLRELETVAAHQFPEVRFSMVHKRINLAEDVLAWEHERFAIRRLPAFTLSHLESHRDGQRSSIMDVRSRVDSKTLTRNTRIIAEALTRVIYNLTEKGTPPDMPVFTEQMIQQEQLDSVMDWLTNQPRAAQLVDKDSTFLSTLEHHLSRYLKDVKQHHVKADKRDPEFVFYDQLKQVMNAYRVKPAVFDLLLAVGIAAYLGMAYVAVQHFSLLYKTVQRLLVKAKTQ

SEQ ID NO: 56848 - protein, 350 aa, Homo sapiens
  Payload ID: 11176
  Gene Symbol: NCLN
  Gene Name: nicalin
  ENSP ID: ENSP00000466300
EDLPTIVIVAHYDAFGVAPWLSLGADSNGSGVSVLLELARLFSRLYTYKRTHAAYNLLFFASGGGKFNYQGTKRWLEDNLDHTDSSLLQDNVAFVLCLDTVGRGSSLHLHVSKPPREGTLQHAFLRELETVAAHQFPEVRFSMVHKRINLAEDVLAWEHERFAIRRLPAFTLSHLESHRDGQRSSIMDVRSRVDSKTLTRNTRIIAEALTRVIYNLTEKGTPPDMPVFTEQMQIQQEQLDSVMDWLTNQPRAAQLVDKDSTFLSTLEHHLSRYLKDVKQHHVKADKRDPEFVFYDQLKQVMNAYRVKPAVFDLLLAVGIAAYLGMAYVAVQHFSLLYKTVQRLLVKAKTQ

SEQ ID NO: 56849 - protein, 489 aa, Homo sapiens
  Payload ID: 11176
  Gene Symbol: NCLN
  Gene Name: nicalin
  ENSP ID: ENSP00000466678
MAAEVLSRRCVLMRLLDFSYEQYQKALRQSAGAVVIILPRAMAAVPQDVVRQFMEIEPEMLAMETAVPVYFAVEDEALLSIYKQTQAASASQGSASAAEVLLRTATANGFQMVTSGVQSKAVSDWLIASVEGRLTGLGGEDLPTIVIVAHYDAFGVAPWLSLGADSNGSGVSVLLELARLFSRLYTYKRTHAAYNLLFFASGGGKFNYQGTKRWLEDNLDHTDSSLLQDNVAFVLCLDTVGRGSSLHLHVSKPPREGTLQHAFLRELETVAAHQFPEVRFSMVHKRINLAEDVLAWEHERFAIRRLPAFTLSHLESHRDGQRSSIMDVRSRVDSKTLTRNTRIIAEALTRVIYNLTEKGTPPDMPVFTEQMQIQQEQLDSVMDWLTNQPRAAQLVDKDSTFLSTLEHHLSRYLKDVKQHHVKADKRDPEFVFYDQLKQVMNAYRVKPAVFDLLLAVGIAAYLGMAYVAVQHFSLLYKTVQRLLVKAKTQ

SEQ ID NO: 56850 - protein, 72 aa, Homo sapiens
  Payload ID: 11176
  Gene Symbol: NCLN
  Gene Name: nicalin
  ENSP ID: ENSP00000466844
  MOD_RES (1)..(1): Any amino acid
XRDPEFVFYDQLKQVMNAYRVKPAVFDLLLAVGIAAYLGMAYVAVQVSSAQAQHFSLLYKTVQRLLVKAKTQ

SEQ ID NO: 56851 - protein, 328 aa, Homo sapiens
  Payload ID: 11176
  Gene Symbol: NCLN
  Gene Name: nicalin
  ENSP ID: ENSP00000467011
MLEEAGEVLENMLKASCLPLGFIVFLPAVLLLVAPPLPAADAAHEFTVYRMQQYDLQGQPYVLLRTATANGFQMVTSGVQSKAVSDWLIASVEGRLTGLGGEDLPTIVIVAHYDAFGVAPWLSLGADSNGSGVSVLLELARLFSRLYTYKRTHAAYNLLFFASGGGKFNYQGTKRWLEDNLDHTDSSLLQDNVAFVLCLDTVGRGSSLHLHVSKPPREGTLQHAFLRELETVAAHQFPEVRFSMVHKRINLAEDVLAWEHERFAIRRLPAFTLSHLESHRDGQRSSIMDVRSRVDSKTLTRNTRIIAEALTRVIYNLTEKGTPPDMPV

SEQ ID NO: 56852 - protein, 110 aa, Homo sapiens
  Payload ID: 11176
  Gene Symbol: NCLN
  Gene Name: nicalin
  ENSP ID: ENSP00000467693
  MOD_RES (1)..(1): Any amino acid
XLQDNVAFVLCLDTVGRGSSLHLHVSKPPREGTLQHAFLRELETVAAHQFPEVRFSMVHKRINLAEDVLAWEHERFAIRRLPAFTLSHLESHRDGQRSSIMDVRQSLTVS

SEQ ID NO: 56853 - protein, 709 aa, Homo sapiens
  Payload ID: 11177
  Gene Symbol: NCSTN
  Gene Name: nicastrin
  Uniprot ID: Q92542
  ENSP ID: ENSP00000294785
MATAGGGSGADPGSRGLLRLLSFCVLLAGLCRGNSVERKIYIPLNKTAPCVRLLNATHQIGCQSSISGDTGVIHVVEKEEDLQWVLTDGPNPPYMVLLESKHFTRDLMEKLKGRTSRIAGLAVSLTKPSPASGFSPSVQCPNDGFGVYSNSYGPEFAHCREIQWNSLGNGLAYEDFSFPIFLLEDENETKVIKQCYQDHNLSQNGSAPTFPLCAMQLFSHMHAVISTATCMRRSSIQSTFSINPEIVCDPLSDYNVWSMLKPINTTGTLKPDDRVVVAATRLDSRSFFWNVAPGAESAVASFVTQLAAAEALQKAPDVTTLPRNVMFVFFQGETFDYIGSSRMVYDMEKGKFPVQLENVDSFVELGQVALRTSLELWMHTDPVSQKNESVRNQVEDLLATLEKSGAGVPAVILRRPNQSQPLPPSSLQRFLRARNISGVVLADHSGAFHNKYYQSIYDTAENINVSYPEWLSPEEDLNFVTDTAKALADVATVLGRALYELAGGTNFSDTVQADPQTVTRLLYGFLIKANNSWFQSILRQDLRSYLGDGPLQHYIAVSSPTNTTYVVQYALANLTGTVVNLTREQCQDPSKVPSENKDLYEYSWVQGPLHSNETDRLPRCVRSTARLARALSPAFELSQWSSTEYSTWTESRWKDIRARIFLIASKELELITLTVGFGILIFSLIVTYCINAKADVLFIAPREPGAVSY

SEQ ID NO: 56854 - protein, 689 aa, Homo sapiens
  Payload ID: 11177
  Gene Symbol: NCSTN
  Gene Name: nicastrin
  Uniprot ID: Q92542
  ENSP ID: ENSP00000357042
MDFNLILESLCRGNSVERKIYIPLNKTAPCVRLLNATHQIGCQSSISGDTGVIHVVEKEEDLQWVLTDGPNPPYMVLLESKHFTRDLMEKLKGRTSRIAGLAVSLTKPSPASGFSPSVQCPNDGFGVYSNSYGPEFAHCREIQWNSLGNGLAYEDFSFPIFLLEDENETKVIKQCYQDHNLSQNGSAPTFPLCAMQLFSHMHAVISTATCMRRSSIQSTFSINPEIVCDPLSDYNVWSMLKPINTTGTLKPDDRVVVAATRLDSRSFFWNVAPGAESAVASFVTQLAAAEALQKAPDVTTLPRNVMFVFFQGETFDYIGSSRMVYDMEKGKFPVQLENVDSFVELGQVALRTSLELWMHTDPVSQKNESVRNQVEDLLATLEKSGAGVPAVILRRPNQSQPLPPSSLQRFLRARNISGVVLADHSGAFHNKYYQSIYDTAENINVSYPEWLSPEEDLNFVTDTAKALADVATVLGRALYELAGGTNFSDTVQADPQTVTRLLYGFLIKANNSWFQSILRQDLRSYLGDGPLQHYIAVSSPTNTTYVVQYALANLTGTVVNLTREQCQDPSKVPSENKDLYEYSWVQGPLHSNETDRLPRCVRSTARLARALSPAFELSQWSSTEYSTWTESRWKDIRARIFLIASKELELITLTVGFGILIFSLIVTYCINAKADVLFIAPREPGAVSY

SEQ ID NO: 56855 - protein, 319 aa, Homo sapiens
  Payload ID: 11177
  Gene Symbol: NCSTN
  Gene Name: nicastrin
  ENSP ID: ENSP00000388118
  MOD_RES (1)..(1): Any amino acid
XGFGVYSNSYGPEFAHCREIQWNSLGNGLAYEDFSFPIFLLEDENETKVIKQLFSHMHAVISTATCMRRSSIQSTFSINPEIVCDPLSDYNVWSMLKPINTTGTLKPDDRVVVAATRLDSRSFFWNVAPGAESAVASFVTQLAAAEALQKAPDVTTLPRNVMFVFFQGETFDYIGSSRMVYDMEKGKFPVQLENVDSFVELGQVALRTSLELWMHTDPVSQKNESVRNQVEDLLATLEKSGAGVPAVILRRPNQSQPLPPSSLQRFLRARNISGVVLADHSGAFHNKYYQSIYDTAENINVSYPEWLSPEEDLNFVTDT

SEQ ID NO: 56856 - protein, 232 aa, Homo sapiens
  Payload ID: 11177
  Gene Symbol: NCSTN
  Gene Name: nicastrin
  ENSP ID: ENSP00000389370
MATAGGGSGADPGSRGLLRLLSFCVLLAGLFLDFEPDPLPLCPDVSFFPQPQPPTPQSKGTGLCRGNSVERKIYIPLNKTAPCVRLLNATHQIGCQSSISGDTGVIHVVEKEEDLQWVLTDGPNPPYMVLLESKHFTRDLMEKLKGRTSRIAGLAVSLTKPSPASGFSPSVQCPNDGFGVYSNSYGPEFAHCREIQWNSLGNGLAYEDFSFPIFLLEDENETKVIKQCYQDH

SEQ ID NO: 56857 - protein, 255 aa, Homo sapiens
  Payload ID: 11177
  Gene Symbol: NCSTN
  Gene Name: nicastrin
  ENSP ID: ENSP00000390409
MATAGGGSGADPGSRGLLRLLSFCVLLAGLCRGNSVERKIYIPLNKTAPCVRLLNATHQIGCQSSISGDTGVIHVVEKEEDLQWVLTDGPNPPYMVLLESKHFTRDLMEKLKGRTSRIAGLAVSLTKPSPASGFSPSVQCPNDGFGVYSNSYGPEFAHCREIQWNSLGNGLAYEDFSFPIFLLEDENETKVIKQETFDYIGSSRMVYDMEKGKFPVQLENVDSFVELGQVALRTSLELWMHTDPVSQKNESVRNQ

SEQ ID NO: 56858 - protein, 275 aa, Homo sapiens
  Payload ID: 11177
  Gene Symbol: NCSTN
  Gene Name: nicastrin
  ENSP ID: ENSP00000407849
  MOD_RES (1)..(1): Any amino acid
XNVAPGAESAVASFVTQLAAAEALQKAPDVTTLPRNVMFVFFQGVALRTSLELWMHTDPVSQKNESVRNQVEDLLATLEKSGAGVPAVILRRPNQSQPLPPSSLQRFLRARNISGVVLADHSGAFHNKYYQSIYDTAENINVSYPEWLSPEEDLNFVTDTAKALADVATVLGRALYELAGGTNFSDTVQADPQTVTRLLYGFLIKANNSWFQSILRQDLRSYLGDGPLQHYIAVSSPTNTTYVVQYALANLTGTVVNLTREQCQDPSKVPSENKD

SEQ ID NO: 56859 - protein, 219 aa, Homo sapiens
  Payload ID: 11177
  Gene Symbol: NCSTN
  Gene Name: nicastrin
  ENSP ID: ENSP00000410124
RSSIQSTFSINPEIVCDPLSDYNVWSMLKPINTTGTLKPDDRVVVAATRLAAAEALQKAPDVTTLPRNVMFVFFQGETFDYIGSSRMVYDMEKGKFPVQLENVDSFVELGQVALRTSLELWMHTDPVSQKNESVRNQVEDLLATLEKSGAGVPAVILRRPNQSQPLPPSSLQRFLRARNISGVVLADHSGAFHNKYYQSIYDTAENINVSYPEWLSPEE

SEQ ID NO: 56860 - protein, 134 aa, Homo sapiens
  Payload ID: 11177
  Gene Symbol: NCSTN
  Gene Name: nicastrin
  ENSP ID: ENSP00000415442
MATAGGGSGADPGSRGLLRLLSFCVLLAGLCRGNSVERKIYIPLNKTAPCVRLLNATHQIGCQSSISGDTGVIHVVEKEEDLQWVLTDGPNPPYMVLLESKHFTRQNVRLSDTFLCSFMEFLSYSRDLMEKLKG

SEQ ID NO: 56861 - protein, 213 aa, Homo sapiens
  Payload ID: 11178
  Gene Symbol: NICN1
  Gene Name: nicolin 1
  Uniprot ID: Q9BSH3
  ENSP ID: ENSP00000273598
MSRVLVPCHVKGSVALQVGDVRTSQGRPGVLVIDVTFPSVAPFELQEITFKNYYTAFLSIRVRQYTSAHTPAKWVTCLRDYCLMPDPHSEEGAQEYVSLFKHQMLCDMARISELRLILRQPSPLWLSFTVEELQIYQQGPKSPSVTFPKWLSHPVPCEQPALLREGLPDPSRVSSEVQQMWALTEMIRASHTSARIGRFDVDGCYDLNLLSYT

SEQ ID NO: 56862 - protein, 175 aa, Homo sapiens
  Payload ID: 11178
  Gene Symbol: NICN1
  Gene Name: nicolin 1
  ENSP ID: ENSP00000402335
MSRVLVPCHVKGSVALQVGDVRTSQGRPGVLVIDVTFPSVAPFELQEITFKNYYTAFLSIRVRQYTSAHTPAKWVTCLRDYCLMPDPHSEEGAQEYVSLFKHQSPSVTFPKWLSHPVPCEQPALLREGLPDPSRVSSEVQQMWALTEMIRASHTSARIGRFDVDGCYDLNLLSYT

SEQ ID NO: 56863 - protein, 213 aa, Homo sapiens; identical to SEQ ID NO: 56861
  Payload ID: 11178
  Gene Symbol: NICN1
  Gene Name: nicolin 1
  Uniprot ID: Q9BSH3
  ENSP ID: ENSP00000413115

SEQ ID NO: 56864 - protein, 213 aa, Homo sapiens; identical to SEQ ID NO: 56861
  Payload ID: 11178
  Gene Symbol: NICN1
  Gene Name: nicolin 1
  Uniprot ID: Q9BSH3
  ENSP ID: ENSP00000478287

SEQ ID NO: 56865 - protein, 264 aa, Homo sapiens
  Payload ID: 11179
  Gene Symbol: NNMT
  Gene Name: nicotinamide N-methyltransferase
  Uniprot ID: P40261
  ENSP ID: ENSP00000299964
MESGFTSKDTYLSHFNPRDYLEKYYKFGSRHSAESQILKHLLKNLFKIFCLDGVKGDLLIDIGSGPTIYQLLSACESFKEIVVTDYSDQNLQELEKWLKKEPEAFDWSPVVTYVCDLEGNRVKGPEKEEKLRQAVKQVLKCDVTQSQPLGAVPLPPADCVLSTLCLDAACPDLPTYCRALRNLGSLLKPGGFLVIMDALKSSYYMIGEQKFSSLPLGREAVEAAVKEAGYTIEWFEVISQSYSSTMANNEGLFSLVARKLSRPL

SEQ ID NO: 56866 - protein, 264 aa, Homo sapiens; identical to SEQ ID NO: 56865
  Payload ID: 11179
  Gene Symbol: NNMT
  Gene Name: nicotinamide N-methyltransferase
  Uniprot ID: P40261
  ENSP ID: ENSP00000441434

SEQ ID NO: 56867 - protein, 279 aa, Homo sapiens
  Payload ID: 11180
  Gene Symbol: NMNAT1
  Gene Name: nicotinamide nucleotide adenylyltransferase 1
  Uniprot ID: Q9HAN9
  ENSP ID: ENSP00000366410
MENSEKTEVVLLACGSFNPITNMHLRLFELAKDYMNGTGRYTVVKGIISPVGDAYKKKGLIPAYHRVIMAELATKNSKWVEVDTWESLQKEWKETLKVLRHHQEKLEASDCDHQQNSPTLERPGRKRKWTETQDSSQKKSLEPKTKAVPKVKLLCGADLLESFAVPNLWKSEDITQIVANYGLICVTRAGNDAQKFIYESDVLWKHRSNIHVVNEWIANDISSTKIRRALRRGQSIRYLVPDLVQEYIEKHNLYSSESEDRNAGVILAPLQRNTAEAKT

SEQ ID NO: 56868 - protein, 160 aa, Homo sapiens
  Payload ID: 11180
  Gene Symbol: NMNAT1
  Gene Name: nicotinamide nucleotide adenylyltransferase 1
  ENSP ID: ENSP00000385131
MENSEKTEVVLLACGSFNPITNMHLRLFELAKDYMNGTGRYTVVKGIISPVGDAYKKKGLIPAYHRVIMAELATKNSKWVEVDTWESLQKEWKETLKVLRHHQEKLEASDCDHQQNSPTLERPGRKRKWTETQDSSQKKSLEPKTKDGVSLYHPGWSAVA

SEQ ID NO: 56869 - protein, 279 aa, Homo sapiens; identical to SEQ ID NO: 56867
  Payload ID: 11180
  Gene Symbol: NMNAT1
  Gene Name: nicotinamide nucleotide adenylyltransferase 1
  Uniprot ID: Q9HAN9
  ENSP ID: ENSP00000435134

SEQ ID NO: 56870 - protein, 42 aa, Homo sapiens
  Payload ID: 11180
  Gene Symbol: NMNAT1
  Gene Name: nicotinamide nucleotide adenylyltransferase 1
  ENSP ID: ENSP00000467340
  MOD_RES (1)..(1): Any amino acid
XASDCDHQQNSPTLERPGRKRKWTETQDSSQKKSLEPKTKGL

SEQ ID NO: 56871 - protein, 307 aa, Homo sapiens
  Payload ID: 11181
  Gene Symbol: NMNAT2
  Gene Name: nicotinamide nucleotide adenylyltransferase 2
  Uniprot ID: Q9BZQ4
  ENSP ID: ENSP00000287713
MTETTKTHVILLACGSFNPITKGHIQMFERARDYLHKTGRFIVIGGIVSPVHDSYGKQGLVSSRHRLIMCQLAVQNSDWIRVDPWECYQDTWQTTCSVLEHHRDLMKRVTGCILSNVNTPSMTPVIGQPQNETPQPIYQNSNVATKPTAAKILGKVGESLSRICCVRPPVERFTFVDENANLGTVMRYEEIELRILLLCGSDLLESFCIPGLWNEADMEVIVGDFGIVVVPRDAADTDRIMNHSSILRKYKNNIMVVKDDINHPMSVVSSTKSRLALQHGDGHVVDYLSQPVIDYILKSQLYINASG

SEQ ID NO: 56872 - protein, 302 aa, Homo sapiens
  Payload ID: 11181
  Gene Symbol: NMNAT2
  Gene Name: nicotinamide nucleotide adenylyltransferase 2
  Uniprot ID: Q9BZQ4
  ENSP ID: ENSP00000294868
MEIQELEEIQACQGLWEVFVTLSERARDYLHKTGRFIVIGGIVSPVHDSYGKQGLVSSRHRLIMCQLAVQNSDWIRVDPWECYQDTWQTTCSVLEHHRDLMKRVTGCILSNVNTPSMTPVIGQPQNETPQPIYQNSNVATKPTAAKILGKVGESLSRICCVRPPVERFTFVDENANLGTVMRYEEIELRILLLCGSDLLESFCIPGLWNEADMEVIVGDFGIVVVPRDAADTDRIMNHSSILRKYKNNIMVVKDDINHPMSVVSSTKSRLALQHGDGHVVDYLSQPVIDYILKSQLYINASG

SEQ ID NO: 56873 - protein, 252 aa, Homo sapiens
  Payload ID: 11182
  Gene Symbol: NMNAT3
  Gene Name: nicotinamide nucleotide adenylyltransferase 3
  Uniprot ID: Q96T66
  ENSP ID: ENSP00000296202
MKSRIPVVLLACGSFNPITNMHLRMFEVARDHLHQTGMYQVIQGIISPVNDTYGKKDLAASHHRVAMARLALQTSDWIRVDPWESEQAQWMETVKVLRHHHSKLLRSPPQMEGPDHGKALFSTPAAVPELKLLCGADVLKTFQTPNLWKDAHIQEIVEKFGLVCVGRVGHDPKGYIAESPILRMHQHNIHLAKEPVQNEISATYIRRALGQGQSVKYLIPDAVITYIKDHGLYTKGSTWKGKSTQSTEGKTS

SEQ ID NO: 56874 - protein, 215 aa, Homo sapiens
  Payload ID: 11182
  Gene Symbol: NMNAT3
  Gene Name: nicotinamide nucleotide adenylyltransferase 3
  Uniprot ID: Q96T66
  ENSP ID: ENSP00000340523
MYQVIQGIISPVNDTYGKKDLAASHHRVAMARLALQTSDWIRVDPWESEQAQWMETVKVLRHHHSKLLRSPPQMEGPDHGKALFSTPAAVPELKLLCGADVLKTFQTPNLWKDAHIQEIVEKFGLVCVGRVGHDPKGYIAESPILRMHQHNIHLAKEPVQNEISATYIRRALGQGQSVKYLIPDAVITYIKDHGLYTKGSTWKGKSTQSTEGKTS

SEQ ID NO: 56875 - protein, 252 aa, Homo sapiens; identical to SEQ ID NO: 56873
  Payload ID: 11182
  Gene Symbol: NMNAT3
  Gene Name: nicotinamide nucleotide adenylyltransferase 3
  Uniprot ID: Q96T66
  ENSP ID: ENSP00000384319

SEQ ID NO: 56876 - protein, 163 aa, Homo sapiens
  Payload ID: 11182
  Gene Symbol: NMNAT3
  Gene Name: nicotinamide nucleotide adenylyltransferase 3
  Uniprot ID: Q96T66
  ENSP ID: ENSP00000412953
MKSRIPVVLLACGSFNPITNMHLRMFEVARDHLHQTAVPELKLLCGADVLKTFQTPNLWKDAHIQEIVEKFGLVCVGRVGHDPKGYIAESPILRMHQHNIHLAKEPVQNEISATYIRRALGQGQSVKYLIPDAVITYIKDHGLYTKGSTWKGKSTQSTEGKTS

SEQ ID NO: 56877 - protein, 98 aa, Homo sapiens
  Payload ID: 11182
  Gene Symbol: NMNAT3
  Gene Name: nicotinamide nucleotide adenylyltransferase 3
  ENSP ID: ENSP00000423335
MKSRIPVVLLACGSFNPITNMHLRMFEVARDHLHQTGMYQVIQGIISPVNDTYGKKDLAASHHRVAMARLALQTSDWIRVDPWESEQAQWMETVKVLR

SEQ ID NO: 56878 - protein, 63 aa, Homo sapiens
  Payload ID: 11182
  Gene Symbol: NMNAT3
  Gene Name: nicotinamide nucleotide adenylyltransferase 3
  ENSP ID: ENSP00000425041
MYQVIQGIISPVNDTYGKKDLAASHHRVAMARLALQTSDWIRVDPWESEQAQWMETVKVLSCA

SEQ ID NO: 56879 - protein, 100 aa, Homo sapiens
  Payload ID: 11182
  Gene Symbol: NMNAT3
  Gene Name: nicotinamide nucleotide adenylyltransferase 3
  ENSP ID: ENSP00000426357
MKSRIPVVLLACGSFNPITNMHLRMFEVARDHLHQTGMYQVIQGIISPVNDTYGKKDLAASHHRVAMARLALQTSDWIRVDPWESEQAQWMETVKVLSCA

SEQ ID NO: 56880 - protein, 98 aa, Homo sapiens
  Payload ID: 11182
  Gene Symbol: NMNAT3
  Gene Name: nicotinamide nucleotide adenylyltransferase 3
  ENSP ID: ENSP00000426375
MKSRIPVVLLACGSFNPITNMHLRMFEVARDHLHQTDFCLSRPLFPRVHFSQHNQGKKKMGKSVHEVVGARLCLCPQKHQASPSKSPRTEVCKREEAN

SEQ ID NO: 56881 - protein, 113 aa, Homo sapiens
  Payload ID: 11182
  Gene Symbol: NMNAT3
  Gene Name: nicotinamide nucleotide adenylyltransferase 3
  ENSP ID: ENSP00000427634
MKSRIPVVLLACGSFNPITNMHLRMFEVARDHLHQTGMYQVIQGIISPVNDTYGKKDLAASHHRVAMARLALQTSDWIRVDPWESEQAQWMETVKVLRHHHSKLLRSPPQMEG

SEQ ID NO: 56882 - protein, 1086 aa, Homo sapiens
  Payload ID: 11183
  Gene Symbol: NNT
  Gene Name: nicotinamide nucleotide transhydrogenase
  Uniprot ID: Q13423
  ENSP ID: ENSP00000264663
MANLLKTVVTGCSCPLLSNLGSCKGLRVKKDFLRTFYTHQELWCKAPVKPGIPYKQLTVGVPKEIFQNEKRVALSPAGVQNLVKQGFNVVVESGAGEASKFSDDHYRVAGAQIQGAKEVLASDLVVKVRAPMVNPTLGVHEADLLKTSGTLISFIYPAQNPELLNKLSQRKTTVLAMDQVPRVTIAQGYDALSSMANIAGYKAVVLAANHFGRFFTGQITAAGKVPPAKILIVGGGVAGLASAGAAKSMGAIVRGFDTRAAALEQFKSLGAEPLEVDLKESGEGQGGYAKEMSKEFIEAEMKLFAQQCKEVDILISTALIPGKKAPVLFNKEMIESMKEGSVVVDLAAEAGGNFETTKPGELYIHKGITHIGYTDLPSRMATQASTLYSNNITKLLKAISPDKDNFYFDVKDDFDFGTMGHVIRGTVVMKDGKVIFPAPTPKNIPQGAPVKQKTVAELEAEKAATITPFRKTMSTASAYTAGLTGILGLGIAAPNLAFSQMVTTFGLAGIVGYHTVWGVTPALHSPLMSVTNAISGLTAVGGLALMGGHLYPSTTSQGLAALAAFISSVNIAGGFLVTQRMLDMFKRPTDPPEYNYLYLLPAGTFVGGYLAALYSGYNIEQIMYLGSGLCCVGALAGLSTQGTARLGNALGMIGVAGGLAATLGVLKPGPELLAQMSGAMALGGTIGLTIAKRIQISDLPQLVAAFHSLVGLAAVLTCIAEYIIEYPHFATDAAANLTKIVAYLGTYIGGVTFSGSLIAYGKLQGLLKSAPLLLPGRHLLNAGLLAASVGGIIPFMVDPSFTTGITCLGSVSALSAVMGVTLTAAIGGADMPVVITVLNSYSGWALCAEGFLLNNNLLTIVGALIGSSGAILSYIMCVAMNRSLANVILGGYGTTSTAGGKPMEISGTHTEINLDNAIDMIREANSIIITPGYGLCAAKAQYPIADLVKMLTEQGKKVRFGIHPVAGRMPGQLNVLLAEAGVPYDIVLEMDEINHDFPDTDLVLVIGANDTVNSAAQEDPNSIIAGMPVLEVWKSKQVIVMKRSLGVGYAAVDNPIFYKPNTAMLLGDAKKTCDALQAKVRESYQK

SEQ ID NO: 56883 - protein, 1086 aa, Homo sapiens; identical to SEQ ID NO: 56882
  Payload ID: 11183
  Gene Symbol: NNT
  Gene Name: nicotinamide nucleotide transhydrogenase
  Uniprot ID: Q13423
  ENSP ID: ENSP00000343873

SEQ ID NO: 56884 - protein, 57 aa, Homo sapiens
  Payload ID: 11183
  Gene Symbol: NNT
  Gene Name: nicotinamide nucleotide transhydrogenase
  ENSP ID: ENSP00000421674
DGKVIFPAPTPKNIPQGAPVKQKTVAELEAEKAATITPFRKTMSTASAYTADEDREG

SEQ ID NO: 56885 - protein, 217 aa, Homo sapiens
  Payload ID: 11183
  Gene Symbol: NNT
  Gene Name: nicotinamide nucleotide transhydrogenase
  ENSP ID: ENSP00000421886
MANLLKTVVTGCSCPLLSNLGSCKGLRVKKDFLRTFYTHQELWCKAPVKPGIPYKQLTVGVPKEIFQNEKRVALSPAGVQNLVKQGFNVVVESGAGEASKFSDDHYRVAGAQIQGAKEVLASDLVVKVRAPMVNPTLGVHEADLLKTSGTLISFIYPAQNPELLNKLSQRKTTVLAMDQVPRVTIAQGYDALSSMANIAGYKAVVLAANHFGRFFTG

SEQ ID NO: 56886 - protein, 11 aa, Homo sapiens
  Payload ID: 11183
  Gene Symbol: NNT
  Gene Name: nicotinamide nucleotide transhydrogenase
  ENSP ID: ENSP00000424782
  MOD_RES (1)..(1): Any amino acid
XLTEQGKKVRY

SEQ ID NO: 56887 - protein, 58 aa, Homo sapiens
  Payload ID: 11183
  Gene Symbol: NNT
  Gene Name: nicotinamide nucleotide transhydrogenase
  ENSP ID: ENSP00000425542
MVNPTLGVHEADLLKTSGTLISFIYPAQNPELLNKLSQRKTTVLAMDQVPRVTIAQGY

SEQ ID NO: 56888 - protein, 955 aa, Homo sapiens
  Payload ID: 11183
  Gene Symbol: NNT
  Gene Name: nicotinamide nucleotide transhydrogenase
  ENSP ID: ENSP00000426343
MVNPTLGVHEADLLKTSGTLISFIYPAQNPELLNKLSQRKTTVLAMDQVPRVTIAQGYDALSSMANIAGYKAVVLAANHFGRFFTGQITAAGKVPPAKILIVGGGVAGLASAGAAKSMGAIVRGFDTRAAALEQFKSLGAEPLEVDLKESGEGQGGYAKEMSKEFIEAEMKLFAQQCKEVDILISTALIPGKKAPVLFNKEMIESMKEGSVVVDLAAEAGGNFETTKPGELYIHKGITHIGYTDLPSRMATQASTLYSNNITKLLKAISPDKDNFYFDVKDDFDFGTMGHVIRGTVVMKDGKVIFPAPTPKNIPQGAPVKQKTVAELEAEKAATITPFRKTMSTASAYTAGLTGILGLGIAAPNLAFSQMVTTFGLAGIVGYHTVWGVTPALHSPLMSVTNAISGLTAVGGLALMGGHLYPSTTSQGLAALAAFISSVNIAGGFLVTQRMLDMFKRPTDPPEYNYLYLLPAGTFVGGYLAALYSGYNIEQIMYLGSGLCCVGALAGLSTQGTARLGNALGMIGVAGGLAATLGVLKPGPELLAQMSGAMALGGTIGLTIAKRIQISDLPQLVAAFHSLVGLAAVLTCIAEYIIEYPHFATDAAANLTKIVAYLGTYIGGVTFSGSLIAYGKLQGLLKSAPLLLPGRHLLNAGLLAASVGGIIPFMVDPSFTTGITCLGSVSALSAVMGVTLTAAIGGADMPVVITVLNSYSGWALCAEGFLLNNNLLTIVGALIGSSGAILSYIMCVAMNRSLANVILGGYGTTSTAGGKPMEISGTHTEINLDNAIDMIREANSIIITPGYGLCAAKAQYPIADLVKMLTEQGKKVRFGIHPVAGRMPGQLNVLLAEAGVPYDIVLEMDEINHDFPDTDLVLVIGANDTVNSAAQEDPNSIIAGMPVLEVWKSKQVIVMKRSLGVGYAAVDNPIFYKPNTAMLLGDAKKTCDALQAKVRESYQK

SEQ ID NO: 56889 - protein, 199 aa, Homo sapiens
  Payload ID: 11183
  Gene Symbol: NNT
  Gene Name: nicotinamide nucleotide transhydrogenase
  ENSP ID: ENSP00000427670
MANLLKTVVTGCSCPLLSNLGSCKGLRVKKDFLRTFYTHQELWCKAPVKPGIPYKQLTVGVPKEIFQNEKRVALSPAGVQNLVKQGFNVVVESGAGEASKFSDDHYRVAGAQIQGAKEVLASDLVVKVRAPMVNPTLGVHEADLLKTSGTLISFIYPAQNPELLNKLSQRKTTVLAMDQVPRVTIAQGYDALSSMANIA

SEQ ID NO: 56890 - protein, 491 aa, Homo sapiens [sequence omitted]

SEQ ID NO: 56891 - protein, 368 aa, Homo sapiens
  Payload ID: 11184
  Gene Symbol: NAMPT
  Gene Name: nicotinamide phosphoribosyltransferase
  ENSP ID: ENSP00000346242
MNPAAEAEFNILLATDSYKVTHYKQYPPNTSKVYSYFECREKKTENSKLRKVKYEETVFYGLQYILNKYLKGKVVTKEKIQEAKDVYKEHFQDDVFNEKGWNYILEKYDGHLPIEIKAVPEGFVIPRGNVLFTVENTDPECYWLTNWIETILVQSWYPITVATNSREQKKILAKYLLETSGNLDGLEYKLHDFGYRGVSSQETAGIGASAHLVNFKGTDTVAGLALIKKYYGTKDPVPGYSVPAAEHSTITAWGKDHEKDAFEHIVTQFSSVPVSVVSDSYDIYNACEKIWGEDLRHLIVSRSTQAPLIIRPDSGNPLDTVLKVLEILGKKFPVTENSKGYKLLPPYLRVIQGDGVDINTLQEVCVLY

SEQ ID NO: 56892 - protein, 88 aa, Homo sapiens
  Payload ID: 11184
  Gene Symbol: NAMPT
  Gene Name: nicotinamide phosphoribosyltransferase
  ENSP ID: ENSP00000390591
MNPAAEAEFNILLATDSYKVTHYKQYPPNTSKVYSYFECREKKTENSKLRKVKYEETVFYGLQYILNKYLKGKVVTKEKIQEAKDVYK

SEQ ID NO: 56893 - protein, 60 aa, Homo sapiens
  Payload ID: 11184
  Gene Symbol: NAMPT
  Gene Name: nicotinamide phosphoribosyltransferase
  ENSP ID: ENSP00000390896
MNPAAEAEFNILLATDSYKVTHYKQYPPNTSKVYSYFECREKKTENSKLRKVKYEETVFY

SEQ ID NO: 56894 - protein, 199 aa, Homo sapiens
  Payload ID: 11185
  Gene Symbol: NMRK1
  Gene Name: nicotinamide riboside kinase 1
  Uniprot ID: Q9NWW6
  ENSP ID: ENSP00000354387
MKTFIIGISGVTNSGKTTLAKNLQKHLPNCSVISQDDFFKPESEIETDKNGFLQYDVLEALNMEKMMSAISCWMESARHSVVSTDQESAEEIPILIIEGFLLFNYKPLDTIWNRSYFLTIPYEECKRRRSTRVYQPPDSPGYFDGHVWPMYLKYRQEMQDITWEVVYLDGTKSEEDLFLQVYEDLIQELAKQKCLQVTA

SEQ ID NO: 56895 - protein, 175 aa, Homo sapiens
  Payload ID: 11185
  Gene Symbol: NMRK1
  Gene Name: nicotinamide riboside kinase 1
  Uniprot ID: Q9NWW6
  ENSP ID: ENSP00000366004
MKTFIIGISGVTNSGKTTLAKNLQKHLPNCSVISQDDFFKPESEIETDKNGFLQYDVLEALNMEKMMSAISCWMESARHSVVSTDQESAEEIPILIIEGFLLFNYNTRVYQPPDSPGYFDGHVWPMYLKYRQEMQDITWEVVYLDGTKSEEDLFLQVYEDLIQELAKQKCLQVTA

SEQ ID NO: 56896 - protein, 203 aa, Homo sapiens
  Payload ID: 11185
  Gene Symbol: NMRK1
  Gene Name: nicotinamide riboside kinase 1
  ENSP ID: ENSP00000366007
MGKRRHRRGNVISCVTNSGKTTLAKNLQKHLPNCSVISQDDFFKPESEIETDKNGFLQYDVLEALNMEKMMSAISCWMESARHSVVSTDQESAEEIPILIIEGFLLFNYKPLDTIWNRSYFLTIPYEECKRRRSTRVYQPPDSPGYFDGHVWPMYLKYRQEMQDITWEVVYLDGTKSEEDLFLQVYEDLIQELAKQKCLQVTA

SEQ ID NO: 56897 - protein, 106 aa, Homo sapiens
  Payload ID: 11185
  Gene Symbol: NMRK1
  Gene Name: nicotinamide riboside kinase 1
  ENSP ID: ENSP00000435736
MKTFIIGISGVTNSGKTTLAKNLQKHLPNCSVISQDDFFKPESEIETDKNGFLQYDVLEALNMEKMMSAISCWMESARHSVVSTDQESAEEIPILIIEGFLLFNYK

SEQ ID NO: 56898 - protein, 230 aa, Homo sapiens
  Payload ID: 11186
  Gene Symbol: NMRK2
  Gene Name: nicotinamide riboside kinase 2
  Uniprot ID: Q9NPI5
  ENSP ID: ENSP00000168977
MKLIVGIGGMTNGGKTTLTNSLLRALPNCCVIHQDDFFKPQDQIAVGEDGFKQWDVLESLDMEAMLDTVQAWLSSPQKFARAHGVSVQPEASDTHILLLEGFLLYSYKPLVDLYSRRYFLTVPYEECKWRRSTRNYTVPDPPGLFDGHVWPMYQKYRQEMEANGVEVVYLDGMKSREELFREVLEDIQNSLLNRSQESAPSPARPARTQGPGRGCGHRTARPAASQQDSM

SEQ ID NO: 56899 - protein, 83 aa, Homo sapiens
  Payload ID: 11186
  Gene Symbol: NMRK2
  Gene Name: nicotinamide riboside kinase 2
  ENSP ID: ENSP00000468935
  MOD_RES (1)..(1): Any amino acid
XLPNCCVIHQDDFFKPQDQIAVGEDGFKQWDVLESLDMEAMLDTVQAWLSSPQKPRTPTSSSWKASCSTATSPWWTCTAAGTS

SEQ ID NO: 56900 - protein, 112 aa, Homo sapiens
  Payload ID: 11186
  Gene Symbol: NMRK2
  Gene Name: nicotinamide riboside kinase 2
  ENSP ID: ENSP00000471436
MTNGGKTTLTNSLLRALPNCCVIHQDDFFKPQDQIAVGEDGFKQWDVLESLDMEAMLDTVQAWLSSPQKFARAHGVSVQPEASDTHILLLEGFLLYSYNLPGRHEVPRGALP

SEQ ID NO: 56901 - protein, 235 aa, Homo sapiens
  Payload ID: 11186
  Gene Symbol: NMRK2
  Gene Name: nicotinamide riboside kinase 2
  Uniprot ID: Q9NPI5
  ENSP ID: ENSP00000472581
MKLIVGIGGMTNGGKTTLTNSLLRALPNCCVIHQDDFFKAPLFQPQDQIAVGEDGFKQWDVLESLDMEAMLDTVQAWLSSPQKFARAHGVSVQPEASDTHILLLEGFLLYSYKPLVDLYSRRYFLTVPYEECKWRRSTRNYTVPDPPGLFDGHVWPMYQKYRQEMEANGVEVVYLDGMKSREELFREVLEDIQNSLLNRSQESAPSPARPARTQGPGRGCGHRTARPAASQQDSM

SEQ ID NO: 56902 - protein, 235 aa, Homo sapiens; identical to SEQ ID NO: 56901
  Payload ID: 11186
  Gene Symbol: NMRK2
  Gene Name: nicotinamide riboside kinase 2
  Uniprot ID: Q9NPI5
  ENSP ID: ENSP00000480091

SEQ ID NO: 56903 - protein, 584 aa, Homo sapiens
  Payload ID: 11187
  Gene Symbol: NAPRT
  Gene Name: nicotinate phosphoribosyltransferase
  ENSP ID: ENSP00000341136
MAAEQDPEARAAARPLLTDLYQATMALGYWRAGRARDAAEFELFFRRCPFGGAFALAAGLRDCVRFLRAFRLRDADVQFLASVLPPDTDPAFFEHLRALDCSEVTVRALPEGSLAFPGVPLLQVSGPLLVVQLLETPLLCLVSYASLVATNAARLRLIAGPEKRLLEMGLRRAQGPDGGLTASTYSYLGGFDSSSNVLAGQLRGVPVAGTLAHSFVTSFSGSEVPPDPMLAPAAGEGPGVDLAAKAQVWLEQVCAHLGLGVQEPHPGERAAFVAYALAFPRAFQGLLDTYSVWRSGLPNFLAVALALGELGYRAVGVRLDSGDLLQQAQEIRKVFRAAAAQFQVPWLESVLIVVSNNIDEEALARLAQEGSEVNVIGIGTSVVTCPQQPSLGGVYKLVAVGGQPRMKLTEDPEKQTLPGSKAAFRLLGSDGSPLMDMLQLAEEPVPQAGQELRVWPPGAQEPCTVRPAQVEPLLRLCLQQGQLCEPLPSLAESRALAQLSLSRLSPEHRRLRSPAQYQVGGRPTLSFCPVRPRPHPAHRSCPLLPAGGAVREAAGPGEQSVCGAVPLRLGAGLTGNNTNHSLFP

SEQ ID NO: 56904 - protein, 525 aa, Homo sapiens
  Payload ID: 11187
  Gene Symbol: NAPRT
  Gene Name: nicotinate phosphoribosyltransferase
  Uniprot ID: Q6XQN6
  ENSP ID: ENSP00000390949
MAAEQDPEARAAARPLLTDLYQATMALGYWRAGRARDAAEFELFFRRCPFGGAFALAAGLRDCVRFLRAFRLRDADVQFLASVLPPDTDPAFFEHLRALDCSEVTVRALPEGSLAFPGVPLLQVSGPLLVVQLLETPLLCLVSYASLVATNAARLRLIAGPEKRLLEMGLRRAQGPDGGLTASTYSYLGGFDSSSNVLAGQLRGVPVAGTLAHSFVTSFSGSEVPPDPMLAPAAGEGPGVDLAAKAQVWLEQVCAHLGLGVQEPHPGERAAFVAYALAFPRAFQGLLDTYSVWRSGLPNFLAVALALGELGYRAVGVRLDSGDLLQQAQEIRKVFRAAAAQFQVPWLESVLIVVSNNIDEEALARLAQEGSEVNVIGIGTSVVTCPQQPSLGGVYKLVAVGGQPRMKLTEDPEKQTLPGSKAAFRLLGSDGSPLMDMLQLAEEPVPQAGQELRVWPPGAQEPCTVRPAQLCEPLPSLAESRALAQLSLSRLSPEHRRLRSPAQYQVVLSERLQALVNSLCAGQSP

SEQ ID NO: 56905 - protein, 538 aa, Homo sapiens
  Payload ID: 11187
  Gene Symbol: NAPRT
  Gene Name: nicotinate phosphoribosyltransferase
  Uniprot ID: Q6XQN6
  ENSP ID: ENSP00000401508
MAAEQDPEARAAARPLLTDLYQATMALGYWRAGRARDAAEFELFFRRCPFGGAFALAAGLRDCVRFLRAFRLRDADVQFLASVLPPDTDPAFFEHLRALDCSEVTVRALPEGSLAFPGVPLLQVSGPLLVVQLLETPLLCLVSYASLVATNAARLRLIAGPEKRLLEMGLRRAQGPDGGLTASTYSYLGGFDSSSNVLAGQLRGVPVAGTLAHSFVTSFSGSEVPPDPMLAPAAGEGPGVDLAAKAQVWLEQVCAHLGLGVQEPHPGERAAFVAYALAFPRAFQGLLDTYSVWRSGLPNFLAVALALGELGYRAVGVRLDSGDLLQQAQEIRKVFRAAAAQFQVPWLESVLIVVSNNIDEEALARLAQEGSEVNVIGIGTSVVTCPQQPSLGGVYKLVAVGGQPRMKLTEDPEKQTLPGSKAAFRLLGSDGSPLMDMLQLAEEPVPQAGQELRVWPPGAQEPCTVRPAQVEPLLRLCLQQGQLCEPLPSLAESRALAQLSLSRLSPEHRRLRSPAQYQVVLSERLQALVNSLCAGQSP

SEQ ID NO: 56906 - protein, 490 aa, Homo sapiens
  Payload ID: 11187
  Gene Symbol: NAPRT
  Gene Name: nicotinate phosphoribosyltransferase
  ENSP ID: ENSP00000405670
MAAEQDPEARAAARPLLTDLYQATMALGYWRAGRARDAAEFELFFRRCPFGGAFALAAGLRDCVRFLRAFRLRDADVQFLASVLPPDTDPAFFEHLRALDCSEVTVRALPEGSLAFPGVPLLQVSGPLLVVQLLETPLLCLVSYASLVATNAARLRLIAGPEKRLLEMGLRRAQGPDGGLTASTYSYLGGFDSSSNVLAGQLRGVPVAGTLAHSFVTSFSGSEVPPDPMLAPAAGEGPGVDLAAKAQVWLEQVCAHLGLGVQEPHPGERAAFVAYALAFPRAFQGLLDTYSVWRSGLPNFLAVALALGELGYRAVGVRLDSGDLLQQAQEIRKVFRAAAAQFQVPWLESVLIVVSNNIDEEALARLAQEGSEVNVIGIGTSVVTCPQQPSLGGVYKLVAVGGQPRMKLTEDPEKQTLPGSKAAFRLLGSDGSPLMDMLQLAEEPVPQAGQELRVWPPGAQEPCTVRPAQVEPLLRLCLQQGQVAAPPPSS

SEQ ID NO: 56907 - protein, 128 aa, Homo sapiens
  Payload ID: 11187
  Gene Symbol: NAPRT
  Gene Name: nicotinate phosphoribosyltransferase
  ENSP ID: ENSP00000433245
  MOD_RES (1)..(1): Any amino acid
XALAAGLRDCVRFLRAFRLRDADVQFLASVLPPDTDPAFFEHLRALDCSEVPLLQVSGPLLVVQLLETPLLCLVSYASLVATNAARLRLIAGPEKRLLEMGLRRAQGPDGGLTASTYSYLGDVGASSW

SEQ ID NO: 56908 - protein, 163 aa, Homo sapiens
  Payload ID: 11187
  Gene Symbol: NAPRT
  Gene Name: nicotinate phosphoribosyltransferase
  ENSP ID: ENSP00000437102
  MOD_RES (1)..(1): Any amino acid
XARDAAEFELFFRRCPFGGAFALAAGLRDCVRFLRAFRLRDADVQFLASVLPPDTDPAFFEHLRALDCSEVTVRALPEGSLAFPGVPLLQVSGPLLVVQLLETPLLCLVSYASLVATNAARLRLIAGPEKRLLEMGLRRAQGPDGGLTASTYSYLGDVGASSW

SEQ ID NO: 56909 - protein, 232 aa, Homo sapiens
  Payload ID: 11187
  Gene Symbol: NAPRT
  Gene Name: nicotinate phosphoribosyltransferase
  ENSP ID: ENSP00000478911
  MOD_RES (1)..(1): Any amino acid
XFQVPWLESVLIVVSNNIDEEALARLAQEGSEVNVIGIGTSVVTCPQQPSLGGVYKLVAVGGQPRMKLTEDPEKQTLPGSKAAFRLLGSDGSPLMDMLQLAEEPVPQAGQELRVWPPGAQEPCTVRPAQLCEPLPSLAESRALAQLSLSRLSPEHRRLRSPAQYQVGGRPTLSFCPVRPRPHPAHRSCPLLPAGGAVREAAGPGEQSVCGAVPLRLGAGLTGNNTNHSLFPT

SEQ ID NO: 56910 - protein, 538 aa, Homo sapiens; identical to SEQ ID NO: 56905
  Payload ID: 11187
  Gene Symbol: NAPRT
  Gene Name: nicotinate phosphoribosyltransferase
  Uniprot ID: Q6XQN6
  ENSP ID: ENSP00000480017

SEQ ID NO: 56911 - protein, 128 aa, Homo sapiens; identical to SEQ ID NO: 56907
  Payload ID: 11187
  Gene Symbol: NAPRT
  Gene Name: nicotinate phosphoribosyltransferase
  ENSP ID: ENSP00000487629
  MOD_RES (1)..(1): Any amino acid

SEQ ID NO: 56912 - protein, 232 aa, Homo sapiens; identical to SEQ ID NO: 56909
  Payload ID: 11187
  Gene Symbol: NAPRT
  Gene Name: nicotinate phosphoribosyltransferase
  ENSP ID: ENSP00000487892
  MOD_RES (1)..(1): Any amino acid

SEQ ID NO: 56913 - protein, 163 aa, Homo sapiens; identical to SEQ ID NO: 56908
  Payload ID: 11187
  Gene Symbol: NAPRT
  Gene Name: nicotinate phosphoribosyltransferase
  ENSP ID: ENSP00000488253
  MOD_RES (1)..(1): Any amino acid

SEQ ID NO: 56914 - protein, 584 aa, Homo sapiens; identical to SEQ ID NO: 56903
  Payload ID: 11187
  Gene Symbol: NAPRT
  Gene Name: nicotinate phosphoribosyltransferase
  ENSP ID: ENSP00000488704

SEQ ID NO: 56915 - protein, 525 aa, Homo sapiens; identical to SEQ ID NO: 56904
  Payload ID: 11187
  Gene Symbol: NAPRT
  Gene Name: nicotinate phosphoribosyltransferase
  Uniprot ID: Q6XQN6
  ENSP ID: ENSP00000488794

SEQ ID NO: 56916 - protein, 1247 aa, Homo sapiens
  Payload ID: 11188
  Gene Symbol: NID1
  Gene Name: nidogen 1
  Uniprot ID: P14543
  ENSP ID: ENSP00000264187
MLASSSRIRAAWTRALLLPLLLAGPVGCLSRQELFPFGPGQGDLELEDGDDFVSPALELSGALRFYDRSDIDAVYVTTNGIIATSEPPAKESHPGLFPPTFGAVAPFLADLDTTDGLGKVYYREDLSPSITQRAAECVHRGFPEISFQPSSAVVVTWESVAPYQGPSRDPDQKGKRNTFQAVLASSDSSSYAIFLYPEDGLQFHTTFSKKENNQVPAVVAFSQGSVGFLWKSNGAYNIFANDRESVENLAKSSNSGQQGVWVFEIGSPATTNGVVPADVILGTEDGAEYDDEDEDYDLATTRLGLEDVGTTPFSYKALRRGGADTYSVPSVLSPRRAATERPLGPPTERTRSFQLAVETFHQQHPQVIDVDEVEETGVVFSYNTDSRQTCANNRHQCSVHAECRDYATGFCCSCVAGYTGNGRQCVAEGSPQRVNGKVKGRIFVGSSQVPIVFENTDLHSYVVMNHGRSYTAISTIPETVGYSLLPLAPVGGIIGWMFAVEQDGFKNGFSITGGEFTRQAEVTFVGHPGNLVIKQRFSGIDEHGHLTIDTELEGRVPQIPFGSSVHIEPYTELYHYSTSVITSSSTREYTVTEPERDGASPSRIYTYQWRQTITFQECVHDDSRPALPSTQQLSVDSVFVLYNQEEKILRYALSNSIGPVREGSPDALQNPCYIGTHGCDTNAACRPGPRTQFTCECSIGFRGDGRTCYDIDECSEQPSVCGSHTICNNHPGTFRCECVEGYQFSDEGTCVAVVDQRPINYCETGLHNCDIPQRAQCIYTGGSSYTCSCLPGFSGDGQACQDVDECQPSRCHPDAFCYNTPGSFTCQCKPGYQGDGFRCVPGEVEKTRCQHEREHILGAAGATDPQRPIPPGLFVPECDAHGHYAPTQCHGSTGYCWCVDRDGREVEGTRTRPGMTPPCLSTVAPPIHQGPAVPTAVIPLPPGTHLLFAQTGKIERLPLEGNTMRKTEAKAFLHVPAKVIIGLAFDCVDKMVYWTDITEPSIGRASLHGGEPTTIIRQDLGSPEGIAVDHLGRNIFWTDSNLDRIEVAKLDGTQRRVLFETDLVNPRGIVTDSVRGNLYWTDWNRDNPKIETSYMDGTNRRILVQDDLGLPNGLTFDAFSSQLCWVDAGTNRAECLNPSQPSRRKALEGLQYPFAVTSYGKNLYFTDWKMNSVVALDLAISKETDAFQPHKQTRLYGITTALSQCPQGHNYCSVNNGGCTHLCLATPGSRTCRCPDNTLGVDCIEQK

SEQ ID NO: 56917 - protein, 1114 aa, Homo sapiens
  Payload ID: 11188
  Gene Symbol: NID1
  Gene Name: nidogen 1
  Uniprot ID: P14543
  ENSP ID: ENSP00000355554
MLASSSRIRAAWTRALLLPLLLAGPVGCLSRQELFPFGPGQGDLELEDGDDFVSPALELSGALRFYDRSDIDAVYVTTNGIIATSEPPAKESHPGLFPPTFGAVAPFLADLDTTDGLGKVYYREDLSPSITQRAAECVHRGFPEISFQPSSAVVVTWESVAPYQGPSRDPDQKGKRNTFQAVLASSDSSSYAIFLYPEDGLQFHTTFSKKENNQVPAVVAFSQGSVGFLWKSNGAYNIFANDRESVENLAKSSNSGQQGVWVFEIGSPATTNGVVPADVILGTEDGAEYDDEDEDYDLATTRLGLEDVGTTPFSYKALRRGGADTYSVPSVLSPRRAATERPLGPPTERTRSFQLAVETFHQQHPQVIDVDEVEETGVVFSYNTDSRQTCANNRHQCSVHAECRDYATGFCCSCVAGYTGNGRQCVAEGSPQRVNGKVKGRIFVGSSQVPIVFENTDLHSYVVMNHGRSYTAISTIPETVGYSLLPLAPVGGIIGWMFAVEQDGFKNGFSITGGEFTRQAEVTFVGHPGNLVIKQRFSGIDEHGHLTIDTELEGRVPQIPFGSSVHIEPYTELYHYSTSVITSSSTREYTVTEPERDGASPSRIYTYQWRQTITFQECVHDDSRPALPSTQQLSVDSVFVLYNQEEKILRYALSNSIGPVREGSPDALQNPCYIGTHGCDTNAACRPGPRTQFTCECSIGFRGDGRTCYEVEKTRCQHEREHILGAAGATDPQRPIPPGLFVPECDAHGHYAPTQCHGSTGYCWCVDRDGREVEGTRTRPGMTPPCLSTVAPPIHQGPAVPTAVIPLPPGTHLLFAQTGKIERLPLEGNTMRKTEAKAFLHVPAKVIIGLAFDCVDKMVYWTDITEPSIGRASLHGGEPTTIIRQDLGSPEGIAVDHLGRNIFWTDSNLDRIEVAKLDGTQRRVLFETDLVNPRGIVTDSVRGNLYWTDWNRDNPKIETSYMDGTNRRILVQDDLGLPNGLTFDAFSSQLCWVDAGTNRAECLNPSQPSRRKALEGLQYPFAVTSYGKNLYFTDWKMNSVVALDLAISKETDAFQPHKQTRLYGITTALSQCPQGHNYCSVNNGGCTHLCLATPGSRTCRCPDNTLGVDCIEQK

SEQ ID NO: 56918 - protein, 1375 aa, Homo sapiens
  Payload ID: 11189
  Gene Symbol: NID2
  Gene Name: nidogen 2 (osteonidogen)
  Uniprot ID: Q14112
  ENSP ID: ENSP00000216286
MEGDRVAGRPVLSSLPVLLLLPLLMLRAAALHPDELFPHGESWGDQLLQEGDDESSAVVKLANPLHFYEARFSNLYVGTNGIISTQDFPRETQYVDYDFPTDFPAIAPFLADIDTSHGRGRVLYREDTSPAVLGLAARYVRAGFPRSARFTPTHAFLATWEQVGAYEEVKRGALPSGELNTFQAVLASDGSDSYALFLYPANGLQFLGTRPKESYNVQLQLPARVGFCRGEADDLKSEGPYFSLTSTEQSVKNLYQLSNLGIPGVWAFHIGSTSPLDNVRPAAVGDLSAAHSSVPLGRSFSHATALESDYNEDNLDYYDVNEEEAEYLPGEPEEALNGHSSIDVSFQSKVDTKPLEESSTLDPHTKEGTSLGEVGGPDLKGQVEPWDERETRSPAPPEVDRDSLAPSWETPPPYPENGSIQPYPDGGPVPSEMDVPPAHPEEEIVLRSYPASGHTTPLSRGTYEVGLEDNIGSNTEVFTYNAANKETCEHNHRQCSRHAFCTDYATGFCCHCQSKFYGNGKHCLPEGAPHRVNGKVSGHLHVGHTPVHFTDVDLHAYIVGNDGRAYTAISHIPQPAAQALLPLTPIGGLFGWLFALEKPGSENGFSLAGAAFTHDMEVTFYPGEETVRITQTAEGLDPENYLSIKTNIQGQVPYVSANFTAHISPYKELYHYSDSTVTSTSSRDYSLTFGAINQTWSYRIHQNITYQVCRHAPRHPSFPTTQQLNVDRVFALYNDEERVLRFAVTNQIGPVKEDSDPTPGNPCYDGSHMCDTTARCHPGTGVDYTCECASGYQGDGRNCVDENECATGFHRCGPNSVCINLPGSYRCECRSGYEFADDRHTCILITPPANPCEDGSHTCAPAGQARCVHHGGSTFSCACLPGYAGDGHQCTDVDECSENRCHPAATCYNTPGSFSCRCQPGYYGDGFQCIPDSTSSLTPCEQQQRHAQAQYAYPGARFHIPQCDEQGNFLPLQCHGSTGFCWCVDPDGHEVPGTQTPPGSTPPHCGPSPEPTQRPPTICERWRENLLEHYGGTPRDDQYVPQCDDLGHFIPLQCHGKSDFCWCVDKDGREVQGTRSQPGTTPACIPTVAPPMVRPTPRPDVTPPSVGTFLLYTQGQQIGYLPLNGTRLQKDAAKTLLSLHGSIIVGIDYDCRERMVYWTDVAGRTISRAGLELGAEPETIVNSGLISPEGLAIDHIRRTMYWTDSVLDKIESALLDGSERKVLFYTDLVNPRAIAVDPIRGNLYWTDWNREAPKIETSSLDGENRRILINTDIGLPNGLTFDPFSKLLCWADAGTKKLECTLPDGTGRRVIQNNLKYPFSIVSYADHFYHTDWRRDGVVSVNKHSGQFTDEYLPEQRSHLYGITAVYPYCPTGRK

SEQ ID NO: 56919 - protein, 1373 aa, Homo sapiens
  Payload ID: 11189
  Gene Symbol: NID2
  Gene Name: nidogen 2 (osteonidogen)
  ENSP ID: ENSP00000443730
MEGDRVAGRPVLSSLPVLLLLPLLMLRAAALHPDELFPHGESWGDQLLQEGDRKLSRGEAGESPALTKPDSATSTWAPTASSPLRTSPGKRSMWTMISPPTSRPSPLFWRTSTRATAEAESCTERTPPPQCWAWPPAMCALASRALRALPHPRLPGHLGAGRRLRGGQARALPSGELNTFQAVLASDGSDSYALFLYPANGLQFLGTRPKESYNVQLQLPARVGFCRGEADDLKSEGPYFSLTSTEQSVKNLYQLSNLGIPGVWAFHIGSTSPLDNVRPAAVGDLSAAHSSVPLGRSFSHATALESDYNEDNLDYYDVNEEEAEYLPGEPEEALNGHSSIDVSFQSKVDTKPLEESSTLDPHTKEGTSLGEVGGPDLKGQVEPWDERETRSPAPPEVDRDSLAPSWETPPPYPENGSIQPYPDGGPVPSEMDVPPAHPEEEIVLRSYPASGHTTPLSRGTYEVGLEDNIGSNTEVFTYNAANKETCEHNHRQCSRHAFCTDYATGFCCHCQSKFYGNGKHCLPEGAPHRVNGKVSGHLHVGHTPVHFTDVDLHAYIVGNDGRAYTAISHIPQPAAQALLPLTPIGGLFGWLFALEKPGSENGFSLAGAAFTHDMEVTFYPGEETVRITQTAEGLDPENYLSIKTNIQGQVPYVSANFTAHISPYKELYHYSDSTVTSTSSRDYSLTFGAINQTWSYRIHQNITYQVCRHAPRHPSFPTTQQLNVDRVFALYNDEERVLRFAVTNQIGPVKEDSDPTPGNPCYDGSHMCDTTARCHPGTGVDYTCECASGYQGDGRNCVDENECATGFHRCGPNSVCINLPGSYRCECRSGYEFADDRHTCILITPPANPCEDGSHTCAPAGQARCVHHGGSTFSCACLPGYAGDGHQCTDVDECSENRCHPAATCYNTPGSFSCRCQPGYYGDGFQCIPDSTSSLTPCEQQQRHAQAQYAYPGARFHIPQCDEQGNFLPLQCHGSTGFCWCVDPDGHEVPGTQTPPGSTPPHCGPSPEPTQRPPTICERWRENLLEHYGGTPRDDQYVPQCDDLGHFIPLQCHGKSDFCWCVDKDGREVQGTRSQPGTTPACIPTVAPPMVRPTPRPDVTPPSVGTFLLYTQGQQIGYLPLNGTRLQKDAAKTLLSLHGSIIVGIDYDCRERMVYWTDVAGRTISRAGLELGAEPETIVNSGLISPEGLAIDHIRRTMYWTDSVLDKIESALLDGSERKVLFYTDLVNPRAIAVDPIRGNLYWTDWNREAPKIETSSLDGENRRILINTDIGLPNGLTFDPFSKLLCWADAGTKKLECTLPDGTGRRVIQNNLKYPFSIVSYADHFYHTDWRRDGVVSVNKHSGQFTDEYLPEQRSHLYGITAVYPYCPTGRK

SEQ ID NO: 56920 - protein, 644 aa, Homo sapiens
  Payload ID: 11189
  Gene Symbol: NID2
  Gene Name: nidogen 2 (osteonidogen)
  ENSP ID: ENSP00000452190
  MOD_RES (1)..(1): Any amino acid
XYSLTFGAINQTWSYRIHQNITYQVCRHAPRHPSFPTTQQLNVDRVFALYNDEERVLRFAVTNQIGPVKEDSDPTPGNPCYDGSHMCDTTARCHPGTGVDYTCECASGYQGDGRNCVDENECATGFHRCGPNSVCINLPGSYRCECRSGYEFADDRHTCIYVDECSENRCHPAATCYNTPGSFSCRCQPGYYGDGFQCIPDSTSSLTPCEQQQRHAQAQYAYPGARFHIPQCDEQGNFLPLQCHGSTGFCWCVDPDGHEVPGTQTPPGSTPPHCGPSPEPTQRPPTICERWRENLLEHYGGTPRDDQYVPQCDDLGHFIPLQCHGKSDFCWCVDKDGREVQGTRSQPGTTPACIPTVAPPMVRPTPRPDVTPPSVGTFLLYTQGQQIGYLPLNGTRLQKDAAKTLLSLHGSIIVGIDYDCRERMVYWTDVAGRTISRAGLELGAEPETIVNSGLISPEGLAIDHIRRTMYWTDSVLDKIESALLDGSERKVLFYTDLVNPRAIAVDPIRGNLYWTDWNREAPKIETSSLDGENRRILINTDIGLPNGLTFDPFSKLLCWADAGTKKLECTLPDGTGRRVIQNNLKYPFSIVSYADHFYHTDWRRDGVVSVNKHSGQFTDEYLPEQRSHLYGITAVYPYCPTGRK

SEQ ID NO: 56921 - protein, 969 aa, Homo sapiens
  Payload ID: 11189
  Gene Symbol: NID2
  Gene Name: nidogen 2 (osteonidogen)
  ENSP ID: ENSP00000482803
MEGDRVAGRPVLSSLPVLLLLPLLMLRAAALHPDELFPHGESWGDQLLQEGDDESSAVVKLANPLHFYEARFSNLYVGTNGIISTQDFPRETQYVDYDFPTDFPAIAPFLADIDTSHGRGRVLYRVNGKVSGHLHVGHTPVHFTDVDLHAYIVGNDGRAYTAISHIPQPAAQALLPLTPIGGLFGWLFALEKPGSENGFSLAGAAFTHDMEVTFYPGEETVRITQTAEGLDPENYLSIKTNIQGQVPYVSANFTAHISPYKELYHYSDSTVTSTSSRDYSLTFGAINQTWSYRIHQNITYQVCRHAPRHPSFPTTQQLNVDRVFALYNDEERVLRFAVTNQIGPVKEDSDPTPGNPCYDGSHMCDTTARCHPGTGVDYTCECASGYQGDGRNCVDENECATGFHRCGPNSVCINLPGSYRCECRSGYEFADDRHTCILITPPANPCEDGSHTCAPAGQARCVHHGGSTFSCACLPGYAGDGHQCTDVDECSENRCHPAATCYNTPGSFSCRCQPGYYGDGFQCIPDSTSSLTPCEQQQRHAQAQYAYPGARFHIPQCDEQGNFLPLQCHGSTGFCWCVDPDGHEVPGTQTPPGSTPPHCGPSPEPTQRPPTICERWRENLLEHYGGTPRDDQYVPQCDDLGHFIPLQCHGKSDFCWCVDKDGREVQGTRSQPGTTPACIPTVAPPMVRPTPRPDVTPPSVGTFLLYTQGQQIGYLPLNGTRLQKDAAKTLLSLHGSIIVGIDYDCRERMVYWTDVAGRTISRAGLELGAEPETIVNSGLISPEGLAIDHIRRTMYWTDSVLDKIESALLDGSERKVLFYTDLVNPRAIAVDPIRGNLYWTDWNREAPKIETSSLDGENRRILINTDIGLPNGLTFDPFSKLLCWADAGTKKLECTLPDGTGRRVIQNNLKYPFSIVSYADHFYHTDWRRDGVVSVNKHSGQFTDEYLPEQRSHLYGITAVYPYCPTGRK

SEQ ID NO: 56922 - protein, 1278 aa, Homo sapiens
  Payload ID: 11190
  Gene Symbol: NPC1
  Gene Name: Niemann-Pick disease, type C1
  Uniprot ID: O15118
  ENSP ID: ENSP00000269228
MTARGLALGLLLLLLCPAQVFSQSCVWYGECGIAYGDKRYNCEYSGPPKPLPKDGYDLVQELCPGFFFGNVSLCCDVRQLQTLKDNLQLPLQFLSRCPSCFYNLLNLFCELTCSPRQSQFLNVTATEDYVDPVTNQTKTNVKELQYYVGQSFANAMYNACRDVEAPSSNDKALGLLCGKDADACNATNWIEYMFNKDNGQAPFTITPVFSDFPVHGMEPMNNATKGCDESVDEVTAPCSCQDCSIVCGPKPQPPPPPAPWTILGLDAMYVIMWITYMAFLLVFFGAFFAVWCYRKRYFVSEYTPIDSNIAFSVNASDKGEASCCDPVSAAFEGCLRRLFTRWGSFCVRNPGCVIFFSLVFITACSSGLVFVRVTTNPVDLWSAPSSQARLEKEYFDQHFGPFFRTEQLIIRAPLTDKHIYQPYPSGADVPFGPPLDIQILHQVLDLQIAIENITASYDNETVTLQDICLAPLSPYNTNCTILSVLNYFQNSHSVLDHKKGDDFFVYADYHTHFLYCVRAPASLNDTSLLHDPCLGTFGGPVFPWLVLGGYDDQNYNNATALVITFPVNNYYNDTEKLQRAQAWEKEFINFVKNYKNPNLTISFTAERSIEDELNRESDSDVFTVVISYAIMFLYISLALGHMKSCRRLLVDSKVSLGIAGILIVLSSVACSLGVFSYIGLPLTLIVIEVIPFLVLAVGVDNIFILVQAYQRDERLQGETLDQQLGRVLGEVAPSMFLSSFSETVAFFLGALSVMPAVHTFSLFAGLAVFIDFLLQITCFVSLLGLDIKRQEKNRLDIFCCVRGAEDGTSVQASESCLFRFFKNSYSPLLLKDWMRPIVIAIFVGVLSFSIAVLNKVDIGLDQSLSMPDDSYMVDYFKSISQYLHAGPPVYFVLEEGHDYTSSKGQNMVCGGMGCNNDSLVQQIFNAAQLDNYTRIGFAPSSWIDDYFDWVKPQSSCCRVDNITDQFCNASVVDPACVRCRPLTPEGKQRPQGGDFMRFLPMFLSDNPNPKCGKGGHAAYSSAVNILLGHGTRVGATYFMTYHTVLQTSADFIDALKKARLIASNVTETMGINGSAYRVFPYSVFYVFYEQYLTIIDDTIFNLGVSLGAIFLVTMVLLGCELWSAVIMCATIAMVLVNMFGVMWLWGISLNAVSLVNLVMSCGISVEFCSHITRAFTVSMKGSRVERAEEALAHMGSSVFSGITLTKFGGIVVLAFAKSQIFQIFYFRMYLAMVLLGATHGLIFLPVLLSYIGPSVNKAKSCATEERYKGTERERLLNF

SEQ ID NO: 56923 - protein, 59 aa, Homo sapiens
  Payload ID: 11190
  Gene Symbol: NPC1
  Gene Name: Niemann-Pick disease, type C1
  ENSP ID: ENSP00000464755
VFSGITLTKFGGIVVLAFAKSQIFQIFYFRMYLAMVLLGATHGLIFLPVLLSYIGPFNS

SEQ ID NO: 56924 - protein, 42 aa, Homo sapiens
  Payload ID: 11190
  Gene Symbol: NPC1
  Gene Name: Niemann-Pick disease, type C1
  ENSP ID: ENSP00000467150
  MOD_RES (1)..(1): Any amino acid
XFYFRMYLAMVLLGATHGLIFLPVLLSYIDDLKVPVLQSETG

SEQ ID NO: 56925 - protein, 971 aa, Homo sapiens
  Payload ID: 11190
  Gene Symbol: NPC1
  Gene Name: Niemann-Pick disease, type C1
  ENSP ID: ENSP00000467636
  MOD_RES (1)..(1): Any amino acid
XAPWTILGLDAMYVIMWITYMAFLLVFFGAFFAVWCYRKRYFVSEYTPIDSNIAFSVNASDKGTAWLLTSTFPSSPVLPGEASCCDPVSAAFEGCLRRLFTRWGSFCVRNPGCVIFFSLVFITACSSGLVFVRVTTNPVDLWSAPSSQARLEKEYFDQHFGPFFRTEQLIIRAPLTDKHIYQPYPSGADVPFGPPLDIQILHQVLDLQIAIENITASYDNETVTLQDICLAPLSPYNTNCTILSVLNYFQNSHSVLDHKKGDDFFVYADYHTHFLYCVRFINFVKNYKNPNLTISFTAERSIEDELNRESDSDVFTVVISYAIMFLYISLALGHMKSCRRLLVDSKVSLGIAGILIVLSSVACSLGVFSYIGLPLTLIVIEVIPFLVLAVGVDNIFILVQAYQRDERLQGETLDQQLGRVLGEVAPSMFLSSFSETVAFFLGALSVMPAVHTFSLFAGLAVFIDFLLQITCFVSLLGLDIKRQEKNRLDIFCCVRGAEDGTSVQASESCLFRFFKNSYSPLLLKDWMRPIVIAIFVGVLSFSIAVLNKVDIGLDQSLSMPDDSYMVDYFKSISQYLHAGPPVYFVLEEGHDYTSSKGQNMVCGGMGCNNDSLVQQIFNAAQLDNYTRIGFAPSSWIDDYFDWVKPQSSCCRVDNITDQFCNASVVDPACVRCRPLTPEGKQRPQGGDFMRFLPMFLSDNPNPKCGKGGHAAYSSAVNILLGHGTRVGATYFMTYHTVLQTSADFIDALKKARLIASNVTETMGINGSAYRVFPYSVFYVFYEQYLTIIDDTIFNLGVSLGAIFLVTMVLLGCELWSAVIMCATIAMVLVNMFGVMWLWGISLNAVSLVNLVMSCGISVEFCSHITRAFTVSMKGSRVERAEEALAHMGSSVFSGITLTKFGGIVVLAFAKSQIFQIFYFRMYLAMVLLGATHGLIFLPVLLSYIGPSVNKAKSCATEERYKGTERERLLNF

SEQ ID NO: 56926 - protein, 175 aa, Homo sapiens
  Payload ID: 11190
  Gene Symbol: NPC1
  Gene Name: Niemann-Pick disease, type C1
  ENSP ID: ENSP00000468321
  MOD_RES (1)..(1): Any amino acid
XVFYVFYEQYLTIIDDTIFNLGVSLGAIFLVTMVLLGCELWSAVIMCATIAMVLVNMFGVMWLWGISLNAVSLVNLVMSCGISVEFCSHITRAFTVSMKGSRVERAEEALAHMGSSVFSGITLTKFGGIVVLAFAKSQIFQIFYFRMYLAMVLLGATHGLIFLPVLLSYIATSLF

SEQ ID NO: 56927 - protein, 179 aa, Homo sapiens
  Payload ID: 11190
  Gene Symbol: NPC1
  Gene Name: Niemann-Pick disease, type C1
  ENSP ID: ENSP00000468438
  MOD_RES (1)..(1): Any amino acid
XIFLVTMVLLGCELWSAVIMCATIAMVLVNMFGVMWLWGISLNAVSLVNLVMSCGISVEFCSHITRAFTVSMKGSRVERAEEALAHMGSSVFSGITLTKFGGIVVLAFAKSQIFQIFYFRMYLAMVLLGATHGLIFLPVLLSYIAKLLERTIYLCISQHIHYATQMAPLQCLMTASDRC

SEQ ID NO: 56928 - protein, 148 aa, Homo sapiens
  Payload ID: 11191
  Gene Symbol: NPC2
  Gene Name: Niemann-Pick disease, type C2
  ENSP ID: ENSP00000238633
MRFLAATFLLLALSTAAQAEPVQFKDCGSVDGVIKEVNVSPCPTQPCQLSKGQSYSVNVTFTSNIQSKSSKAVVHGILMGVPVPFPIPEPDGCKSGINCPIQKDKTYSYLNKLPVKSEYPSIKLVVEWQLQDDKNQSLFCWEIPVSHL

SEQ ID NO: 56929 - protein, 201 aa, Homo sapiens
  Payload ID: 11191
  Gene Symbol: NPC2
  Gene Name: Niemann-Pick disease, type C2
  ENSP ID: ENSP00000412103
MRFLAATFLLLALSTAAQAEPVQFKDCGSVDGVIKEVNVSPCPTQPCQLSKGQSYSVNVTFTSNIQSKSSKAVVHGILMGVPVPFPIPEPDGCKSGINCPIQKDKTYSYLNKLPVKSEYPSIKLVVEWQLQDDKNQSLFCWEIPVQIMFPCLFSAHCPMLATEHRCLQLQMETKSLRFWSRRGMSVWLPSPAGAWRRTAPF

SEQ ID NO: 56930 - protein, 125 aa, Homo sapiens
  Payload ID: 11191
  Gene Symbol: NPC2
  Gene Name: Niemann-Pick disease, type C2
  Uniprot ID: P61916
  ENSP ID: ENSP00000442488
MRFLAATFLLLALSTAAQAEPVQFKDCGSVDGVIKEVNVSPCPTQPCQLSKGQSYSVNVTFTSNIQSKSSKAVVHGILMGVPVPFPIPEPDGCKSGINCPIQKDKTYSYLNKLPVKSEYPSVSHL

SEQ ID NO: 56931 - protein, 173 aa, Homo sapiens
  Payload ID: 11191
  Gene Symbol: NPC2
  Gene Name: Niemann-Pick disease, type C2
  ENSP ID: ENSP00000450502
  MOD_RES (1)..(1): Any amino acid
XPLRVRPPTWTQLSVRRICPSPASGLEDDASRRAWGPREAVRSLRAREEGSVDGVIKEVNVSPCPTQPCQLSKGQSYSVNVTFTSNIQSKSSKAVVHGILMGVPVPFPIPEPDGCKSGINCPIQKDKTYSYLNKLPVKSEYPSIKLVVEWQLQDDKNQSLFCWEIPVQIVSHL

SEQ ID NO: 56932 - protein, 122 aa, Homo sapiens
  Payload ID: 11191
  Gene Symbol: NPC2
  Gene Name: Niemann-Pick disease, type C2
  ENSP ID: ENSP00000450887
MRFLAATFLLLALSTAAQAEPVQFKDCGSVDGVIKEVNVSPCPTQPCQLSKGQSYSVNVTFTSNIQSKSSKAVVHGILMGVPVPFPIPEPDGCKSGINCPIQKDKTYSYLNKLPVKSEYPSV

SEQ ID NO: 56933 - protein, 151 aa, Homo sapiens
  Payload ID: 11191
  Gene Symbol: NPC2
  Gene Name: Niemann-Pick disease, type C2
  Uniprot ID: P61916
  ENSP ID: ENSP00000451112
MRFLAATFLLLALSTAAQAEPVQFKDCGSVDGVIKEVNVSPCPTQPCQLSKGQSYSVNVTFTSNIQSKSSKAVVHGILMGVPVPFPIPEPDGCKSGINCPIQKDKTYSYLNKLPVKSEYPSIKLVVEWQLQDDKNQSLFCWEIPVQIVSHL

SEQ ID NO: 56934 - protein, 221 aa, Homo sapiens
  Payload ID: 11191
  Gene Symbol: NPC2
  Gene Name: Niemann-Pick disease, type C2
  ENSP ID: ENSP00000451180
MRFLAATFLLLALSTAAQAEPVQFKDCGSVDGVIKEVNVSPCPTQPCQLSKGQSYSVNVTFTSNIQSKSSKAVVHGILMGVPVPFPIPEPDGCKSGINCPIQKDKTYSYLNKLPVKSEYPSIKLVVEWQLQDDKNQSLFCWEIPVQIVSLSGGFSSLSASLSSVHLANESAETLDSTSSSAASTTVTCSPMVSSDSLKRRCSVAETELRVAGSQWLSHVSF

SEQ ID NO: 56935 - protein, 174 aa, Homo sapiens
  Payload ID: 11191
  Gene Symbol: NPC2
  Gene Name: Niemann-Pick disease, type C2
  ENSP ID: ENSP00000451206
MRFLAATFLLLALSTAAQAEPVQFKDCGSVDGVIKEVNVSPCPTQPCQLSKGQSYSVNVTFTSNIQSKSSKAVVHGILMGVPVPFPIPEPDGCKSGINCPIQKDKTYSYLNKLPVKSEYPSIKLVVEWQLQDDKNQSLFCWEIPVQIVSLSGGERAWVEGRKWRRNQTETKSVP

SEQ ID NO: 56936 - protein, 53 aa, Homo sapiens
  Payload ID: 11191
  Gene Symbol: NPC2
  Gene Name: Niemann-Pick disease, type C2
  ENSP ID: ENSP00000451314
GAQHRCPGRTGAVQGLRFCGWSYKGSECEPMPHPTLPAEQRTVLQRQCHLHQQ

SEQ ID NO: 56937 - protein, 350 aa, Homo sapiens
  Payload ID: 11192
  Gene Symbol: NIF3L1
  Gene Name: NIF3 NGG1 interacting factor 3-like 1
  Uniprot ID: Q9GZT8
  ENSP ID: ENSP00000352711
MDLKALLSSLNDFASLSFAESWDNVGLLVEPSPPHTVNTLFLTNDLTEEVMEEVLQKKADLILSYHPPIFRPMKRITWNTWKERLVIRALENRVGIYSPHTAYDAAPQGVNNWLAKGLGACTSRPIHPSKAPNYPTEGNHRVEFNVNYTQDLDKVMSAVKGIDGVSVTSFSARTGNEEQTRINLNCTQKALMQVVDFLSRNKQLYQKTEILSLEKPLLLHTGMGRLCTLDESVSLATMIDRIKRHLKLSHIRLALGVGRTLESQVKVVALCAGSGSSVLQGVEADLYLTGEMSHHDTLDAASQGINVILCEHSNTERGFLSDLRDMLDSHLENKINIILSETDRDPLQVV

SEQ ID NO: 56938 - protein, 377 aa, Homo sapiens
  Payload ID: 11192
  Gene Symbol: NIF3L1
  Gene Name: NIF3 NGG1 interacting factor 3-like 1
  Uniprot ID: Q9GZT8
  ENSP ID: ENSP00000386394
MLSSCVRPVPTTVRFVDSLICNSSRSFMDLKALLSSLNDFASLSFAESWDNVGLLVEPSPPHTVNTLFLTNDLTEEVMEEVLQKKADLILSYHPPIFRPMKRITWNTWKERLVIRALENRVGIYSPHTAYDAAPQGVNNWLAKGLGACTSRPIHPSKAPNYPTEGNHRVEFNVNYTQDLDKVMSAVKGIDGVSVTSFSARTGNEEQTRINLNCTQKALMQVVDFLSRNKQLYQKTEILSLEKPLLLHTGMGRLCTLDESVSLATMIDRIKRHLKLSHIRLALGVGRTLESQVKVVALCAGSGSSVLQGVEADLYLTGEMSHHDTLDAASQGINVILCEHSNTERGFLSDLRDMLDSHLENKINIILSETDRDPLQVV

SEQ ID NO: 56939 - protein, 285 aa, Homo sapiens
  Payload ID: 11192
  Gene Symbol: NIF3L1
  Gene Name: NIF3 NGG1 interacting factor 3-like 1
  Uniprot ID: Q9GZT8
  ENSP ID: ENSP00000387021
MLSSCVRPVPTTVRFVDSLICNSSRSFMDLKALLSSLNDFASLSFAESWDNVGLLVEPSPPHTVNTLFLTNDLTEEVMEEVLQKKADLILSYHPPIFRPMKRITWNTWKERLVIRALENRVGIYSPHTAYDAAPQGVNNWLAKGLGACTSRPIHPSKAPNYPTEGNHRVEFNVNYTQDLDKVMSAVKGIDGVSVTSFSARTGNEEQTRINLNCTQKALMQVVDFLSRNKQLYQKTEILSLEKSLKSKSWPCVLVLGAAFCRVLRLTFTSQVRCPIMILWMLLPKE

SEQ ID NO: 56940 - protein, 162 aa, Homo sapiens
  Payload ID: 11192
  Gene Symbol: NIF3L1
  Gene Name: NIF3 NGG1 interacting factor 3-like 1
  ENSP ID: ENSP00000387061
MDLKALLSSLNDFASLSFAESWDNVGLLVEPSPPHTVNTLFLTNDLTEEVMEEVLQKKADLILSYHPPIFRPMKRITWNTWKERLVIRALENRVGIYSPHTAYDAAPQGVNNWLAKGLGACTSRPIHPSKAPNYPTEGNHRVEFNVNYTQDLDKVMSAVKGI

SEQ ID NO: 56941 - protein, 377 aa, Homo sapiens; identical to SEQ ID NO: 56938
  Payload ID: 11192
  Gene Symbol: NIF3L1
  Gene Name: NIF3 NGG1 interacting factor 3-like 1
  Uniprot ID: Q9GZT8
  ENSP ID: ENSP00000387315

SEQ ID NO: 56942 - protein, 162 aa, Homo sapiens
  Payload ID: 11192
  Gene Symbol: NIF3L1
  Gene Name: NIF3 NGG1 interacting factor 3-like 1
  ENSP ID: ENSP00000394955
MLSSCVRPVPTTVRFVDSLICNSSRSFMDLKALLSSLNDFASLSFAESWDNVGLLVEPSPPHTVNTLFLTNDLTEEVMEEVLQKKADLILSYHPPIFRPMKRITWNTWKERLVIRALENRVGIYSPHTAYDAAPQGVNNWLAKGLGACTSRPIHPSKAPNYP

SEQ ID NO: 56943 - protein, 84 aa, Homo sapiens
  Payload ID: 11192
  Gene Symbol: NIF3L1
  Gene Name: NIF3 NGG1 interacting factor 3-like 1
  ENSP ID: ENSP00000399336
  MOD_RES (1)..(1): Any amino acid
XPLLLHTGMGRLCTLDESVSLATMIDRIKRHLKLSHIRLALGVGRTLESQVKVVALCAGSGSSVLQGVEADLYLTGGIIAETSG

SEQ ID NO: 56944 - protein, 252 aa, Homo sapiens
  Payload ID: 11192
  Gene Symbol: NIF3L1
  Gene Name: NIF3 NGG1 interacting factor 3-like 1
  ENSP ID: ENSP00000400787
MLSSCVRPVPTTVRFVDSLICNSSRSFMDLKALLSSLNDFASLSFAESWDNVGLLVEPSPPHTVNTLFLTNDLTEEVMEEVLQKKADLILSYHPPIFRPMKRITWNTWKERLVIRALENRVGIYSPHTAYDAAPQGVNNWLAKGLGACTSRPIHPSKAPNYPTEGNHRVEFNVNYTQDLDKVMSAVKGIDGVSVTSFSARTGNEEQTRINLNCTQKALMQVVDFLSRNKQLYQKHQDNTFYKSAGCQLKFVT

SEQ ID NO: 56945 - protein, 209 aa, Homo sapiens
  Payload ID: 11192
  Gene Symbol: NIF3L1
  Gene Name: NIF3 NGG1 interacting factor 3-like 1
  ENSP ID: ENSP00000412761
MDLKALLSSLNDFASLSFAESWDNVGLLVEPSPPHTVNTLFLTNDLTEEVMEEVLQKKADLILSYHPPIFRPMKRITWNTWKERLVIRALENRVGIYSPHTAYDAAPQGVNNWLAKGLGACTSRPIHPSKAPNYPTEGNHRVEFNVNYTQDLDKVMSAVKGIDGVSVTSFSARTGNEEQTRINLNCTQKALMQVVDFLSRNKQLYQKTE

SEQ ID NO: 56946 - protein, 1582 aa, Homo sapiens
  Payload ID: 11193
  Gene Symbol: NRK
  Gene Name: Nik related kinase
  Uniprot ID: Q7Z2Y5
  ENSP ID: ENSP00000434830
MAGPGGWRDREVTDLGHLPDPTGIFSLDKTIGLGTYGRIYLGLHEKTGAFTAVKVMNARKTPLPEIGRRVRVNKYQKSVGWRYSDEEEDLRTELNLLRKYSFHKNIVSFYGAFFKLSPPGQRHQLWMVMELCAAGSVTDVVRMTSNQSLKEDWIAYICREILQGLAHLHAHRVIHRDIKGQNVLLTHNAEVKLVDFGVSAQVSRTNGRRNSFIGTPYWMAPEVIDCDEDPRRSYDYRSDVWSVGITAIEMAEGAPPLCNLQPLEALFVILRESAPTVKSSGWSRKFHNFMEKCTIKNFLFRPTSANMLQHPFVRDIKNERHVVESLTRHLTGIIKKRQKKGIPLIFEREEAIKEQYTVRRFRGPSCTHELLRLPTSSRCRPLRVLHGEPSQPRWLPDREEPQVQALQQLQGAARVFMPLQALDSAPKPLKGQAQAPQRLQGAARVFMPLQAQVKAKASKPLQMQIKAPPRLRRAARVLMPLQAQVRAPRLLQVQSQVSKKQQAQTQTSEPQDLDQVPEEFQGQDQVPEQQRQGQAPEQQQRHNQVPEQELEQNQAPEQPEVQEQAAEPAQAETEAEEPESLRVNAQVFLPLLSQDHHVLLPLHLDTQVLIPVEGQTEGSPQAQAWTLEPPQAIGSVQALIEGLSRDLLRAPNSNNSKPLGPLQTLMENLSSNRFYSQPEQAREKKSKVSTLRQALAKRLSPKRFRAKSSWRPEKLELSDLEARRQRRQRRWEDIFNQHEEELRQVDKDKEDESSDNDEVFHSIQAEVQIEPLKPYISNPKKIEVQERSPSVPNNQDHAHHVKFSSSVPQRSLLEQAQKPIDIRQRSSQNRQNWLAASESSSEEESPVTGRRSQSSPPYSTIDQKLLVDIHVPDGFKVGKISPPVYLTNEWVGYNALSEIFRNDWLTPAPVIQPPEEDGDYVELYDASADTDGDDDDESNDTFEDTYDHANGNDDLDNQVDQANDVCKDHDDDNNKFVDDVNNNYYEAPSCPRASYGRDGSCKQDGYDGSRGKEEAYRGYGSHTANRSHGGSAASEDNAAIGDQEEHAANIGSERRGSEGDGGKGVVRTSEESGALGLNGEENCSETDGPGLKRPASQDFEYLQEEPGGGNEASNAIDSGAAPSAPDHESDNKDISESSTQSDFSANHSSPSKGSGMSADANFASAILYAGFVEVPEESPKQPSEVNVNPLYVSPACKKPLIHMYEKEFTSEICCGSLWGVNLLLGTRSNLYLMDRSGKADITKLIRRRPFRQIQVLEPLNLLITISGHKNRLRVYHLTWLRNKILNNDPESKRRQEEMLKTEEACKAIDKLTGCEHFSVLQHEETTYIAIALKSSIHLYAWAPKSFDESTAIKVCIDQSADSEGDYMSYQAYIRILAKIQAADPVNRFKRPDELLHLLKLKVFPTLDHKPVTVDLAIGSEKRLKIFFSSADGYHLIDAESEVMSDVTLPKNPLEIIIPQNIIILPDCLGIGMMLTFNAEALSVEANEQLFKKILEMWKDIPSSIAFECTQRTTGWGQKAIEVRSLQSRVLESELKRRSIKKLRFLCTRGDKLFFTSTLRNHHSRVYFMTLGKLEELQSNYDV

SEQ ID NO: 56947 - protein, 163 aa, Homo sapiens
  Payload ID: 11193
  Gene Symbol: NRK
  Gene Name: Nik related kinase
  ENSP ID: ENSP00000438148
MQVPRERIKIAFRLWIPILVIRIVVAGTWPQAPGLSTLGLNIIILPDCLGIGMMLTFNAEALSVEANEQLFKKILEMWKDIPSSIAFECTQRTTGWGQKAIEVRSLQSRVLESELKRRSIKKLRFLCTRGDKLFFTSTLRNHHSRVYFMTLGKLEELQSNYDV

SEQ ID NO: 56948 - protein, 355 aa, Homo sapiens
  Payload ID: 11193
  Gene Symbol: NRK
  Gene Name: Nik related kinase
  ENSP ID: ENSP00000438378
MAGPGGWRDREVTDLGHLPDPTGIFSLDKTIGLGTYGRIYLGLHEKTGAFTAVKVMNARKTPLPEIGRRVRVNKYQKSVGWRYSDEEEDLRTELNLLRKYSFHKNIVSFYGAFFKLSPPGQRHQLWMVMELCAAGSVTDVVRMTSNQSLKEDWIAYICREILQGLAHLHAHRVIHRDIKGQNVLLTHNAEVKLVDFGVSAQVSRTNGRRNSFIGTPYWMAPEVIDCDEDPRRSYDYRSDVWSVGITAIEMAEGAPPLCNLQPLEALFVILRESAPTVKSSGWSRKFHNFMEKCTIKNFLFRPTSANMLQHPFVRDIKNERHVVESLTRHLTGIIKKRQKKGFAVSQDHATALQPG

SEQ ID NO: 56949 - protein, 188 aa, Homo sapiens
  Payload ID: 11193
  Gene Symbol: NRK
  Gene Name: Nik related kinase
  Uniprot ID: Q7Z2Y5
  ENSP ID: ENSP00000438785
MAGPGGWRDREVTDLGHLPDPTGIFSLDKTIGLGTYGRIYLGLHEKTGAFTAVKVMNARKTPLPEIGRRVRVNKYQKSVGWRYSDEEEDLRTELNLLRKYSFHKNIVSFYGAFFKLSPPGQRHQLWMVMELCAAGSVTDVVRMTSNQSLKEDWIAYICREILQPKVIFLGTGCSDSSLKKELCLKHQN

SEQ ID NO: 56950 - protein, 436 aa, Homo sapiens
  Payload ID: 11194
  Gene Symbol: NIM1K
  Gene Name: NIM1 serine/threonine protein kinase
  Uniprot ID: Q8IY84
  ENSP ID: ENSP00000313572
MTAVYMNGGGLVNPHYARWDRRDSVESGCQTESSKEGEEGQPRQLTPFEKLTQDMSQDEKVVREITLGKRIGFYRIRGEIGSGNFSQVKLGIHSLTKEKVAIKILDKTKLDQKTQRLLSREISSMEKLHHPNIIRLYEVVETLSKLHLVMEYAGGGELFGKISTEGKLSEPESKLIFSQIVSAVKHMHENQIIHRDLKAENVFYTSNTCVKVGDFGFSTVSKKGEMLNTFCGSPPYAAPELFRDEHYIGIYVDIWALGVLLYFMVTGTMPFRAETVAKLKKSILEGTYSVPPHVSEPCHRLIRGVLQQIPTERYGIDCIMNDEWMQGVPYPTPLEPFQLDPKHLSETSTLKEEENEVKSTLEHLGITEEHIRNNQGRDARSSITGVYRIILHRVQRKKALESVPVMMLPDPKERDLKKGSRVYRGIRHTSKFCSIL

SEQ ID NO: 56951 - protein, 436 aa, Homo sapiens; identical to SEQ ID NO: 56950
  Payload ID: 11194
  Gene Symbol: NIM1K
  Gene Name: NIM1 serine/threonine protein kinase
  Uniprot ID: Q8IY84
  ENSP ID: ENSP00000420849

SEQ ID NO: 56952 - protein, 1258 aa, Homo sapiens
  Payload ID: 11195
  Gene Symbol: NEK1
  Gene Name: NIMA-related kinase 1
  Uniprot ID: Q96PY6
  ENSP ID: ENSP00000408020
MEKYVRLQKIGEGSFGKAILVKSTEDGRQYVIKEINISRMSSKEREESRREVAVLANMKHPNIVQYRESFEENGSLYIVMDYCEGGDLFKRINAQKGVLFQEDQILDWFVQICLALKHVHDRKILHRDIKSQNIFLTKDGTVQLGDFGIARVLNSTVELARTCIGTPYYLSPEICENKPYNNKSDIWALGCVLYELCTLKHAFEAGSMKNLVLKIISGSFPPVSLHYSYDLRSLVSQLFKRNPRDRPSVNSILEKGFIAKRIEKFLSPQLIAEEFCLKTFSKFGSQPIPAKRPASGQNSISVMPAQKITKPAAKYGIPLAYKKYGDKKLHEKKPLQKHKQAHQTPEKRVNTGEERRKISEEAARKRRLEFIEKEKKQKDQIISLMKAEQMKRQEKERLERINRAREQGWRNVLSAGGSGEVKAPFLGSGGTIAPSSFSSRGQYEHYHAIFDQMQQQRAEDNEAKWKREIYGRGLPERGILPGVRPGFPYGAAGHHHFPDADDIRKTLKRLKAVSKQANANRQKGQLAVERAKQVEEFLQRKREAMQNKARAEGHMVYLARLRQIRLQNFNERQQIKAKLRGEKKEANHSEGQEGSEEADMRRKKIESLKAHANARAAVLKEQLERKRKEAYEREKKVWEEHLVAKGVKSSDVSPPLGQHETGGSPSKQQMRSVISVTSALKEVGVDSSLTDTRETSEEMQKTNNAISSKREILRRLNENLKAQEDEKGKQNLSDTFEINVHEDAKEHEKEKSVSSDRKKWEAGGQLVIPLDELTLDTSFSTTERHTVGEVIKLGPNGSPRRAWGKSPTDSVLKILGEAELQLQTELLENTTIRSEISPEGEKYKPLITGEKKVQCISHEINPSAIVDSPVETKSPEFSEASPQMSLKLEGNLEEPDDLETEILQEPSGTNKDESLPCTITDVWISEEKETKETQSADRITIQENEVSEDGVSSTVDQLSDIHIEPGTNDSQHSKCDVDKSVQPEPFFHKVVHSEHLNLVPQVQSVQCSPEESFAFRSHSHLPPKNKNKNSLLIGLSTGLFDANNPKMLRTCSLPDLSKLFRTLMDVPTVGDVRQDNLEIDEIEDENIKEGPSDSEDIVFEETDTDLQELQASMEQLLREQPGEEYSEEEESVLKNSDVEPTANGTDVADEDDNPSSESALNEEWHSDNSDGEIASECECDSVFNHLEELRLHLEQEMGFEKFFEVYEKIKAIHEDEDENIEICSKIVQNILGNEHQHLYAKILHLVMADGAYQEDNDE

SEQ ID NO: 56953 - protein, 123 aa, Homo sapiens
  Payload ID: 11195
  Gene Symbol: NEK1
  Gene Name: NIMA-related kinase 1
  ENSP ID: ENSP00000421525
  MOD_RES (1)..(1): Any amino acid
XFPPVSLHYSYDLRSLVSQLFKRNPRDRPSVNSILEKGFIAKRIEKFLSPQLIAEEFCLKTFSKFGSQPIPAKRPASGQNSISVMPAQKITKPAAKYGIPLAYKKYGDKKLHEKKPLQKHKQV

SEQ ID NO: 56954 - protein, 1242 aa, Homo sapiens
  Payload ID: 11195
  Gene Symbol: NEK1
  Gene Name: NIMA-related kinase 1
  Uniprot ID: Q96PY6
  ENSP ID: ENSP00000423332
MEKYVRLQKIGEGSFGKAILVKSTEDGRQYVIKEINISRMSSKEREESRREVAVLANMKHPNIVQYRESFEENGSLYIVMDYCEGGDLFKRINAQKGVLFQEDQILDWFVQICLALKHVHDRKILHRDIKSQNIFLTKDGTVQLGDFGIARVLNSTVELARTCIGTPYYLSPEICENKPYNNKSDIWALGCVLYELCTLKHAFEAGSMKNLVLKIISGSFPPVSLHYSYDLRSLVSQLFKRNPRDRPSVNSILEKGFIAKRIEKFLSPQLIAEEFCLKTFSKFGSQPIPAKRPASGQNSISVMPAQKITKPAAKYGIPLAYKKYGDKKLHEKKPLQKHKQAHQTPEKRVNTGEERRKISEEAARKRRLEFIEKEKKQKDQIISLMKAEQMKRQEKERLERINRAREQGWRNVLSAGGSGEVKAPFLGSGGTIAPSSFSSRGQYEHYHAIFDQMQQQRAEDNEAKWKREIYGRGLPERQKGQLAVERAKQVEEFLQRKREAMQNKARAEGHMGILQNLAAMYGGRPSSSRGGKPRNKEEEVYLARLRQIRLQNFNERQQIKAKLRGEKKEANHSEGQEGSEEADMRRKKIESLKAHANARAAVLKEQLERKRKEAYEREKKVWEEHLVAKGVKSSDVSPPLGQHETGGSPSKQQMRSVISVTSALKEVGVDSSLTDTRETSEEMQKTNNAISSKREILRRLNENLKAQEDEKGKQNLSDTFEINVHEDAKEHEKEKSVSSDRKKWEAGGQLVIPLDELTLDTSFSTTERHTVGEVIKLGPNGSPRRAWGKSPTDSVLKILGEAELQLQTELLENTTIRSEISPEGEKYKPLITGEKKVQCISHEINPSAIVDSPVETKSPEFSEASPQMSLKLEGNLEEPDDLETEILQEPSGTNKDESLPCTITDVWISEEKETKETQSADRITIQENEVSEDGVSSTVDQLSDIHIEPGTNDSQHSKCDVDKSVQPEPFFHKVVHSEHLNLVPQVQSVQCSPEESFAFRSHSHLPPKNKNKNSLLIGLSTGLFDANNPKMLRTCSLPDLSKLFRTLMDVPTVGDVRQDNLEIDEIEDENIKEGPSDSEDIVFEETDTDLQELQASMEQLLREQPGEEYSEEEESVLKNSDVEPTANGTDVADEDDNPSSESALNEEWHSDNSDGEIASECECDSVFNHLEELRLHLEQEMGFEKFFEVYEKIKAIHEDEDENIEICSKIVQNILGNEHQHLYAKILHLVMADGAYQEDNDE

SEQ ID NO: 56955 - protein, 45 aa, Homo sapiens
  Payload ID: 11195
  Gene Symbol: NEK1
  Gene Name: NIMA-related kinase 1
  ENSP ID: ENSP00000424152
MEKYVRLQKIGEGSFGKAILVKSTEDGRQYVIKEINISRKMALST

SEQ ID NO: 56956 - protein, 1286 aa, Homo sapiens
  Payload ID: 11195
  Gene Symbol: NEK1
  Gene Name: NIMA-related kinase 1
  Uniprot ID: Q96PY6
  ENSP ID: ENSP00000424757
MEKYVRLQKIGEGSFGKAILVKSTEDGRQYVIKEINISRMSSKEREESRREVAVLANMKHPNIVQYRESFEENGSLYIVMDYCEGGDLFKRINAQKGVLFQEDQILDWFVQICLALKHVHDRKILHRDIKSQNIFLTKDGTVQLGDFGIARVLNSTVELARTCIGTPYYLSPEICENKPYNNKSDIWALGCVLYELCTLKHAFEAGSMKNLVLKIISGSFPPVSLHYSYDLRSLVSQLFKRNPRDRPSVNSILEKGFIAKRIEKFLSPQLIAEEFCLKTFSKFGSQPIPAKRPASGQNSISVMPAQKITKPAAKYGIPLAYKKYGDKKLHEKKPLQKHKQAHQTPEKRVNTGEERRKISEEAARKRRLEFIEKEKKQKDQIISLMKAEQMKRQEKERLERINRAREQGWRNVLSAGGSGEVKAPFLGSGGTIAPSSFSSRGQYEHYHAIFDQMQQQRAEDNEAKWKREIYGRGLPERGILPGVRPGFPYGAAGHHHFPDADDIRKTLKRLKAVSKQANANRQKGQLAVERAKQVEEFLQRKREAMQNKARAEGHMGILQNLAAMYGGRPSSSRGGKPRNKEEEVYLARLRQIRLQNFNERQQIKAKLRGEKKEANHSEGQEGSEEADMRRKKIESLKAHANARAAVLKEQLERKRKEAYEREKKVWEEHLVAKGVKSSDVSPPLGQHETGGSPSKQQMRSVISVTSALKEVGVDSSLTDTRETSEEMQKTNNAISSKREILRRLNENLKAQEDEKGKQNLSDTFEINVHEDAKEHEKEKSVSSDRKKWEAGGQLVIPLDELTLDTSFSTTERHTVGEVIKLGPNGSPRRAWGKSPTDSVLKILGEAELQLQTELLENTTIRSEISPEGEKYKPLITGEKKVQCISHEINPSAIVDSPVETKSPEFSEASPQMSLKLEGNLEEPDDLETEILQEPSGTNKDESLPCTITDVWISEEKETKETQSADRITIQENEVSEDGVSSTVDQLSDIHIEPGTNDSQHSKCDVDKSVQPEPFFHKVVHSEHLNLVPQVQSVQCSPEESFAFRSHSHLPPKNKNKNSLLIGLSTGLFDANNPKMLRTCSLPDLSKLFRTLMDVPTVGDVRQDNLEIDEIEDENIKEGPSDSEDIVFEETDTDLQELQASMEQLLREQPGEEYSEEEESVLKNSDVEPTANGTDVADEDDNPSSESALNEEWHSDNSDGEIASECECDSVFNHLEELRLHLEQEMGFEKFFEVYEKIKAIHEDEDENIEICSKIVQNILGNEHQHLYAKILHLVMADGAYQEDNDE

SEQ ID NO: 56957 - protein, 1189 aa, Homo sapiens
  Payload ID: 11195
  Gene Symbol: NEK1
  Gene Name: NIMA-related kinase 1
  Uniprot ID: Q96PY6
  ENSP ID: ENSP00000424938
MEKYVRLQKIGEGSFGKAILVKSTEDGRQYVIKEINISRMSSKEREESRREVAVLANMKHPNIVQYRESFEENGSLYIVMDYCEGGDLFKRINAQKGVLFQEDQILDWFVQICLALKHVHDRKILHRDIKSQNIFLTKDGTVQLGDFGIARVLNSTVELARTCIGTPYYLSPEICENKPYNNKSDIWALGCVLYELCTLKHAFEAGSMKNLVLKIISGSFPPVSLHYSYDLRSLVSQLFKRNPRDRPSVNSILEKGFIAKRIEKFLSPQLIAEEFCLKTFSKFGSQPIPAKRPASGQNSISVMPAQKITKPAAKYGIPLAYKKYGDKKLHEKKPLQKHKQAHQTPEKRVNTGEERRKISEEAARKRRLEFIEKEKKQKDQIISLMKAEQMKRQEKERAPFLGSGGTIAPSSFSSRGQYEHYHAIFDQMQQQRAEDNEAKWKREIYGRGLPERQKGQLAVERAKQVEEFLQRKREAMQNKARAEGHMVYLARLRQIRLQNFNERQQIKAKLRGEKKEANHSEGQEGSEEADMRRKKIESLKAHANARAAVLKEQLERKRKEAYEREKKVWEEHLVAKGVKSSDVSPPLGQHETGGSPSKQQMRSVISVTSALKEVGVDSSLTDTRETSEEMQKTNNAISSKREILRRLNENLKAQEDEKGKQNLSDTFEINVHEDAKEHEKEKSVSSDRKKWEAGGQLVIPLDELTLDTSFSTTERHTVGEVIKLGPNGSPRRAWGKSPTDSVLKILGEAELQLQTELLENTTIRSEISPEGEKYKPLITGEKKVQCISHEINPSAIVDSPVETKSPEFSEASPQMSLKLEGNLEEPDDLETEILQEPSGTNKDESLPCTITDVWISEEKETKETQSADRITIQENEVSEDGVSSTVDQLSDIHIEPGTNDSQHSKCDVDKSVQPEPFFHKVVHSEHLNLVPQVQSVQCSPEESFAFRSHSHLPPKNKNKNSLLIGLSTGLFDANNPKMLRTCSLPDLSKLFRTLMDVPTVGDVRQDNLEIDEIEDENIKEGPSDSEDIVFEETDTDLQELQASMEQLLREQPGEEYSEEEESVLKNSDVEPTANGTDVADEDDNPSSESALNEEWHSDNSDGEIASECECDSVFNHLEELRLHLEQEMGFEKFFEVYEKIKAIHEDEDENIEICSKIVQNILGNEHQHLYAKILHLVMADGAYQEDNDE

SEQ ID NO: 56958 - protein, 1214 aa, Homo sapiens
  Payload ID: 11195
  Gene Symbol: NEK1
  Gene Name: NIMA-related kinase 1
  Uniprot ID: Q96PY6
  ENSP ID: ENSP00000427653
MEKYVRLQKIGEGSFGKAILVKSTEDGRQYVIKEINISRMSSKEREESRREVAVLANMKHPNIVQYRESFEENGSLYIVMDYCEGGDLFKRINAQKGVLFQEDQILDWFVQICLALKHVHDRKILHRDIKSQNIFLTKDGTVQLGDFGIARVLNSTVELARTCIGTPYYLSPEICENKPYNNKSDIWALGCVLYELCTLKHAFEAGSMKNLVLKIISGSFPPVSLHYSYDLRSLVSQLFKRNPRDRPSVNSILEKGFIAKRIEKFLSPQLIAEEFCLKTFSKFGSQPIPAKRPASGQNSISVMPAQKITKPAAKYGIPLAYKKYGDKKLHEKKPLQKHKQAHQTPEKRVNTGEERRKISEEAARKRRLEFIEKEKKQKDQIISLMKAEQMKRQEKERLERINRAREQGWRNVLSAGGSGEVKAPFLGSGGTIAPSSFSSRGQYEHYHAIFDQMQQQRAEDNEAKWKREIYGRGLPERQKGQLAVERAKQVEEFLQRKREAMQNKARAEGHMVYLARLRQIRLQNFNERQQIKAKLRGEKKEANHSEGQEGSEEADMRRKKIESLKAHANARAAVLKEQLERKRKEAYEREKKVWEEHLVAKGVKSSDVSPPLGQHETGGSPSKQQMRSVISVTSALKEVGVDSSLTDTRETSEEMQKTNNAISSKREILRRLNENLKAQEDEKGKQNLSDTFEINVHEDAKEHEKEKSVSSDRKKWEAGGQLVIPLDELTLDTSFSTTERHTVGEVIKLGPNGSPRRAWGKSPTDSVLKILGEAELQLQTELLENTTIRSEISPEGEKYKPLITGEKKVQCISHEINPSAIVDSPVETKSPEFSEASPQMSLKLEGNLEEPDDLETEILQEPSGTNKDESLPCTITDVWISEEKETKETQSADRITIQENEVSEDGVSSTVDQLSDIHIEPGTNDSQHSKCDVDKSVQPEPFFHKVVHSEHLNLVPQVQSVQCSPEESFAFRSHSHLPPKNKNKNSLLIGLSTGLFDANNPKMLRTCSLPDLSKLFRTLMDVPTVGDVRQDNLEIDEIEDENIKEGPSDSEDIVFEETDTDLQELQASMEQLLREQPGEEYSEEEESVLKNSDVEPTANGTDVADEDDNPSSESALNEEWHSDNSDGEIASECECDSVFNHLEELRLHLEQEMGFEKFFEVYEKIKAIHEDEDENIEICSKIVQNILGNEHQHLYAKILHLVMADGAYQEDNDE

SEQ ID NO: 56959 - protein, 484 aa, Homo sapiens
  Payload ID: 11196
  Gene Symbol: NEK10
  Gene Name: NIMA-related kinase 10
  Uniprot ID: Q6ZWH5
  ENSP ID: ENSP00000295720
MVPVQPAEPPEVLKSEPYGEKADVWAVGCILYQMATLSPPFYSTNMLSLATKIVEAVYEPVPEGIYSEKVTDTISRCLTPDAEARPDIVEVSSMISDVMMKYLDNLSTSQLSLEKKLERERRRTQRYFMEANRNTVTCHHELAVLSHETFEKASLSSSSSGAASLKSELSESADLPPEGFQASYGKDEDRACDEILSDDNFNLENAEKDTYSEVDDELDISDNSSSSSSSPLKESTFNILKRSFSASGGERQSQTRDFTGGTGSRPRPALLPLDLLLKVPPHMLRAHIKEIEAELVTGWQSHSLPAVILRNLKDHGPQMGTFLWQASAGIAVSQRKVRQISDPIQQILIQLHKIIYITQLPPALHHNLKRRVIERFKKSLFSQQSNPCNLKSEIKKLSQGSPEPIEPNFFTADYHLLHRSSGGNSLSPNDPTGLPTSIELEEGITYEQMQTVIEEVLEESGYYNFTSNRYHSYPWGTKNHPTKR

SEQ ID NO: 56960 - protein, 712 aa, Homo sapiens
  Payload ID: 11196
  Gene Symbol: NEK10
  Gene Name: NIMA-related kinase 10
  Uniprot ID: Q6ZWH5
  ENSP ID: ENSP00000343847
MPDQDKKVKTTEKSTDKQQEITIRDYSDLKRLRCLLNVQSSKQQLPAINFDSAQNSMTKSEPAIRAGGHRARGQWHESTEAVELENFSINYKNERNFSKHPQRKLFQEIFTALVKNRLISREWVNRAPSIHFLRVLICLRLLMRDPCYQEILHSLGGIENLAQYMEIVANEYLGYGEEQHTVDKLVNMTYIFQKLAAVKDQREWVTTSGAHKTLVNLLGARDTNVLLGSLLALASLAESQECREKISELNIVENLLMILHEYDLLSKRLTAELLRLLCAEPQVKEQVKLYEGIPVLLSLLHSDHLKLLWSIVWILVQVCEDPETSVEIRIWGGIKQLLHILQGDRNFVSDHSSIGSLSSANAAGRIQQLHLSEDLSPREIQENTFSLQAACCAALTELVLNDTNAHQVVQENGVYTIAKLILPNKQKNAAKSNLLQCYAFRALRFLFSMERNRPLFKRLFPTDLFEIFIDIGHYVRDISAYEELVSKLNLLVEDELKQIAENIESINQNKAPLKYIGNYAILDHLGSGAFGCVYKVRKHSGQNLLAMKEVNLHNPAFGKDKKDRDSSVRNIVSELTIIKEQLYHPNIVRYYKTFLENDRLYIVMELIEGAPLGEHFSSLKEKHHHFTEERLWKIFIQLCLALRYLHKEKRIVHRDLTPNNIMLGDKDKVTVTDFGLAKQKQENSKLTSVVGTILYSCVQHLYLRSPAPALAT

SEQ ID NO: 56961 - protein, 418 aa, Homo sapiens
  Payload ID: 11196
  Gene Symbol: NEK10
  Gene Name: NIMA-related kinase 10
  ENSP ID: ENSP00000373280
PEVLKSEPYGEKADVWAVGCILYQMATLSPPFYSTNMLSLATKIVEAVYEPVPEGIYSEKVTDTISRCLTPDAEARPDIVEVSSMISDVMMKYLDNLSTSQLSLEKKLERERRRTQRYFMEANRNTVTCHHELAVLSHETFEKASLSSSSSGAASLKSELSESADLPPEGFQASYGKDEDRACDEILSDDNFNLENAEKDTYSEVDDELDISDNSSSSSSSPLKESTFNILKRSFSASGGERQSQTRDFTGGTGSRPRPASAGIAVSQRKVRQISDPIQQILIQLHKIIYITQLPPALHHNLKRRVIERFKKSLFSQQSNPCNLKSEIKKLSQGSPEPIEPNFFTADYHLLHRSSGGNSLSPNDPTGLPTSIELEEGITYEQMQTVIEEVLEESGYYNFTSNRYHSYPWGTKNHPTKR

SEQ ID NO: 56962 - protein, 474 aa, Homo sapiens
  Payload ID: 11196
  Gene Symbol: NEK10
  Gene Name: NIMA-related kinase 10
  Uniprot ID: Q6ZWH5
  ENSP ID: ENSP00000373281
MVPVQPAEPPEVLKSEPYGEKADVWAVGCILYQMATLSPPFYSTNMLSLATKIVEAVYEPVPEGIYSEKVTDTISRCLTPDAEARPDIVEVSSMISDVMMKYLDNLSTSQLSLEKKLERERRRTQRYFMEANRNTVTCHHELAVLSHETFEKASLSSSSSGAASLKSELSESADLPPEGFQASYGKDEDRACDEILSDDNFNLENAEKDTYSEVDDELDISDNSSSSSSSPLKESTFNILKRSFSASGGERQSQTRDFTGGTGSRPRPALLPLDLLLKVPPHMLRAHIKEIEAELVTGWQSHSLPAVILRNLKDHASAGIAVSQRKVRQISDPIQQILIQLHKIIYITQLPPALHHNLKRRVIERFKKSLFSQQSNPCNLKSEIKKLSQGSPEPIEPNFFTADYHLLHRSSGGNSLSPNDPTGLPTSIELEEGITYEQMQTVIEEVLEESGYYNFTSNRYHSYPWGTKNHPTKR

SEQ ID NO: 56963 - protein, 196 aa, Homo sapiens
  Payload ID: 11196
  Gene Symbol: NEK10
  Gene Name: NIMA-related kinase 10
  ENSP ID: ENSP00000392344
  MOD_RES (1)..(1): Any amino acid
XIDIGHYVRDISAYEELVSKLNLLVEDELKQIAENIESINQNKAPLKYIGNYAILDHLGSGAFGCVYKLYHPNIVRYYKTFLENDRLYIVMELIEGAPLGEHFSSLKEKHHHFTEERLWKIFIQLCLALRYLHKEKRIVHRDLTPNNIMLGDKDKVTVTDFGLAKQKQENSKLTSVVGTILYSCGFMRRCKETVAG

SEQ ID NO: 56964 - protein, 132 aa, Homo sapiens
  Payload ID: 11196
  Gene Symbol: NEK10
  Gene Name: NIMA-related kinase 10
  ENSP ID: ENSP00000395338
MPDQDKKVKTTEKSTDKQQEITIRDYSDLKRLRCLLNVQSSKQQLPAINFDSAQNSMTKSEPAIRAGGHRARGQWHESTEAVELENFSINYKNERNFSKHPQRKLFQEIFTALVKNRLISREWVNRAPSIHF

SEQ ID NO: 56965 - protein, 1172 aa, Homo sapiens
  Payload ID: 11196
  Gene Symbol: NEK10
  Gene Name: NIMA-related kinase 10
  Uniprot ID: Q6ZWH5
  ENSP ID: ENSP00000395849
MPDQDKKVKTTEKSTDKQQEITIRDYSDLKRLRCLLNVQSSKQQLPAINFDSAQNSMTKSEPAIRAGGHRARGQWHESTEAVELENFSINYKNERNFSKHPQRKLFQEIFTALVKNRLISREWVNRAPSIHFLRVLICLRLLMRDPCYQEILHSLGGIENLAQYMEIVANEYLGYGEEQHTVDKLVNMTYIFQKLAAVKDQREWVTTSGAHKTLVNLLGARDTNVLLGSLLALASLAESQECREKISELNIVENLLMILHEYDLLSKRLTAELLRLLCAEPQVKEQVKLYEGIPVLLSLLHSDHLKLLWSIVWILVQVCEDPETSVEIRIWGGIKQLLHILQGDRNFVSDHSSIGSLSSANAAGRIQQLHLSEDLSPREIQENTFSLQAACCAALTELVLNDTNAHQVVQENGVYTIAKLILPNKQKNAAKSNLLQCYAFRALRFLFSMERNRPLFKRLFPTDLFEIFIDIGHYVRDISAYEELVSKLNLLVEDELKQIAENIESINQNKAPLKYIGNYAILDHLGSGAFGCVYKVRKHSGQNLLAMKEVNLHNPAFGKDKKDRDSSVRNIVSELTIIKEQLYHPNIVRYYKTFLENDRLYIVMELIEGAPLGEHFSSLKEKHHHFTEERLWKIFIQLCLALRYLHKEKRIVHRDLTPNNIMLGDKDKVTVTDFGLAKQKQENSKLTSVVGTILYSCPEVLKSEPYGEKADVWAVGCILYQMATLSPPFYSTNMLSLATKIVEAVYEPVPEGIYSEKVTDTISRCLTPDAEARPDIVEVSSMISDVMMKYLDNLSTSQLSLEKKLERERRRTQRYFMEANRNTVTCHHELAVLSHETFEKASLSSSSSGAASLKSELSESADLPPEGFQASYGKDEDRACDEILSDDNFNLENAEKDTYSEVDDELDISDNSSSSSSSPLKESTFNILKRSFSASGGERQSQTRDFTGGTGSRPRPALLPLDLLLKVPPHMLRAHIKEIEAELVTGWQSHSLPAVILRNLKDHGPQMGTFLWQASAGIAVSQRKVRQISDPIQQILIQLHKIIYITQLPPALHHNLKRRVIERFKKSLFSQQSNPCNLKSEIKKLSQGSPEPIEPNFFTADYHLLHRSSGGNSLSPNDPTGLPTSIELEEGITYEQMQTVIEEVLEESGYYNFTSNRYHSYPWGTKNHPTKR

SEQ ID NO: 56966 - protein, 166 aa, Homo sapiens
  Payload ID: 11196
  Gene Symbol: NEK10
  Gene Name: NIMA-related kinase 10
  ENSP ID: ENSP00000412651
  MOD_RES (1)..(1): Any amino acid
XLAMKEVNLHNPAFGKDKKDRDSSVRNIVSELTIIKEQLYHPNIVRYYKTFLENDRLYIVMELIEGAPLGEHFSSLKEKHHHFTEERLWKIFIQLCLALRYLHKEKRIVHRDLTPNNIMLGDKDKVTVTDFGLAKQKQENSKLTSVVGTILYSCGFMRRCKETVAG

SEQ ID NO: 56967 - protein, 470 aa, Homo sapiens
  Payload ID: 11197
  Gene Symbol: NEK11
  Gene Name: NIMA-related kinase 11
  Uniprot ID: Q8NG66
  ENSP ID: ENSP00000349389
MLKFQEAAKCVSGSTAISTYPKTLIARRYVLQQKLGSGSFGTVYLVSDKKAKRGEELKVLKEISVGELNPNETVQANLEAQLLSKLDHPAIVKFHASFVEQDNFCIITEYCEGRDLDDKIQEYKQAGKIFPENQIIEWFIQLLLGVDYMHERRILHRDLKSKNVFLKNNLLKIGDFGVSRLLMGSCDLATTLTGTPHYMSPEALKHQGYDTKSDIWSLACILYEMCCMNHAFAGSNFLSIVLKIVEGDTPSLPERYPKELNAIMESMLNKNPSLRPSAIEILKIPYLDEQLQNLMCRYSEMTLEDKNLDCQKEAAHIINAMQKRIHLQTLRALSEVQKMTPRERMRLRKLQAADEKARKLKKIVEEKYEENSKRMQELRSRNFQQLSVDVLHEKTHLKGMEEKEEQPEGRLSCSPQDEDEERWQGREEESDEPTLENLPESQPIPSMDLHELESIVEDATSDLGYHATHS

SEQ ID NO: 56968 - protein, 645 aa, Homo sapiens
  Payload ID: 11197
  Gene Symbol: NEK11
  Gene Name: NIMA-related kinase 11
  Uniprot ID: Q8NG66
  ENSP ID: ENSP00000372857
MLKFQEAAKCVSGSTAISTYPKTLIARRYVLQQKLGSGSFGTVYLVSDKKAKRGEELKVLKEISVGELNPNETVQANLEAQLLSKLDHPAIVKFHASFVEQDNFCIITEYCEGRDLDDKIQEYKQAGKIFPENQIIEWFIQLLLGVDYMHERRILHRDLKSKNVFLKNNLLKIGDFGVSRLLMGSCDLATTLTGTPHYMSPEALKHQGYDTKSDIWSLACILYEMCCMNHAFAGSNFLSIVLKIVEGDTPSLPERYPKELNAIMESMLNKNPSLRPSAIEILKIPYLDEQLQNLMCRYSEMTLEDKNLDCQKEAAHIINAMQKRIHLQTLRALSEVQKMTPRERMRLRKLQAADEKARKLKKIVEEKYEENSKRMQELRSRNFQQLSVDVLHEKTHLKGMEEKEEQPEGRLSCSPQDEDEERWQGREEESDEPTLENLPESQPIPSMDLHELESIVEDATSDLGYHEIPEDPLVAEEYYADAFDSYCEESDEEEEEIALERPEKEIRNEGSQPAYRTNQQDSDIEALARCLENVLGCTSLDTKTITTMAEDMSPGPPIFNSVMARTKMKRMRESAMQKLGTEVFEEVYNYLKRARHQNASEAEIRECLEKVVPQASDCFEVDQLLYFEEQLLITMGKEPTLQNHL

SEQ ID NO: 56969 - protein, 79 aa, Homo sapiens
  Payload ID: 11197
  Gene Symbol: NEK11
  Gene Name: NIMA-related kinase 11
  ENSP ID: ENSP00000421192
MLKFQEAAKCVSGSTAISTYPKTLIARRYVLQQKLGSGSFGTVYLVSDKKAKRGEELAEIWTIKFRNINKLEKSFQKIK

SEQ ID NO: 56970 - protein, 540 aa, Homo sapiens
  Payload ID: 11197
  Gene Symbol: NEK11
  Gene Name: NIMA-related kinase 11
  ENSP ID: ENSP00000421549
MLKFQEAAKCVSGSTAISTYPKTLIARRYVLQQKLGSGSFGTVYLVSDKKAKRGEELKVLKEISVGELNPNETVQANLEAQLLSKLDHPAIVKFHASFVEQDNFCIITEYCEGRDLDDKIQEYKQAGKIFPENQIIEWFIQLLLGVDYMHERRILHRDLKSKNVFLKNNLLKIGDFGVSRLLMGSCDLATTLTGTPHYMSPEALKHQGYDTKSDIWQKRIHLQTLRALSEVQKMTPRERMRLRKLQAADEKARKLKKIVEEKYEENSKRMQELRSRNFQQLSVDVLHEKTHLKGMEEKEEQPEGRLSCSPQDEDEERWQGREEESDEPTLENLPESQPIPSMDLHELESIVEDATSDLGYHEIPEDPLVAEEYYADAFDSYCEESDEEEEEIALERPEKEIRNEGSQPAYRTNQQDSDIEALARCLENVLGCTSLDTKTITTMAEDMSPGPPIFNSVMARTKMKRMRESAMQKLGTEVFEEVYNYLKRARHQNASEAEIRECLEKVVPQASDCFEVDQLLYFEEQLLITMGKEPTLQNHL

SEQ ID NO: 56971 - protein, 645 aa, Homo sapiens; identical to SEQ ID NO: 56968
  Payload ID: 11197
  Gene Symbol: NEK11
  Gene Name: NIMA-related kinase 11
  Uniprot ID: Q8NG66
  ENSP ID: ENSP00000421851

SEQ ID NO: 56972 - protein, 599 aa, Homo sapiens
  Payload ID: 11197
  Gene Symbol: NEK11
  Gene Name: NIMA-related kinase 11
  Uniprot ID: Q8NG66
  ENSP ID: ENSP00000423458
MLKFQEAAKCVSGSTAISTYPKTLIARRYVLQQKLGSGSFGTVYLVSDKKAKRGEELKVLKEISVGELNPNETVQANLEAQLLSKLDHPAIVKFHASFVEQDNFCIITEYCEGRDLDDKIQEYKQAGKIFPENQIIEWFIQLLLGVDYMHERRILHRDLKSKNVFLKNNLLKIGDFGVSRLLMGSCDLATTLTGTPHYMSPEALKHQGYDTKSDIWSLACILYEMCCMNHAFAGSNFLSIVLKIVEGDTPSLPERYPKELNAIMESMLNKNPSLRPSAIEILKIPYLDEQLQNLMCRYSEMTLEDKNLDCQKEAAHIINAMQKRIHLQTLRALSEVQKMTPRERMRLRKLQAADEKARKLKKIVEEKYEENSKRMQELRSRNFQQLSVDVLHEKTHLKGMEEKEEQPEGRLSCSPQDEDEERWQGREEESDEPTLENLPESQPIPSMDLHELESIVEDATSDLGYHEIPEDPLVAEEYYADAFDSYCEESDEEEEEIALERPEKEIRNEGSQPAYRTNQQDSDIEALARCLENVLGCTSLDQPCRSWGQKYLKRSIITSREQGIRMLAKQRSASVWKKWCLKPATVLKWTSSCTLKSSC

SEQ ID NO: 56973 - protein, 470 aa, Homo sapiens; identical to SEQ ID NO: 56967
  Payload ID: 11197
  Gene Symbol: NEK11
  Gene Name: NIMA-related kinase 11
  Uniprot ID: Q8NG66
  ENSP ID: ENSP00000425114

SEQ ID NO: 56974 - protein, 212 aa, Homo sapiens
  Payload ID: 11197
  Gene Symbol: NEK11
  Gene Name: NIMA-related kinase 11
  ENSP ID: ENSP00000425662
MLKFQEAAKCVSGSTAISTYPKTLIARRYVLQQKLGSGSFGTVYLVSDKKAKRGEELKVLKEISVGELNPNETVQANLEAQLLSKLDHPAIVKFHASFVEQDNFCIITEYCEGRDLDDKIQEYKQAGKIFPENQIIEWFIQLLLGVDYMHERRILHRDLKSKNVFLKNNLLKIATGSSNHHIGCTWGRKEGRNKSVQLVRRFWSFSTSNGIL

SEQ ID NO: 56975 - protein, 482 aa, Homo sapiens
  Payload ID: 11197
  Gene Symbol: NEK11
  Gene Name: NIMA-related kinase 11
  Uniprot ID: Q8NG66
  ENSP ID: ENSP00000426662
MLKFQEAAKCVSGSTAISTYPKTLIARRYVLQQKLGSGSFGTVYLVSDKKAKRGEELKVLKEISVGELNPNETVQANLEAQLLSKLDHPAIVKFHASFVEQDNFCIITEYCEGRDLDDKIQEYKQAGKIFPENQIIEWFIQLLLGVDYMHERRILHRDLKSKNVFLKNNLLKIGDFGVSRLLMGSCDLATTLTGTPHYMSPEALKHQGYDTKSDIWSLACILYEMCCMNHAFAGSNFLSIVLKIVEGDTPSLPERYPKELNAIMESMLNKNPSLRPSAIEILKIPYLDEQLQNLMCRYSEMTLEDKNLDCQKEAAHIINAMQKRIHLQTLRALSEVQKMTPRERMRLRKLQAADEKARKLKKIVEEKYEENSKRMQELRSRNFQQLSVDVLHEKTHLKGMEEKEEQPEGRLSCSPQDEDEERWQGREEESDEPTLENLPESQPIPSMDLHELESIVEDATSDLGYHGDCNLISLDEYWKNEK

SEQ ID NO: 56976 - protein, 220 aa, Homo sapiens
  Payload ID: 11197
  Gene Symbol: NEK11
  Gene Name: NIMA-related kinase 11
  ENSP ID: ENSP00000473422
  MOD_RES (1)..(1): Any amino acid
XKVLKEISVGELNPNETVQANLEAQLLSKLDHPAIVKFHASFVEQDNFCIITEYCEGRDLDDKIQEYKQAGKIFPENQIIEWFIQLLLGVDYMHERRILHRDLKSKNVFLKNNLLKIGDFGVSRLLMGSCDLATTLTGTPHYMSPEALKHQGYDTKSDIWSLACILYEMCCMNHAFAGSNFLSIVLKIVEGDTPSLPERYPKELNAIMERYRNKHVVTEI

SEQ ID NO: 56977 - protein, 384 aa, Homo sapiens
  Payload ID: 11198
  Gene Symbol: NEK2
  Gene Name: NIMA-related kinase 2
  Uniprot ID: P51955
  ENSP ID: ENSP00000355965
MPSRAEDYEVLYTIGTGSYGRCQKIRRKSDGKILVWKELDYGSMTEAEKQMLVSEVNLLRELKHPNIVRYYDRIIDRTNTTLYIVMEYCEGGDLASVITKGTKERQYLDEEFVLRVMTQLTLALKECHRRSDGGHTVLHRDLKPANVFLDGKQNVKLGDFGLARILNHDTSFAKTFVGTPYYMSPEQMNRMSYNEKSDIWSLGCLLYELCALMPPFTAFSQKELAGKIREGKFRRIPYRYSDELNEIITRMLNLKDYHRPSVEEILENPLIADLVADEQRRNLERRGRQLGEPEKSQDSSPVLSELKLKEIQLQERERALKAREERLEQKEQELCVRERLAEDKLARAENLLKNYSLLKERKFLSLASNPGMRINLVNRSWCYK

SEQ ID NO: 56978 - protein, 445 aa, Homo sapiens
  Payload ID: 11198
  Gene Symbol: NEK2
  Gene Name: NIMA-related kinase 2
  Uniprot ID: P51955
  ENSP ID: ENSP00000355966
MPSRAEDYEVLYTIGTGSYGRCQKIRRKSDGKILVWKELDYGSMTEAEKQMLVSEVNLLRELKHPNIVRYYDRIIDRTNTTLYIVMEYCEGGDLASVITKGTKERQYLDEEFVLRVMTQLTLALKECHRRSDGGHTVLHRDLKPANVFLDGKQNVKLGDFGLARILNHDTSFAKTFVGTPYYMSPEQMNRMSYNEKSDIWSLGCLLYELCALMPPFTAFSQKELAGKIREGKFRRIPYRYSDELNEIITRMLNLKDYHRPSVEEILENPLIADLVADEQRRNLERRGRQLGEPEKSQDSSPVLSELKLKEIQLQERERALKAREERLEQKEQELCVRERLAEDKLARAENLLKNYSLLKERKFLSLASNPELLNLPSSVIKKKVHFSGESKENIMRSENSESQLTSKSKCKDLKKRLHAAQLRAQALSDIEKNYQLKSRQILGMR

SEQ ID NO: 56979 - protein, 388 aa, Homo sapiens
  Payload ID: 11198
  Gene Symbol: NEK2
  Gene Name: NIMA-related kinase 2
  ENSP ID: ENSP00000440237
MPSRAEDYEVLYTIGTGSYGRCQKIRRKSDGKILVWKELDYGSMTEAEKQMLVSEVNLLRELKHPNIVRYYDRIIDRTNTTLYIVMEYCEGGDLASVITKGTKERQYLDEEFVLRVMTQLTLALKECHRRSDGGHTVLHRDLKPANVFLDGKQNVKLGDFGLARILNHDTSFAKTFVGTPYYMSPEQMNRMSYNEKSDIWSLGCLLYELCALMPPFTAFSQKELAGKIREGKFRRIPYRYSDELNEIITRMLNLKDYHRPSVEEILENPLIADLVADEQRRNLERRGRQLGEPEKSQDSSPVLSELKLKEIQLQERERALKAREERLEQKEQELCVRERLAEDKLARAENLLKNYSLLKERKFLSLASNPESHFVAQAGMQWCDHSSM

SEQ ID NO: 56980 - protein, 46 aa, Homo sapiens
  Payload ID: 11199
  Gene Symbol: NEK3
  Gene Name: NIMA-related kinase 3
  ENSP ID: ENSP00000447995
MDDYMVLRMIGEGSFGRALLVQHESSNQMFAMKEIRLPKLKDTCIL

SEQ ID NO: 56981 - protein, 58 aa, Homo sapiens
  Payload ID: 11199
  Gene Symbol: NEK3
  Gene Name: NIMA-related kinase 3
  ENSP ID: ENSP00000449679
MDDYMVLRMIGEGSFGRALLVQHESSNQMFAMKEIRLPKSFSNTQNSRKEAVLLAKMK

SEQ ID NO: 56982 - protein, 506 aa, Homo sapiens
  Payload ID: 11199
  Gene Symbol: NEK3
  Gene Name: NIMA-related kinase 3
  Uniprot ID: P51956
  ENSP ID: ENSP00000480328
MDDYMVLRMIGEGSFGRALLVQHESSNQMFAMKEIRLPKSFSNTQNSRKEAVLLAKMKHPNIVAFKESFEAEGHLYIVMEYCDGGDLMQKIKQQKGKLFPEDMILNWFTQMCLGVNHIHKKRVLHRDIKSKNIFLTQNGKVKLGDFGSARLLSNPMAFACTYVGTPYYVPPEIWENLPYNNKSDIWSLGCILYELCTLKHPFQANSWKNLILKVCQGCISPLPSHYSYELQFLVKQMFKRNPSHRPSATTLLSRGIVARLVQKCLPPEIIMEYGEEVLEEIKNSKHNTPRKKTNPSRIRIALGNEASTVQEEEQDRKGSHTDLESINENLVESALRRVNREEKGNKSVHLRKASSPNLHRRQWEKNVPNTALTALENASILTSSLTAEDDRGGSVIKYSKNTTRKQWLKETPDTLLNILKNADLSLAFQTYTIYRPGSEGFLKGPLSEETEASDSVDGGHDSVILDPERLEPGLDEEDTDFEEEDDNPDWVSELKKRAGWQGLCDR

SEQ ID NO: 56983 - protein, 497 aa, Homo sapiens
  Payload ID: 11199
  Gene Symbol: NEK3
  Gene Name: NIMA-related kinase 3
  ENSP ID: ENSP00000481533
MDDYMVLRMIGEGSFGRALLVQHESSNQMFAMKEIRLPKSFSNTQNSRKEAVLLAKMKHPNIVAFKESFEAEGHLYIVMEYCDGGDLMQKIKQQKGKLFPEDMILNWFTQMCLGVNHIHKKRVLHRDIKSKNIFLTQNGKVKLGDFGSARLLSNPMAFACTYVGTPYYVPPEIWENLPYNNKSDIWSLGCILYELCTLKHPFQANSWKNLILKVCQGCISPLPSHYSYELQFLVKQMFKRNPSHRPSATTLLSRGIVARLVQKCLPPEIIMEYGEEVLEEIKNSKHNTPRKKTNPSRIRIALGNEASTVQEEEQDRKGSHTDLESINENLVESALRRVNREEKASSPNLHRRQWEKNVPNTALTALENASILTSSLTAEDDRGGSVIKYSKNTTRKQWLKETPDTLLNILKNADLSLAFQTYTIYRPGSEGFLKGPLSEETEASDSVDGGHDSVILDPERLEPGLDEEDTDFEEEDDNPDWVSELKKRAGWQGLCDR

SEQ ID NO: 56984 - protein, 181 aa, Homo sapiens
  Payload ID: 11199
  Gene Symbol: NEK3
  Gene Name: NIMA-related kinase 3
  ENSP ID: ENSP00000483058
  MOD_RES (1)..(1): Any amino acid
XEYGEEVLEEIKNSKHNTPRKKTNPSRIRIALGNEASTVQEEEQDRKGSHTDLESINENLVESALRRVNREEKGNKSVHLRKASSPNLHRRQWEKNVPNTALTALENASILTSSLTAEDDRGSEGFLKGPLSEETEASDSVDGGHDSVILDPERLEPGLDEEDTDFEEEDDNPDWVSELKK

SEQ ID NO: 56985 - protein, 489 aa, Homo sapiens
  Payload ID: 11199
  Gene Symbol: NEK3
  Gene Name: NIMA-related kinase 3
  Uniprot ID: P51956
  ENSP ID: ENSP00000484086
MDDYMVLRMIGEGSFGRALLVQHESSNQMFAMKEIRLPKSFSNTQNSRKEAVLLAKMKHPNIVAFKESFEAEGHLYIVMEYCDGGDLMQKIKQQKGKLFPEDMILNWFTQMCLGVNHIHKKRVLHRDIKSKNIFLTQNGKVKLGDFGSARLLSNPMAFACTYVGTPYYVPPEIWENLPYNNKSDIWSLGCILYELCTLKHPFQANSWKNLILKVCQGCISPLPSHYSYELQFLVKQMFKRNPSHRPSATTLLSRGIVARLVQKCLPPEIIMEYGEEVLEEIKNSKHNTPRKKQEEEQDRKGSHTDLESINENLVESALRRVNREEKGNKSVHLRKASSPNLHRRQWEKNVPNTALTALENASILTSSLTAEDDRGGSVIKYSKNTTRKQWLKETPDTLLNILKNADLSLAFQTYTIYRPGSEGFLKGPLSEETEASDSVDGGHDSVILDPERLEPGLDEEDTDFEEEDDNPDWVSELKKRAGWQGLCDR

SEQ ID NO: 56986 - protein, 506 aa, Homo sapiens; identical to SEQ ID NO: 56982
  Payload ID: 11199
  Gene Symbol: NEK3
  Gene Name: NIMA-related kinase 3
  Uniprot ID: P51956
  ENSP ID: ENSP00000484443

SEQ ID NO: 56987 - protein, 298 aa, Homo sapiens
  Payload ID: 11199
  Gene Symbol: NEK3
  Gene Name: NIMA-related kinase 3
  ENSP ID: ENSP00000484594
MDDYMVLRMIGEGSFGRALLVQHESSNQMFAMKEIRLPKSFSNTQNSRKEAVLLAKMKHPNIVAFKESFEAEGHLYIVMEYCDGGDLMQKIKQQKGKLFPEDMILNWFTQMCLGVNHIHKKRVLHRDIKSKNIFLTQNGKVKLGDFGSARLLSNPMAFACTYVGTPYYVPPEIWENLPYNNKSDIWSLGCILYELCTLKHPFQANSWKNLILKVCQGCISPLPSHYSYELQFLVKQMFKRNPSHRPSATTLLSRGIVARLVQKCLPPEIIMEYGEEVLEEIKNSKHNTPRKKTRGRTR

SEQ ID NO: 56988 - protein, 46 aa, Homo sapiens; identical to SEQ ID NO: 56980
  Payload ID: 11199
  Gene Symbol: NEK3
  Gene Name: NIMA-related kinase 3
  ENSP ID: ENSP00000487230

SEQ ID NO: 56989 - protein, 841 aa, Homo sapiens
  Payload ID: 11200
  Gene Symbol: NEK4
  Gene Name: NIMA-related kinase 4
  Uniprot ID: P51957
  ENSP ID: ENSP00000233027
MPLAAYCYLRVVGKGSYGEVTLVKHRRDGKQYVIKKLNLRNASSRERRAAEQEAQLLSQLKHPNIVTYKESWEGGDGLLYIVMGFCEGGDLYRKLKEQKGQLLPENQVVEWFVQIAMALQYLHEKHILHRDLKTQNVFLTRTNIIKVGDLGIARVLENHCDMASTLIGTPYYMSPELFSNKPYNYKSDVWALGCCVYEMATLKHAFNAKDMNSLVYRIIEGKLPPMPRDYSPELAELIRTMLSKRPEERPSVRSILRQPYIKRQISFFLEATKIKTSKNNIKNGDSQSKPFATVVSGEAESNHEVIHPQPLSSEGSQTYIMGEGKCLSQEKPRASGLLKSPASLKAHTCKQDLSNTTELATISSVNIDILPAKGRDSVSDGFVQENQPRYLDASNELGGICSISQVEEEMLQDNTKSSAQPENLIPMWSSDIVTGEKNEPVKPLQPLIKEQKPKDQSLALSPKLECSGTILAHSNLRLLGSSDSPASASRVAGITGVCHHAQDQVAGECIIEKQGRIHPDLQPHNSGSEPSLSRQRRQKRREQTEHRGEKRQVRRDLFAFQESPPRFLPSHPIVGKVDVTSTQKEAENQRRVVTGSVSSSRSSEMSSSKDRPLSARERRRLKQSQEEMSSSGPSVRKASLSVAGPGKPQEEDQPLPARRLSSDCSVTQERKQIHCLSEDELSSSTSSTDKSDGDYGEGKGQTNEINALVQLMTQTLKLDSKESCEDVPVANPVSEFKLHRKYRDTLILHGKVAEEAEEIHFKELPSAIMPGSEKIRRLVEVLRTDVIRGLGVQLLEQVYDLLEEEDEFDREVRLREHMGEKYTTYSVKARQLKFFEENMNF

SEQ ID NO: 56990 - protein, 781 aa, Homo sapiens
  Payload ID: 11200
  Gene Symbol: NEK4
  Gene Name: NIMA-related kinase 4
  Uniprot ID: P51957
  ENSP ID: ENSP00000373227
MPLAAYCYLRVVGKGSYGEVTLVKHRRDGKQYVIKKLNLRNASSRERRAAEQEAQLLSQLKHPNIVTYKESWEGGDGLLYIVMGFCEGGDLYRKLKEQKGQLLPENQVVEWFVQIAMALQYLHEKHILHRDLKTQNVFLTRTNIIKVGDLGIARVLENHCDMASTLIGTPYYMSPELFSNKPYNYKSDVWALGCCVYEMATLKHAFNAKDMNSLVYRIIEGKLPPMPRDYSPELAELIRTMLSKRPEERPSVRSILRQPYIKRQISFFLEATKIKTSKNNIKNGDSQSKPFATVVSGEAESNHEVIHPQPLSSEGSQTYIMGEGKCLSQEKPRASGLLKSPASLKAHTCKQDLSNTTELATISSVNIDILPAKGRDSVSDGFVQENQPRYLDASNELGGICSISQVEEEMLQDNTKSSAQPENLIPMWSSDIVTGEKNEPVKPLQPLIKEQKPKDQDQVAGECIIEKQGRIHPDLQPHNSGSEPSLSRQRRQKRREQTEHRGEKRQVRRDLFAFQESPPRFLPSHPIVGKVDVTSTQKEAENQRRVVTGSVSSSRSSEMSSSKDRPLSARERRRLKQSQEEMSSSGPSVRKASLSVAGPGKPQEEDQPLPARRLSSDCSVTQERKQIHCLSEDELSSSTSSTDKSDGDYGEGKGQTNEINALVQLMTQTLKLDSKESCEDVPVANPVSEFKLHRKYRDTLILHGKVAEEAEEIHFKELPSAIMPGSEKIRRLVEVLRTDVIRGLGVQLLEQVYDLLEEEDEFDREVSVSLTVSRCLCYRIF

SEQ ID NO: 56991 - protein, 37 aa, Homo sapiens
  Payload ID: 11200
  Gene Symbol: NEK4
  Gene Name: NIMA-related kinase 4
  ENSP ID: ENSP00000417119
MPLAAYCYLRVVGKGSYGEVTLVKHRRDGKQPRAASC

SEQ ID NO: 56992 - protein, 722 aa, Homo sapiens
  Payload ID: 11200
  Gene Symbol: NEK4
  Gene Name: NIMA-related kinase 4
  ENSP ID: ENSP00000419666
MPLAAYCYLRVVGKGSYGEVTLVKHRRDGKQYLHEKHILHRDLKTQNVFLTRTNIIKVGDLGIARVLENHCDMASTLIGTPYYMSPELFSNKPYNYKSDVWALGCCVYEMATLKHAFNAKDMNSLVYRIIEGKLPPMPRDYSPELAELIRTMLSKRPEERPSVRSILRQPYIKRQISFFLEATKIKTSKNNIKNGDSQSKPFATVVSGEAESNHEVIHPQPLSSEGSQTYIMGEGKCLSQEKPRASGLLKSPASLKAHTCKQDLSNTTELATISSVNIDILPAKGRDSVSDGFVQENQPRYLDASNELGGICSISQVEEEMLQDNTKSSAQPENLIPMWSSDIVTGEKNEPVKPLQPLIKEQKPKDQSLALSPKLECSGTILAHSNLRLLGSSDSPASASRVAGITGVCHHAQDQVAGECIIEKQGRIHPDLQPHNSGSEPSLSRQRRQKRREQTEHRGEKRQVRRDLFAFQESPPRFLPSHPIVGKVDVTSTQKEAENQRRVVTGSVSSSRSSEMSSSKDRPLSARERRRLKQSQEEMSSSGPSVRKASLSVAGPGKPQEEDQPLPARRLSSDCSVTQERKQIHCLSEDELSSSTSSTDKSDGDYGEGKGQTNEINALVQLMTQTLKLDSKESCEDVPVANPVSEFKLHRKYRDTLILHGKVAEEAEEIHFKELPSAIMPGSEKIRRLVEVLRTDVIRGLGVQLLEQVYDLLEEEDEFDRE

SEQ ID NO: 56993 - protein, 142 aa, Homo sapiens
  Payload ID: 11200
  Gene Symbol: NEK4
  Gene Name: NIMA-related kinase 4
  ENSP ID: ENSP00000420231
  MOD_RES (1)..(1): Any amino acid
XLQDNTKSSAQPENLIPMWSSDIVTGEKNEPVKPLQPLIKEQKPKDQSLALSPKLECSGTILAHSNLRLLGSSDSPASASRVAGITGVCHHAQMESHSVAQAGVQWCDLSLLQPPPPGFKQFFYLSLLSSWDYRIKLLVNVL

SEQ ID NO: 56994 - protein, 752 aa, Homo sapiens
  Payload ID: 11200
  Gene Symbol: NEK4
  Gene Name: NIMA-related kinase 4
  Uniprot ID: P51957
  ENSP ID: ENSP00000437703
MPLAAYCYLRVVGKGSYGEVTLVKHRRDGKQYLHEKHILHRDLKTQNVFLTRTNIIKVGDLGIARVLENHCDMASTLIGTPYYMSPELFSNKPYNYKSDVWALGCCVYEMATLKHAFNAKDMNSLVYRIIEGKLPPMPRDYSPELAELIRTMLSKRPEERPSVRSILRQPYIKRQISFFLEATKIKTSKNNIKNGDSQSKPFATVVSGEAESNHEVIHPQPLSSEGSQTYIMGEGKCLSQEKPRASGLLKSPASLKAHTCKQDLSNTTELATISSVNIDILPAKGRDSVSDGFVQENQPRYLDASNELGGICSISQVEEEMLQDNTKSSAQPENLIPMWSSDIVTGEKNEPVKPLQPLIKEQKPKDQSLALSPKLECSGTILAHSNLRLLGSSDSPASASRVAGITGVCHHAQDQVAGECIIEKQGRIHPDLQPHNSGSEPSLSRQRRQKRREQTEHRGEKRQVRRDLFAFQESPPRFLPSHPIVGKVDVTSTQKEAENQRRVVTGSVSSSRSSEMSSSKDRPLSARERRRLKQSQEEMSSSGPSVRKASLSVAGPGKPQEEDQPLPARRLSSDCSVTQERKQIHCLSEDELSSSTSSTDKSDGDYGEGKGQTNEINALVQLMTQTLKLDSKESCEDVPVANPVSEFKLHRKYRDTLILHGKVAEEAEEIHFKELPSAIMPGSEKIRRLVEVLRTDVIRGLGVQLLEQVYDLLEEEDEFDREVRLREHMGEKYTTYSVKARQLKFFEENMNF

SEQ ID NO: 56995 - protein, 708 aa, Homo sapiens
  Payload ID: 11201
  Gene Symbol: NEK5
  Gene Name: NIMA-related kinase 5
  Uniprot ID: Q6P3R8
  ENSP ID: ENSP00000347767
MDKYDVIKAIGQGAFGKAYLAKGKSDSKHCVIKEINFEKMPIQEKEASKKEVILLEKMKHPNIVAFFNSFQENGRLFIVMEYCDGGDLMKRINRQRGVLFSEDQILGWFVQISLGLKHIHDRKILHRDIKAQNIFLSKNGMVAKLGDFGIARVLNNSMELARTCIGTPYYLSPEICQNKPYNNKTDIWSLGCVLYELCTLKHPFEGNNLQQLVLKICQAHFAPISPGFSRELHSLISQLFQVSPRDRPSINSILKRPFLENLIPKYLTPEVIQEEFSHMLICRAGAPASRHAGKVVQKCKIQKVRFQGKCPPRSRISVPIKRNAILHRNEWRPPAGAQKARSIKMIERPKIAAVCGHYDYYYAQLDMLRRRAHKPSYHPIPQENTGVEDYGQETRHGPSPSQWPAEYLQRKFEAQQYKLKVEKQLGLRPSSAEPNYNQRQELRSNGEEPRFQELPFRKNEMKEQEYWKQLEEIRQQYHNDMKEIRKKMGREPEENSKISHKTYLVKKSNLPVHQDASEGEAPVQMEFRSCCPGWSAMARSWLTATSASQDIEKDLKQMRLQNTKESKNPEQKYKAKKGVKFEINLDKCISDENILQEEEAMDIPNETLTFEDGMKFKEYECVKEHGDYTDKAFEKLHCPEAGFSTQTVAAVGNRRQWDGGAPQTLLQMMAVADITSTCPTGPDSESVLSVSRQEGKTKDPYSPVLILM

SEQ ID NO: 56996 - protein, 295 aa, Homo sapiens
  Payload ID: 11201
  Gene Symbol: NEK5
  Gene Name: NIMA-related kinase 5
  ENSP ID: ENSP00000431956
MDKYDVIKAIGQGAFGKAYLAKGKSDSKHCVIKEINFEKMPIQEKEASKKEVILLEKMKHPNIVAFFNSFQENGRLFIVMEYCDGGDLMKRINRQRGVLFSEDQILGWFVQISLGLKHIHDRKILHRDIKAQNIFLSKNGMVAKLGDFGIARVLNNSMELARTCIGTPYYLSPEICQNKPYNNKTDIWSLGCVLYELCTLKHPFEGNNLQQLVLKICQAHFAPISPGFSRELHSLISQLFQVSPRDRPSINSILKRPFLENLIPKYLTPENSVTCLYAEQERQLLDMLGRWSRAC

SEQ ID NO: 56997 - protein, 708 aa, Homo sapiens; identical to SEQ ID NO: 56995
  Payload ID: 11201
  Gene Symbol: NEK5
  Gene Name: NIMA-related kinase 5
  Uniprot ID: Q6P3R8
  ENSP ID: ENSP00000477810

SEQ ID NO: 56998 - protein, 313 aa, Homo sapiens
  Payload ID: 11202
  Gene Symbol: NEK6
  Gene Name: NIMA-related kinase 6
  Uniprot ID: Q9HC98
  ENSP ID: ENSP00000319734
MAGQPGHMPHGGSSNNLCHTLGPVHPPDPQRHPNTLSFRCSLADFQIEKKIGRGQFSEVYKATCLLDRKTVALKKVQIFEMMDAKARQDCVKEIGLLKQLNHPNIIKYLDSFIEDNELNIVLELADAGDLSQMIKYFKKQKRLIPERTVWKYFVQLCSAVEHMHSRRVMHRDIKPANVFITATGVVKLGDLGLGRFFSSETTAAHSLVGTPYYMSPERIHENGYNFKSDIWSLGCLLYEMAALQSPFYGDKMNLFSLCQKIEQCDYPPLPGEHYSEKLRELVSMCICPDPHQRPDIGYVHQVAKQMHIWMSST

SEQ ID NO: 56999 - protein, 207 aa, Homo sapiens
  Payload ID: 11202
  Gene Symbol: NEK6
  Gene Name: NIMA-related kinase 6
  ENSP ID: ENSP00000362698
MAGQPGHMPHGGSSNNLCHTLGPVHPPDPQRHPNTLSFRCSLADFQIEKKIGRGQFSEVYKATCLLDRKTVALKKVQIFEMMDAKARQDCVKEIGLLKQLNHPNIIKYLDSFIEDNELNIVLELADAGDLSQMIKYFKKQKRLIPERTVWKYFVQLCSAVEHMHSRRVMHRDIKPANVFITATGVVKLGDLGLGRFFSSETTAAHSL

SEQ ID NO: 57000 - protein, 347 aa, Homo sapiens
  Payload ID: 11202
  Gene Symbol: NEK6
  Gene Name: NIMA-related kinase 6
  Uniprot ID: Q9HC98
  ENSP ID: ENSP00000362702
MPRREVCWEAAHFRQEEQSLPRPRVRALVRLACRMAGQPGHMPHGGSSNNLCHTLGPVHPPDPQRHPNTLSFRCSLADFQIEKKIGRGQFSEVYKATCLLDRKTVALKKVQIFEMMDAKARQDCVKEIGLLKQLNHPNIIKYLDSFIEDNELNIVLELADAGDLSQMIKYFKKQKRLIPERTVWKYFVQLCSAVEHMHSRRVMHRDIKPANVFITATGVVKLGDLGLGRFFSSETTAAHSLVGTPYYMSPERIHENGYNFKSDIWSLGCLLYEMAALQSPFYGDKMNLFSLCQKIEQCDYPPLPGEHYSEKLRELVSMCICPDPHQRPDIGYVHQVAKQMHIWMSST

SEQ ID NO: 57001 - protein, 313 aa, Homo sapiens; identical to SEQ ID NO: 56998
  Payload ID: 11202
  Gene Symbol: NEK6
  Gene Name: NIMA-related kinase 6
  Uniprot ID: Q9HC98
  ENSP ID: ENSP00000362705

SEQ ID NO: 57002 - protein, 347 aa, Homo sapiens; identical to SEQ ID NO: 57000
  Payload ID: 11202
  Gene Symbol: NEK6
  Gene Name: NIMA-related kinase 6
  Uniprot ID: Q9HC98
  ENSP ID: ENSP00000377749

SEQ ID NO: 57003 - protein, 219 aa, Homo sapiens
  Payload ID: 11202
  Gene Symbol: NEK6
  Gene Name: NIMA-related kinase 6
  ENSP ID: ENSP00000389517
MAGQPGHMPHGGSSNNLCHTLGPVHPPDPQRHPNTLSFRCSLADFQIEKKIGRGQFSEVYKATCLLDRKTVALKKVQIFEMMDAKARQDCVKEIGLLKQLNHPNIIKYLDSFIEDNELNIVLELADAGDLSQMIKYFKKQKRLIPERTVWKYFVQLCSAVEHMHSRRVMHRDIKPANVFITATGVVKLGDLGLGRFFSSETTAAHSLVGTPYYMSPERI

SEQ ID NO: 57004 - protein, 194 aa, Homo sapiens
  Payload ID: 11202
  Gene Symbol: NEK6
  Gene Name: NIMA-related kinase 6
  ENSP ID: ENSP00000399847
MPRREVCWEAAHFRQEEQSLPRPRVRALVRLACRMAGQPGHMPHGGSSNNLCHTLGPVHPPDPQRHPNTLSFRCSLADFQIEKKIGRGQFSEVYKATCLLDRKTVALKKVQIFEMMDAKARQDCVKEIGLLKQLNHPNIIKYLDSFIEDNELNIVLELADAGDLSQMIKYFKKQKRLIPERTVWKYFVQLCSAV

SEQ ID NO: 57005 - protein, 222 aa, Homo sapiens
  Payload ID: 11202
  Gene Symbol: NEK6
  Gene Name: NIMA-related kinase 6
  ENSP ID: ENSP00000403087
MAGQPGHMPHGGSSNNLCHTLGPVHPPDPQRHPNTLSFRCSLADFQIEKKIGRGQFSEVYKATCLLDRKTVALKKVQIFEMMDAKARQDCVKEIGLLKQLNHPNIIKYLDSFIEDNELNIVLELADAGDLSQMIKYFKKQKRLIPERTVWKYFVQLCSAVEHMHSRRVMHRDIKPANVFITATGVVKLGDLGLGRFFSSETTAAHSLVGTPYYMSPERIHEN

SEQ ID NO: 57006 - protein, 171 aa, Homo sapiens
  Payload ID: 11202
  Gene Symbol: NEK6
  Gene Name: NIMA-related kinase 6
  ENSP ID: ENSP00000403414
MAGQPGHMPHGGSSNNLCHTLGPVHPPDPQRHPNTLSFRCSLADFQIEKKIGRGQFSEVYKATCLLDRKTVALKKVQIFEMMDAKARQDCVKEIGLLKQLNHPNIIKYLDSFIEDNELNIVLELADAGDLSQMIKYFKKQKRLIPERTVWKYFVQLCSAVEHMHSRRVMHR

SEQ ID NO: 57007 - protein, 200 aa, Homo sapiens
  Payload ID: 11202
  Gene Symbol: NEK6
  Gene Name: NIMA-related kinase 6
  ENSP ID: ENSP00000405215
MAGQPGHMPHGGSSNNLCHTLGPVHPPDPQQLNHPNIIKYLDSFIEDNELNIVLELADAGDLSQMIKYFKKQKRLIPERTVWKYFVQLCSAVEHMHSRRVMHRDIKPANVFITATGVVKLGDLGLGRFFSSETTAAHSLVGTPYYMSPERIHENGYNFKSDIWSLGCLLYEMAALQSPFYGDKMNLFSLCQKIEQCDYPP

SEQ ID NO: 57008 - protein, 220 aa, Homo sapiens
  Payload ID: 11202
  Gene Symbol: NEK6
  Gene Name: NIMA-related kinase 6
  ENSP ID: ENSP00000411401
MAGQPGHMPHGGSSNNLCHTLGPVHPPDPQRHPNTLSFRCSLADFQIEKKIGRGQFSEVYKATCLLDRKTVALKKVQIFEMMDAKARQDCVKEIGLLKQLNHPNIIKYLDSFIEDNELNIVLELADAGDLSQMIKYFKKQKRLIPERTVWKYFVQLCSAVEHMHSRRVMHRDIKPANVFITATGVVKLGDLGLGRFFSSETTAAHSLVGTPYYMSPERIH

SEQ ID NO: 57009 - protein, 338 aa, Homo sapiens
  Payload ID: 11202
  Gene Symbol: NEK6
  Gene Name: NIMA-related kinase 6
  Uniprot ID: Q9HC98
  ENSP ID: ENSP00000439651
MEATGWDSRCSPGTQVRALVRLACRMAGQPGHMPHGGSSNNLCHTLGPVHPPDPQRHPNTLSFRCSLADFQIEKKIGRGQFSEVYKATCLLDRKTVALKKVQIFEMMDAKARQDCVKEIGLLKQLNHPNIIKYLDSFIEDNELNIVLELADAGDLSQMIKYFKKQKRLIPERTVWKYFVQLCSAVEHMHSRRVMHRDIKPANVFITATGVVKLGDLGLGRFFSSETTAAHSLVGTPYYMSPERIHENGYNFKSDIWSLGCLLYEMAALQSPFYGDKMNLFSLCQKIEQCDYPPLPGEHYSEKLRELVSMCICPDPHQRPDIGYVHQVAKQMHIWMSST

SEQ ID NO: 57010 - protein, 313 aa, Homo sapiens; identical to SEQ ID NO: 56998
  Payload ID: 11202
  Gene Symbol: NEK6
  Gene Name: NIMA-related kinase 6
  Uniprot ID: Q9HC98
  ENSP ID: ENSP00000441426

SEQ ID NO: 57011 - protein, 331 aa, Homo sapiens
  Payload ID: 11202
  Gene Symbol: NEK6
  Gene Name: NIMA-related kinase 6
  Uniprot ID: Q9HC98
  ENSP ID: ENSP00000441469
MGRRRPAPFRALVRLACRMAGQPGHMPHGGSSNNLCHTLGPVHPPDPQRHPNTLSFRCSLADFQIEKKIGRGQFSEVYKATCLLDRKTVALKKVQIFEMMDAKARQDCVKEIGLLKQLNHPNIIKYLDSFIEDNELNIVLELADAGDLSQMIKYFKKQKRLIPERTVWKYFVQLCSAVEHMHSRRVMHRDIKPANVFITATGVVKLGDLGLGRFFSSETTAAHSLVGTPYYMSPERIHENGYNFKSDIWSLGCLLYEMAALQSPFYGDKMNLFSLCQKIEQCDYPPLPGEHYSEKLRELVSMCICPDPHQRPDIGYVHQVAKQMHIWMSST

SEQ ID NO: 57012 - protein, 313 aa, Homo sapiens; identical to SEQ ID NO: 56998
  Payload ID: 11202
  Gene Symbol: NEK6
  Gene Name: NIMA-related kinase 6
  Uniprot ID: Q9HC98
  ENSP ID: ENSP00000442636

SEQ ID NO: 57013 - protein, 119 aa, Homo sapiens
  Payload ID: 11203
  Gene Symbol: NEK7
  Gene Name: NIMA-related kinase 7
  Uniprot ID: Q8TDX7
  ENSP ID: ENSP00000356353
MDEQSQGMQGPPVPQFQPQKALRPDMGYNTLANFRIEKKIGRGQFSEVYRAACLLDGVPVALKKVQVCLLPVWERRVCALNACYFLEIIKGSESLQYMATLTNLFENLPVSHHGSFAKK

SEQ ID NO: 57014 - protein, 302 aa, Homo sapiens
  Payload ID: 11203
  Gene Symbol: NEK7
  Gene Name: NIMA-related kinase 7
  Uniprot ID: Q8TDX7
  ENSP ID: ENSP00000356355
MDEQSQGMQGPPVPQFQPQKALRPDMGYNTLANFRIEKKIGRGQFSEVYRAACLLDGVPVALKKVQIFDLMDAKARADCIKEIDLLKQLNHPNVIKYYASFIEDNELNIVLELADAGDLSRMIKHFKKQKRLIPERTVWKYFVQLCSALEHMHSRRVMHRDIKPANVFITATGVVKLGDLGLGRFFSSKTTAAHSLVGTPYYMSPERIHENGYNFKSDIWSLGCLLYEMAALQSPFYGDKMNLYSLCKKIEQCDYPPLPSDHYSEELRQLVNMCINPDPEKRPDVTYVYDVAKRMHACTASS

SEQ ID NO: 57015 - protein, 82 aa, Homo sapiens
  Payload ID: 11203
  Gene Symbol: NEK7
  Gene Name: NIMA-related kinase 7
  ENSP ID: ENSP00000375835
MDEQSQGMQGPPVPQFQPQKALRPDMGYNTLANFRIEKKIGRGQFSEVYRAACLLDGVPVALKKVQIFDLMDAKARADCIKE

SEQ ID NO: 57016 - protein, 32 aa, Homo sapiens
  Payload ID: 11203
  Gene Symbol: NEK7
  Gene Name: NIMA-related kinase 7
  ENSP ID: ENSP00000392745
MDEQSQGMQGPPVPQFQPQKALRPDMGYNTLA

SEQ ID NO: 57017 - protein, 62 aa, Homo sapiens
  Payload ID: 11203
  Gene Symbol: NEK7
  Gene Name: NIMA-related kinase 7
  ENSP ID: ENSP00000439095
MDEQSQGMQGPPVPQFQPQKALRPDMGYNTLANFRIEKKIGRGQFSEVYRAACLLDGVPVAL

SEQ ID NO: 57018 - protein, 302 aa, Homo sapiens; identical to SEQ ID NO: 57014
  Payload ID: 11203
  Gene Symbol: NEK7
  Gene Name: NIMA-related kinase 7
  Uniprot ID: Q8TDX7
  ENSP ID: ENSP00000444621

SEQ ID NO: 57019 - protein, 692 aa, Homo sapiens
  Payload ID: 11204
  Gene Symbol: NEK8
  Gene Name: NIMA-related kinase 8
  Uniprot ID: Q86SG6
  ENSP ID: ENSP00000268766
MEKYERIRVVGRGAFGIVHLCLRKADQKLVIIKQIPVEQMTKEERQAAQNECQVLKLLNHPNVIEYYENFLEDKALMIAMEYAPGGTLAEFIQKRCNSLLEEETILHFFVQILLALHHVHTHLILHRDLKTQNILLDKHRMVVKIGDFGISKILSSKSKAYTVVGTPCYISPELCEGKPYNQKSDIWALGCVLYELASLKRAFEAANLPALVLKIMSGTFAPISDRYSPELRQLVLSLLSLEPAQRPPLSHIMAQPLCIRALLNLHTDVGSVRMRRAEKSVAPSNTGSRTTSVRCRGIPRGPVRPAIPPPLSSVYAWGGGLGTPLRLPMLNTEVVQVAAGRTQKAGVTRSGRLILWEAPPLGAGGGSLLPGAVEQPQPQFISRFLEGQSGVTIKHVACGDFFTACLTDRGIIMTFGSGSNGCLGHGSLTDISQPTIVEALLGYEMVQVACGASHVLALSTERELFAWGRGDSGRLGLGTRESHSCPQQVPMPPGQEAQRVVCGIDSSMILTVPGQALACGSNRFNKLGLDHLSLGEEPVPHQQVEEALSFTLLGSAPLDQEPLLSIDLGTAHSAAVTASGDCYTFGSNQHGQLGTNTRRGSRAPCKVQGLEGIKMAMVACGDAFTVAIGAESEVYSWGKGARGRLGRRDEDAGLPRPVQLDETHPYTVTSVSCCHGNTLLAVRSVTDEPVPP

SEQ ID NO: 57020 - protein, 460 aa, Homo sapiens
  Payload ID: 11204
  Gene Symbol: NEK8
  Gene Name: NIMA-related kinase 8
  ENSP ID: ENSP00000465859
MEKYERIRVVGRGAFGIVHLCLRKADQKLVIIKQIPVEQMTKEERQAAQNECQVLKLLNHPNVIEYYENFLEDKALMIAMEYAPGGTLAEFIQKRCNSLLEEETILHFFVQILLALHHVHTHLILHRDLKTQNILLDKHRMVVKIGDFGISKILSSKSKAYTVVGTPCYISPELCEGKPYNQKSDIWALGCVLYELASLKRAFEAANLPALVLKIMSGTFAPISDRYSPELRQLVLSLLSLEPAQRPPLSHIMAQPLCIRALLNLHTDVGSVRMRRPVQGQRAVLGGRVWAPSGSTGGLRQRETWGKSSLPACRNVRRVFVLRPPSVLQGREVRGPQQHREQDHQCPLQRYPPGTCEASHPTTTVVSVCLGWWAGHPPAAANAQHRGGPGGSWAHAESRRHALWASHPVGGPTPRCRRRQSPSWGSGAATAPVHLAFPGGPVGCDHQARGLWGLLHCLPD

SEQ ID NO: 57021 - protein, 261 aa, Homo sapiens
  Payload ID: 11204
  Gene Symbol: NEK8
  Gene Name: NIMA-related kinase 8
  ENSP ID: ENSP00000466476
  MOD_RES (1)..(1): Any amino acid
XEGKPYNQKSDIWALGCVLYELASLKRAFEAANLPALVLKIMSGTFAPISDRYSPELRQLVLSLLSLEPAQRPPLSHIMAQPLCIRALLNLHTDVGSVRMRRPVQGQRAVLGGRVWAPSGSTGGPHLSCRAEKSVAPSNTGSRTTSVRCRGIPRGPVRPAIPPPLSSVYAWGGGLGTPLRLPMLNTEVVQVAAGRTQKAGVTRSGRLILWEAPPLGAGGGSLLPGAVEQPQPQFISRFLEGQSGVTIKHVACGDFFTACLT

SEQ ID NO: 57022 - protein, 167 aa, Homo sapiens
  Payload ID: 11204
  Gene Symbol: NEK8
  Gene Name: NIMA-related kinase 8
  ENSP ID: ENSP00000466896
MTKEERQAAQNECQVLKLLNHPNVIEYYENFLEDKALMIAMEYAPGGTLAEFIQKRCNSLLEEETILHFFVQILLALHHVHTHLILHRDLKTQNILLDKHRMVVKIGDFGISKILSSKSKAYTVVGTPCYISPELCEGKPYNQKSDIWALGCVLYELASLKRAFEAA

SEQ ID NO: 57023 - protein, 165 aa, Homo sapiens
  Payload ID: 11204
  Gene Symbol: NEK8
  Gene Name: NIMA-related kinase 8
  ENSP ID: ENSP00000467335
MTKEERQAAQNECQVLKLLNHPNVIEYYENFLEDKALMIAMEYAPGGTLAEFIQKRCNSLLEEETILHFFVQILLALHHVHTHLILHRDLKTQNILLDKHRMVVKIGDFGISKILSSKSKAYTVVGTPCYISPELCEGKPYNQKSDIWALGCVLYELASLKRAFE

SEQ ID NO: 57024 - protein, 979 aa, Homo sapiens
  Payload ID: 11205
  Gene Symbol: NEK9
  Gene Name: NIMA-related kinase 9
  Uniprot ID: Q8TD19
  ENSP ID: ENSP00000238616
MSVLGEYERHCDSINSDFGSESGGCGDSSPGPSASQGPRAGGGAAEQEELHYIPIRVLGRGAFGEATLYRRTEDDSLVVWKEVDLTRLSEKERRDALNEIVILALLQHDNIIAYYNHFMDNTTLLIELEYCNGGNLYDKILRQKDKLFEEEMVVWYLFQIVSAVSCIHKAGILHRDIKTLNIFLTKANLIKLGDYGLAKKLNSEYSMAETLVGTPYYMSPELCQGVKYNFKSDIWAVGCVIFELLTLKRTFDATNPLNLCVKIVQGIRAMEVDSSQYSLELIQMVHSCLDQDPEQRPTADELLDRPLLRKRRREMEEKVTLLNAPTKRPRSSTVTEAPIAVVTSRTSEVYVWGGGKSTPQKLDVIKSGCSARQVCAGNTHFAVVTVEKELYTWVNMQGGTKLHGQLGHGDKASYRQPKHVEKLQGKAIRQVSCGDDFTVCVTDEGQLYAFGSDYYGCMGVDKVAGPEVLEPMQLNFFLSNPVEQVSCGDNHVVVLTRNKEVYSWGCGEYGRLGLDSEEDYYTPQKVDVPKALIIVAVQCGCDGTFLLTQSGKVLACGLNEFNKLGLNQCMSGIINHEAYHEVPYTTSFTLAKQLSFYKIRTIAPGKTHTAAIDERGRLLTFGCNKCGQLGVGNYKKRLGINLLGGPLGGKQVIRVSCGDEFTIAATDDNHIFAWGNGGNGRLAMTPTERPHGSDICTSWPRPIFGSLHHVPDLSCRGWHTILIVEKVLNSKTIRSNSSGLSIGTVFQSSSPGGGGGGGGGEEEDSQQESETPDPSGGFRGTMEADRGMEGLISPTEAMGNSNGASSSCPGWLRKELENAEFIPMPDSPSPLSAAFSESEKDTLPYEELQGLKVASEAPLEHKPQVEASSPRLNPAVTCAGKGTPLTPPACACSSLQVEVERLQGLVLKCLAEQQKLQQENLQIFTQLQKLNKKLEGGQQVGMHSKGTQTAKEEMEMDPKPDLDSDSWCLLGTDSCRPSL

SEQ ID NO: 57025 - protein, 128 aa, Homo sapiens
  Payload ID: 11205
  Gene Symbol: NEK9
  Gene Name: NIMA-related kinase 9
  ENSP ID: ENSP00000450943
MDNTTLLIELEYCNGGNLYDKILRQKDKLFEEEMVVWYLFQIVSAVSCIHKAGILHRDIKTLNIFLTKANLIKLGDYGLAKKLNSEYSMAETLVGTPYYMSPELCQGVKYNFKSDIWAVGCVIFELLT

SEQ ID NO: 57026 - protein, 104 aa, Homo sapiens
  Payload ID: 11205
  Gene Symbol: NEK9
  Gene Name: NIMA-related kinase 9
  ENSP ID: ENSP00000451604
MSVLGEYERHCDSINSDFGSESGGCGDSSPGPSASQGPRAGGGAAEQEELHYIPIRVLGRGAFGEATLYRRTEEGTCMTKSFVRRTSCLRKRWWCGTYFRLFQQ

SEQ ID NO: 57027 - protein, 73 aa, Homo sapiens
  Payload ID: 11205
  Gene Symbol: NEK9
  Gene Name: NIMA-related kinase 9
  ENSP ID: ENSP00000452537
MDNTTLLIELEYCNGGNLYDKILRQKDKLFEEEMVVWYLFQIVSAVSCIHKAGILHRDIKTLNIFLTKANLIK

SEQ ID NO: 57028 - protein, 38 aa, Homo sapiens
  Payload ID: 11205
  Gene Symbol: NEK9
  Gene Name: NIMA-related kinase 9
  ENSP ID: ENSP00000452544
MDNTTLLIELEYCNGGNLYDKILRQKDKLFEEETPSRL

SEQ ID NO: 57029 - protein, 412 aa, Homo sapiens [sequence omitted]

SEQ ID NO: 57030 - protein, 66 aa, Homo sapiens
  Payload ID: 11206
  Gene Symbol: NOB1
  Gene Name: NIN1/RPN12 binding protein 1 homolog
  ENSP ID: ENSP00000456710
MAPVEHVVADAGAFLRHAALQDIGKNIYTIREVVTEIRDKATRRRLAVLPYELRFKEPLPEYVRLG

SEQ ID NO: 57031 - protein, 66 aa, Homo sapiens; identical to SEQ ID NO: 57030
  Payload ID: 11206
  Gene Symbol: NOB1
  Gene Name: NIN1/RPN12 binding protein 1 homolog
  ENSP ID: ENSP00000457760

SEQ ID NO: 57032 - protein, 2133 aa, Homo sapiens
  Payload ID: 11207
  Gene Symbol: NIN
  Gene Name: ninein (GSK3B interacting protein)
  Uniprot ID: Q8N4C6
  ENSP ID: ENSP00000245441
MDEVEQDQHEARLKELFDSFDTTGTGSLGQEELTDLCHMLSLEEVAPVLQQTLLQDNLLGRVHFDQFKEALILILSRTLSNEEHFQEPDCSLEAQPKYVRGGKRYGRRSLPEFQESVEEFPEVTVIEPLDEEARPSHIPAGDCSEHWKTQRSEEYEAEGQLRFWNPDDLNASQSGSSPPQDWIEEKLQEVCEDLGITRDGHLNRKKLVSICEQYGLQNVDGEMLEEVFHNLDPDGTMSVEDFFYGLFKNGKSLTPSASTPYRQLKRHLSMQSFDESGRRTTTSSAMTSTIGFRVFSCLDDGMGHASVERILDTWQEEGIENSQEILKALDFSLDGNINLTELTLALENELLVTKNSIHQAALASFKAEIRHLLERVDQVVREKEKLRSDLDKAEKLKSLMASEVDDHHAAIERRNEYNLRKLDEEYKERIAALKNELRKEREQILQQAGKQRLELEQEIEKAKTEENYIRDRLALSLKENSRLENELLENAEKLAEYENLTNKLQRNLENVLAEKFGDLDPSSAEFFLQEERLTQMRNEYERQCRVLQDQVDELQSELEEYRAQGRVLRLPLKNSPSEEVEANSGGIEPEHGLGSEECNPLNMSIEAELVIEQMKEQHHRDICCLRLELEDKVRHYEKQLDETVVSCKKAQENMKQRHENETHTLEKQISDLKNEIAELQGQAAVLKEAHHEATCRHEEEKKQLQVKLEEEKTHLQEKLRLQHEMELKARLTQAQASFEREREGLQSSAWTEEKVRGLTQELEQFHQEQLTSLVEKHTLEKEELRKELLEKHQRELQEGREKMETECNRRTSQIEAQFQSDCQKVTERCESALQSLEGRYRQELKDLQEQQREEKSQWEFEKDELTQECAEAQELLKETLKREKTTSLVLTQEREMLEKTYKEHLNSMVVERQQLLQDLEDLRNVSETQQSLLSDQILELKSSHKRELREREEVLCQAGASEQLASQRLERLEMEHDQERQEMMSKLLAMENIHKATCETADRERAEMSTEISRLQSKIKEMQQATSPLSMLQSGCQVIGEEEVEGDGALSLLQQGEQLLEENGDVLLSLQRAHEQAVKENVKMATEISRLQQRLQKLEPGLVMSSCLDEPATEFFGNTAEQTEQFLQQNRTKQVEGVTRRHVLSDLEDDEVRDLGSTGTSSVQRQEVKIEESEASVEGFSELENSEETRTESWELKNQISQLQEQLMMLCADCDRASEKKQDLLFDVSVLKKKLKMLERIPEASPKYKLLYEDVSRENDCLQEELRMMETRYDEALENNKELTAEVFRLQDELKKMEEVTETFLSLEKSYDEVKIENEGLNVLVLRLQGKIEKLQESVVQRCDCCLWEASLENLEIEPDGNILQLNQTLEECVPRVRSVHHVIEECKQENQYLEGNTQLLEKVKAHEIAWLHGTIQTHQERPRVQNQVILEENTTLLGFQDKHFQHQATIAELELEKTKLQELTRKLKERVTILVKQKDVLSHGEKEEELKAMMHDLQITCSEMQQKVELLRYESEKLQQENSILRNEITTLNEEDSISNLKLGTLNGSQEEMWQKTETVKQENAAVQKMVENLKKQISELKIKNQQLDLENTELSQKNSQNQEKLQELNQRLTEMLCQKEKEPGNSALEEREQEKFNLKEELERCKVQSSTLVSSLEAELSEVKIQTHIVQQENHLLKDELEKMKQLHRCPDLSDFQQKISSVLSYNEKLLKEKEALSEELNSCVDKLAKSSLLEHRIATMKQEQKSWEHQSASLKSQLVASQEKVQNLEDTVQNVNLQMSRMKSDLRVTQQEKEALKQEVMSLHKQLQNAGGKSWAPEIATHPSGLHNQQKRLSWDKLDHLMNEEQQLLWQENERLQTMVQNTKAELTHSREKVRQLESNLLPKHQKHLNPSGTMNPTEQEKLSLKRECDQFQKEQSPANRKVSQMNSLEQELETIHLENEGLKKKQVKLDEQLMEMQHLRSTATPSPSPHAWDLQLLQQQACPMVPREQFLQLQRQLLQAERINQHLQEELENRTSETNTPQGNQEQLVTVMEERMIEVEQKLKLVKRLLQEKVNQLKEQLCKNTKADAMVKDLYVENAQLLKALEVTEQRQKTAEKKNYLLEEKIASLSNIVRNLTPAPLTSTPPLRS

SEQ ID NO: 57033 - protein, 1377 aa, Homo sapiens
  Payload ID: 11207
  Gene Symbol: NIN
  Gene Name: ninein (GSK3B interacting protein)
  Uniprot ID: Q8N4C6
  ENSP ID: ENSP00000324210
MDEVEQDQHEARLKELFDSFDTTGTGSLGQEELTDLCHMLSLEEVAPVLQQTLLQDNLLGRVHFDQFKEALILILSRTLSNEEHFQEPDCSLEAQPKYVRGGKRYGRRSLPEFQESVEEFPEVTVIEPLDEEARPSHIPAGDCSEHWKTQRSEEYEAEGQLRFWNPDDLNASQSGSSPPQDWIEEKLQEVCEDLGITRDGHLNRKKLVSICEQYGLQNVDGEMLEEVFHNLDPDGTMSVEDFFYGLFKNGKSLTPSASTPYRQLKRHLSMQSFDESGRRTTTSSAMTSTIGFRVFSCLDDGMGHASVERILDTWQEEGIENSQEILKALDFSLDGNINLTELTLALENELLVTKNSIHQAALASFKAEIRHLLERVDQVVREKEKLRSDLDKAEKLKSLMASEVDDHHAAIERRNEYNLRKLDEEYKERIAALKNELRKEREQILQQAGKQRLELEQEIEKAKTEENYIRDRLALSLKENSRLENELLENAEKLAEYENLTNKLQRNLENVLAEKFGDLDPSSAEFFLQEERLTQMRNEYERQCRVLQDQVDELQSELEEYRAQGRVLRLPLKNSPSEEVEANSGGIEPEHGLGSEECNPLNMSIEAELVIEQMKEQHHRDICCLRLELEDKVRHYEKQLDETVVSCKKAQENMKQRHENETHTLEKQISDLKNEIAELQGQAAVLKEAHHEATCRHEEEKKQLQVKLEEEKTHLQEKLRLQHEMELKARLTQAQASFEREREGLQSSAWTEEKVRGLTQELEQFHQEQLTSLVEKHTLEKEELRKELLEKHQRELQEGRYESEKLQQENSILRNEITTLNEEDSISNLKLGTLNGSQEEMWQKTETVKQENAAVQKMVENLKKQISELKIKNQQLDLENTELSQKNSQNQEKLQELNQRLTEMLCQKEKEPGNSALEEREQEKFNLKEELERCKVQSSTLVSSLEAELSEVKIQTHIVQQENHLLKDELEKMKQLHRCPDLSDFQQKISSVLSYNEKLLKEKEALSEELNSCVDKLAKSSLLEHRIATMKQEQKSWEHQSASLKSQLVASQEKVQNLEDTVQNVNLQMSRMKSDLRVTQQEKEALKQEVMSLHKQLQNAGGKSWAPEIATHPSGLHNQQKRLSWDKLDHLMNEEQQLLWQENERLQTMVQNTKAELTHSREKVRQLESNLLPKHQKHLNPSGTMNPTEQEKLSLKRECDQFQKEQSPANRKVSQMNSLEQELETIHLENEGLKKKQVKLDEQLMEMQHLRSTATPSPSPHAWDLQLLQQQACPMVPREQFLQLQRQLLQAERINQHLQEELENRTSETNTPQGNQEQLVTVMEERMIEVEQKLKLVKRLLQEKVNQLKEQVSLPGHLCSPTSHSSFNSSFTSLYCH

SEQ ID NO: 57034 - protein, 2090 aa, Homo sapiens
  Payload ID: 11207
  Gene Symbol: NIN
  Gene Name: ninein (GSK3B interacting protein)
  Uniprot ID: Q8N4C6
  ENSP ID: ENSP00000371472
MDEVEQDQHEARLKELFDSFDTTGTGSLGQEELTDLCHMLSLEEVAPVLQQTLLQDNLLGRVHFDQFKEALILILSRTLSNEEHFQEPDCSLEAQPKYVRGGKRYGRRSLPEFQESVEEFPEVTVIEPLDEEARPSHIPAGDCSEHWKTQRSEEYEAEGQLRFWNPDDLNASQSGSSPPQDWIEEKLQEVCEDLGITRDGHLNRKKLVSICEQYGLQNVDGEMLEEVFHNLDPDGTMSVEDFFYGLFKNGKSLTPSASTPYRQLKRHLSMQSFDESGRRTTTSSAMTSTIGFRVFSCLDDGMGHASVERILDTWQEEGIENSQEILKALDFSLDGNINLTELTLALENELLVTKNSIHQAALASFKAEIRHLLERVDQVVREKEKLRSDLDKAEKLKSLMASEVDDHHAAIERRNEYNLRKLDEEYKERIAALKNELRKEREQILQQAGKQRLELEQEIEKAKTEENYIRDRLALSLKENSRLENELLENAEKLAEYENLTNKLQRNLENVLAEKFGDLDPSSAEFFLQEERLTQMRNEYERQCRVLQDQVDELQSELEEYRAQGRVLRLPLKNSPSEEVEANSGGIEPEHGLGSEECNPLNMSIEAELVIEQMKEQHHRDICCLRLELEDKVRHYEKQLDETVVSCKKAQENMKQRHENETHTLEKQISDLKNEIAELQGQAAVLKEAHHEATCRHEEEKKQLQVKLEEEKTHLQEKLRLQHEMELKARLTQAQASFEREREGLQSSAWTEEKVRGLTQELEQFHQEQLTSLVEKHTLEKEELRKELLEKHQRELQEGREKMETECNRRTSQIEAQFQSDCQKVTERCESALQSLEGRYRQELKDLQEQQREEKSQWEFEKDELTQECAEAQELLKETLKREKTTSLVLTQEREMLEKTYKEHLNSMVVERQQLLQDLEDLRNVSETQQSLLSDQILELKSSHKRELREREEVLCQAGASEQLASQRLERLEMEHDQERQEMMSKLLAMENIHKATCETADRERAEMSTEISRLQSKIKEMQQATSPLSMLQSGCQVIGEEEVEGDGALSLLQQGEQLLEENGDVLLSLQRAHEQAVKENVKMATEISRLQQRLQKLEPGLVMSSCLDEPATEFFGNTAEQTEQFLQQNRTKQVEGVTRRHVLSDLEDDEVRDLGSTGTSSVQRQEVKIEESEASVEGFSELENSEETRTESWELKNQISQLQEQLMMLCADCDRASEKKQDLLFDVSVLKKKLKMLERIPEASPKYKLLYEDVSRENDCLQEELRMMETRYDEALENNKELTAEVFRLQDELKKMEEVTETFLSLEKSYDEVKIENEGLNVLVLRLQGKIEKLQESVVQRCDCCLWEASLENLEIEPDGNILQLNQTLEECVPRVRSVHHVIEECKQENQYLEGNTQLLEKVKAHEIAWLHGTIQTHQERPRVQNQVILEENTTLLGFQDKHFQHQATIAELELEKTKLQELTRKLKERVTILVKQKDVLSHGEKEEELKAMMHDLQITCSEMQQKVELLRYESEKLQQENSILRNEITTLNEEDSISNLKLGTLNGSQEEMWQKTETVKQENAAVQKMVENLKKQISELKIKNQQLDLENTELSQKNSQNQEKLQELNQRLTEMLCQKEKEPGNSALEEREQEKFNLKEELERCKVQSSTLVSSLEAELSEVKIQTHIVQQENHLLKDELEKMKQLHRCPDLSDFQQKISSVLSYNEKLLKEKEALSEELNSCVDKLAKSSLLEHRIATMKQEQKSWEHQSASLKSQLVASQEKVQNLEDTVQNVNLQMSRMKSDLRVTQQEKEALKQEVMSLHKQLQNAGGKSWAPEIATHPSGLHNQQKRLSWDKLDHLMNEEQQLLWQENERLQTMVQNTKAELTHSREKVRQLESNLLPKHQKHLNPSGTMNPTEQEKLSLKRECDQFQKEQSPANRKVSQMNSLEQELETIHLENEGLKKKQVKLDEQLMEMQHLRSTATPSPSPHAWDLQLLQQQACPMVPREQFLQLQRQLLQAERINQHLQEELENRTSETNTPQGNQEQLVTVMEERMIEVEQKLKLVKRLLQEKVNQLKEQVSLPGHLCSPTSHSSFNSSFTSLYCH

SEQ ID NO: 57035 - protein, 1377 aa, Homo sapiens; identical to SEQ ID NO: 57033
  Payload ID: 11207
  Gene Symbol: NIN
  Gene Name: ninein (GSK3B interacting protein)
  Uniprot ID: Q8N4C6
  ENSP ID: ENSP00000371474

SEQ ID NO: 57036 - protein, 1581 aa, Homo sapiens
  Payload ID: 11207
  Gene Symbol: NIN
  Gene Name: ninein (GSK3B interacting protein)
  ENSP ID: ENSP00000374519
  MOD_RES (1)..(1): Any amino acid
XVLAEKFGDLDPSSAEFFLQEERLTQMRNEYERQCRVLQDQVDELQSELEEYRAQGRVLRLPLKNSPSEEVEANSGGIEPEHGLGSEECNPLNMSIEAELVIEQMKEQHHRDICCLRLELEDKVRHYEKQLDETVVSCKKAQENMKQRHENETHTLEKQISDLKNEIAELQGQAAVLKEAHHEATCRHEEEKKQLQVKLEEEKTHLQEKLRLQHEMELKARLTQAQASFEREREGLQSSAWTEEKVRGLTQELEQFHQEQLTSLVEKHTLEKEELRKELLEKHQRELQEGREKMETECNRRTSQIEAQFQSDCQKVTERCESALQSLEGRYRQELKDLQEQQREEKSQWEFEKDELTQECAEAQELLKETLKREKTTSLVLTQEREMLEKTYKEHLNSMVVERQQLLQDLEDLRNVSETQQSLLSDQILELKSSHKRELREREEVLCQAGASEQLASQRLERLEMEHDQERQEMMSKLLAMENIHKATCETADRERAEMSTEISRLQSKIKEMQQATSPLSMLQSGCQVIGEEEVEGDGALSLLQQGEQLLEENGDVLLSLQRAHEQAVKENVKMATEISRLQQRLQKLEPGLVMSSCLDEPATEFFGNTAEQTEQFLQQNRTKQVEGVTRRHVLSDLEDDEVRDLGSTGTSSVQRQEVKIEESEASVEGFSELENSEETRTESWELKNQISQLQEQLMMLCADCDRASEKKQDLLFDVSVLKKKLKMLERIPEASPKYKLLYEDVSRENDCLQEELRMMETRYDEALENNKELTAEVFRLQDELKKMEEVTETFLSLEKSYDEVKIENEGLNVLVLRLQGKIEKLQESVVQRCDCCLWEASLENLEIEPDGNILQLNQTLEECVPRVRSVHHVIEECKQENQYLEGNTQLLEKVKAHEIAWLHGTIQTHQERPRVQNQVILEENTTLLGFQDKHFQHQATIAELELEKTKLQELTRKLKERVTILVKQKDVLSHGEKEEELKAMMHDLQITCSEMQQKVELLRYESEKLQQENSILRNEITTLNEEDSISNLKLGTLNGSQEEMWQKTETVKQENAAVQKMVENLKKQISELKIKNQQLDLENTELSQKNSQNQEKLQELNQRLTEMLCQKEKEPGNSALEEREQEKFNLKEELERCKVQSSTLVSSLEAELSEVKIQTHIVQQENHLLKDELEKMKQLHRCPDLSDFQQKISSVLSYNEKLLKEKEALSEELNSCVDKLAKSSLLEHRIATMKQEQKSWEHQSASLKSQLVASQEKVQNLEDTVQNVNLQMSRMKSDLRVTQQEKEALKQEVMSLHKQLQNAGGKSWAPEIATHPSGLHNQQKRLSWDKLDHLMNEEQQLLWQENERLQTMVQNTKAELTHSREKVRQLESNLLPKHQKHLNPSGTMNPTEQEKLSLKRECDQFQKEQSPANRKVSQMNSLEQELETIHLENEGLKKKQVKLDEQLMEMQHLRSTATPSPSPHAWDLQLLQQQACPMVPREQFLQLQRQLLQAERINQHLQEELENRTSETNTPQGNQEQLVTVMEERMIEVEQKLKLVKRLLQEKVNQLKEQVSLPGHLCSPTSHSSFNSSFTSLYCH

SEQ ID NO: 57037 - protein, 396 aa, Homo sapiens
  Payload ID: 11207
  Gene Symbol: NIN
  Gene Name: ninein (GSK3B interacting protein)
  ENSP ID: ENSP00000398641
MLSLEEVAPVLQQTLLQDNLLGRVHFDQFKEALILILSRTLSNEEHFQEPDCSLEAQPKYVRGGKRYGRRSLPEFQESVEEFPEVTVIEPLDEEARPSHIPAGDCSEHWKTQRSEEYEAEGQLRFWNPDDLNASQSGSSPPQDWIEEKLQEVCEDLGITRDGHLNRKKLVSICEQYGLQNVDGEMLEEVFHNLDPDGTMSVEDFFYGLFKNGKSLTPSASTPYRQLKRHLSMQSFDESGRRTTTSSAMTSTIGFRVFSCLDDGMGHASVERILDTWQEEGIENSQEILKALDFSLDGNINLTELTLALENELLVTKNSIHQAALASFKAEIRHLLERVDQVVREKEKLRSDLDKAEKLKSLMASEVDDHHAAIERRNEYNLRKLDEEYKERIAALK

SEQ ID NO: 57038 - protein, 2046 aa, Homo sapiens
  Payload ID: 11207
  Gene Symbol: NIN
  Gene Name: ninein (GSK3B interacting protein)
  ENSP ID: ENSP00000412391
MDEVEQDQHEARLKELFDSFDTTGTGSLGQEELTDLCHMLSLEEVAPVLQQTLLQDNLLGRVHFDQFKEALILILSRTLSNEEHFQEPDCSLEAQPKYVRGGKRYGRRSLPEFQESVEEFPEVTVIEPLDEEARPSHIPAGDCSEHWKTQRSEEYEAEGQLRFWNPDDLNASQSGSSPPQDWIEEKLQEVCEDLGITRDGHLNRKKLVSICEQYGLQNVDGEMLEEVFHNLDPDGTMSVEDFFYGLFKNGKSLTPSASTPYRQLKRHLSMQSFDESGRRTTTSSAMTSTIGFRVFSCLDDGMGHASVERILDTWQEEGIENSQEILKALDFSLDGNINLTELTLALENELLVTKNSIHQAALASFKAEIRHLLERVDQVVREKEKLRSDLDKAEKLKSLMASEVDDHHAAIERRNEYNLRKLDEEYKERIAALKNELRKEREQILQQAGKQRLELEQEIEKAKTEENYIRDRLALSLKENSRLENELLENAEKLAEYENLTNKLQRNLENVLAEKFGDLDPSSAEFFLQEERLTQMRNEYERQCRVLQDQVDELQSELEEYRAQGRVLRLPLKNSPSEEVEANSGGIEPEHGLGSEECNPLNMSIEAELVIEQMKEQHHRDICCLRLELEDKVRHYEKQLDETVVSCKKAQENMKQRHENETHTLEKQISDLKNEIAELQGQAAVLKEAHHEATCRHEEEKKQLQVKLEEEKTHLQEKLRLQHEMELKARLTQAQASFEREREGLQSSAWTEEKVRGLTQELEQFHQEQLTSLVEKHTLEKEELRKELLEKHQRELQEGREKMETECNRRTSQIEAQFQSDCQKVTERCESALQSLEGRYRQELKDLQEQQREEKSQWEFEKDELTQECAEAQELLKETLKREKTTSLVLTQEREMLEKTYKEHLNSMVVERQQLLQDLEDLRNVSETQQSLLSDQILELKSSHKRELREREEVLCQAGASEQLASQRLERLEMEHDQERQEMMSKLLAMENIHKATCETADRERAEMSTEISRLQSKIKEMQQATSPLSMLQSGCQVIGEEEVEGDGALSLLQQGEQLLEENGDVLLSLQRAHEQAVKENVKMATEISRLQQRLQKLEPGLVMSSCLDEPATEFFGNTAEQTEQFLQQNRTKQVEGVTRRHVLSDLEDDEVRDLGSTGTSSVQRQEVKIEESEASVEGFSELENSEETRTESWELKNQISQLQEQLMMLCADCDRASEKKQDLLFDVSVLKKKLKMLERIPEASPKYKLLYEDVSRENDCLQEELRMMETRYDEALENNKELTAEVFRLQDELKKMEEVTETFLSLEKSYDEVKIENEGLNVLVLRLQGKIEKLQESVVQRCDCCLWEASLENLEIEPDGNILQLNQTLEECVPRVRSVHHVIEECKQENQYLEGNTQLLEKVKAHEIAWLHGTIQTHQERPRVQNQVILEENTTLLGFQDKHFQHQATIAELELEKTKLQELTRKLKERVTILVKQKDVLSHGEKEEELKAMMHDLQITCSEMQQKVELLRYESEKLQQENSILRNEITTLNEEDSISNLKLGTLNGSQEEMWQKTETVKQENAAVQKMVENLKKQISELKIKNQQLDLENTELSQKNSQNQEKLQELNQRLTEMLCQKEKEPGNSALEEREQEKFNLKEELERCKVQSSTLVSSLEAELSEVKIQTHIVQQENHLLKDELEKMKQLHRCPDLSDFQQKISSVLSYNEKLLKEKEALSEELNSCVDKLAKSSLLEHRIATMKQEQKSWEHQSASLKSQLVASQEKVQNLEDTVQNVNLQMSRMKSDLRVTQQEKEALKQEVMSLHKQLQNAGGKSWAPEIATHPSGLHNQQKRLSWDKLDHLMNEEQQLLWQENERLQTMVQNTKAELTHSREKVRQLESNLLPKHQKHLNPSGTMNPTEQEKLSLKRECDQFQKEQSPANRKVSQMNSLEQELETIHLENEGLKKKQVKLDEQLMEMQHLRSTATPSPSPHAWDLQLLQQQACPMVPREQFLQLQRQLLQAERINQHLQEELENRTSETNTPQALLPEQRAVHADSYRRIGHL

SEQ ID NO: 57039 - protein, 140 aa, Homo sapiens
  Payload ID: 11207
  Gene Symbol: NIN
  Gene Name: ninein (GSK3B interacting protein)
  ENSP ID: ENSP00000431485
QLLWQENERLQTMVQNTKAELTHSREKVRQLESNLLPKHQKHLNPSGTMNPTEQEKLSLKRECDQFQKEQSPANRKVSQMNSLEQELETIHLENEGLKKKQVKLDEQLMENSVVGSSREGCSSLPEIVCEDAAPEVHCDA

SEQ ID NO: 57040 - protein, 101 aa, Homo sapiens
  Payload ID: 11207
  Gene Symbol: NIN
  Gene Name: ninein (GSK3B interacting protein)
  ENSP ID: ENSP00000431826
MDEVEQDQHEARLKELFDSFDTTGTGSLGQEELTDLCHMLSLEEVAPVLQQTLLQDNLLGRVHFDQFKEALILILSRTLSNEEHFQEPDCSLEAQPKYVRG

SEQ ID NO: 57041 - protein, 1989 aa, Homo sapiens
  Payload ID: 11207
  Gene Symbol: NIN
  Gene Name: ninein (GSK3B interacting protein)
  ENSP ID: ENSP00000432924
MDEVEQDQHEARLKELFDSFDTTGTGSLGQEELTDLCHMLSLEEVAPVLQQTLLQDNLLGRVHFDQFKEALILILSRTLSNEEHFQEPDCSLEAQPKYVRGGKRYGRRSLPEFQESVEEFPEVTVIEPLDEEARPSHIPAGDCSEHWKTQRSEEYEAEGQLRFWNPDDLNASQSGSSPPQDWIEEKLQEVCEDLGITRDGHLNRKKLVSICEQYGLQNVDGEMLEEVFHNLDPDGTMSVEDFFYGLFKNGKSLTPSASTPYRQLKRHLSMQSFDESGRRTTTSSAMTSTIGFRVFSCLDDGMGHASVERILDTWQEEGIENSQEILKALDFSLDGNINLTELTLALENELLVTKNSIHQAALASFKAEIRHLLERVDQVVREKEKLRSDLDKAEKLKSLMASEVDDHHAAIERRNEYNLRKLDEEYKERIAALKNELRKEREQILQQAGKQRLELEQEIEKAKTEENYIRDRLALSLKENSRLENELLENAEKLAEYENLTNKLQRNLENVLAEKFGDLDPSSAEFFLQEERLTQMRNEYERQCRVLQDQVDELQSELEEYRAQGRVLRLPLKNSPSEEVEANSGGIEPEHGLGSEECNPLNMSIEAELVIEQMKEQHHRDICCLRLELEDKVRHYEKQLDETVVSCKKAQENMKQRHENETHTLEKQISDLKNEIAELQGQAAVLKEAHHEATCRHEEEKKQLQVKLEEEKTHLQEKLRLQHEMELKARLTQAQASFEREREGLQSSAWTEEKVRGLTQELEQFHQEQLTSLVEKHTLEKEELRKELLEKHQRELQEGREKMETECNRRTSQIEAQFQSDCQKVTERCESALQSLEGRYRQELKDLQEQQREEKSQWEFEKDELTQECAEAQELLKETLKREKTTSLVLTQEREMLEKTYKEHLNSMVVERQQLLQDLEDLRNVSETQQSLLSDQILELKSSHKRELREREEVLCQAGASEQLASQRLERLEMEHDQERQEMMSKLLAMENIHKATCETADRERAEMSTEISRLQSKIKEMQQATSPLSMLQSGCQVIGEEEVEGDGALSLLQQGEQLLEENGDVLLSLQRAHEQAVKENVKMATEISRLQQRLQKLEPGLVMSSCLDEPATEFFGNTAEQTEQFLQQNRTKQVEGVTRRHVLSDLEDDEVRDLGSTGTSSVQRQEVKIEESEASVEGFSELENSEETRTESWELKNQISQLQEQLMMLCADCDRASEKKQDLLFDVSVLKKKLKMLERIPEASPKYKLLYEDVSRENDCLQEELRMMETRYDEALENNKELTAEVFRLQDELKKMEEVTETFLSLEKSYDEVKIENEGLNVLVLRLQGKIEKLQESVVQRCDCCLWEASLENLEIEPDGNILQLNQTLEECVPRVRSVHHVIEECKQENQYLEGNTQLLEKVKAHEIAWLHGTIQTHQERPRVQNQVILEENTTLLGFQDKHFQHQATIAELELEKTKLQELTRKLKERVTILVKQKDVLSHGEKEEELKAMMHDLQITCSEMQQKVELLRYESEKLQQENSILRNEITTLNEEDSISNLKLGTLNGSQEEMWQKTETVKQENAAVQKMVENLKKQISELKIKNQQLDLENTELSQKNSQNQEKLQELNQRLTEMLCQKEKEPGNSALEEREQEKFNLKEELERCKVQSSTLVSSLEAELSEVKIQTHIVQQENHLLKDELEKMKQLHRCPDLSDFQQKISSVLSYNEKLLKEKEALSEELNSCVDKLAKSSLLEHRIATMKQEQKSWEHQSASLKSQLVASQEKVQNLEDTVQNVNLQMSRMKSDLRVTQQEKEALKQEVMSLHKQLQNAGGKSWAPEIATHPSGLHNQQKRLSWDKLDHLMNEEQQLLWQENERLQTMVQNTKAELTHSREKVRQLESNLLPKHQKHLNPSGTMNPTEQEKLSLKRECDQFQKEQSPANRKVSQMNSLEQELETIHLENEGLKKKQVKLDEQLMENSVVGSSREGCSSLPEIVCEDAAPEVHCDA

SEQ ID NO: 57042 - protein, 1537 aa, Homo sapiens
  Payload ID: 11207
  Gene Symbol: NIN
  Gene Name: ninein (GSK3B interacting protein)
  ENSP ID: ENSP00000433717
  MOD_RES (1)..(1): Any amino acid
XVLAEKFGDLDPSSAEFFLQEERLTQMRNEYERQCRVLQDQVDELQSELEEYRAQGRVLRLPLKNSPSEEVEANSGGIEPEHGLGSEECNPLNMSIEAELVIEQMKEQHHRDICCLRLELEDKVRHYEKQLDETVVSCKKAQENMKQRHENETHTLEKQISDLKNEIAELQGQAAVLKEAHHEATCRHEEEKKQLQVKLEEEKTHLQEKLRLQHEMELKARLTQAQASFEREREGLQSSAWTEEKVRGLTQELEQFHQEQLTSLVEKHTLEKEELRKELLEKHQRELQEGREKMETECNRRTSQIEAQFQSDCQKVTERCESALQSLEGRYRQELKDLQEQQREEKSQWEFEKDELTQECAEAQELLKETLKREKTTSLVLTQEREMLEKTYKEHLNSMVVERQQLLQDLEDLRNVSETQQSLLSDQILELKSSHKRELREREEVLCQAGASEQLASQRLERLEMEHDQERQEMMSKLLAMENIHKATCETADRERAEMSTEISRLQSKIKEMQQATSPLSMLQSGCQVIGEEEVEGDGALSLLQQGEQLLEENGDVLLSLQRAHEQAVKENVKMATEISRLQQRLQKLEPGLVMSSCLDEPATEFFGNTAEQTEQFLQQNRTKQVEGVTRRHVLSDLEDDEVRDLGSTGTSSVQRQEVKIEESEASVEGFSELENSEETRTESWELKNQISQLQEQLMMLCADCDRASEKKQDLLFDVSVLKKKLKMLERIPEASPKYKLLYEDVSRENDCLQEELRMMETRYDEALENNKELTAEVFRLQDELKKMEEVTETFLSLEKSYDEVKIENEGLNVLVLRLQGKIEKLQESVVQRCDCCLWEASLENLEIEPDGNILQLNQTLEECVPRVRSVHHVIEECKQENQYLEGNTQLLEKVKAHEIAWLHGTIQTHQERPRVQNQVILEENTTLLGFQDKHFQHQATIAELELEKTKLQELTRKLKERVTILVKQKDVLSHGEKEEELKAMMHDLQITCSEMQQKVELLRYESEKLQQENSILRNEITTLNEEDSISNLKLGTLNGSQEEMWQKTETVKQENAAVQKMVENLKKQISELKIKNQQLDLENTELSQKNSQNQEKLQELNQRLTEMLCQKEKEPGNSALEEREQEKFNLKEELERCKVQSSTLVSSLEAELSEVKIQTHIVQQENHLLKDELEKMKQLHRCPDLSDFQQKISSVLSYNEKLLKEKEALSEELNSCVDKLAKSSLLEHRIATMKQEQKSWEHQSASLKSQLVASQEKVQNLEDTVQNVNLQMSRMKSDLRVTQQEKEALKQEVMSLHKQLQNAGGKSWAPEIATHPSGLHNQQKRLSWDKLDHLMNEEQQLLWQENERLQTMVQNTKAELTHSREKVRQLESNLLPKHQKHLNPSGTMNPTEQEKLSLKRECDQFQKEQSPANRKVSQMNSLEQELETIHLENEGLKKKQVKLDEQLMEMQHLRSTATPSPSPHAWDLQLLQQQACPMVPREQFLQLQRQLLQAERINQHLQEELENRTSETNTPQALLPEQRAVHADSYRRIGHL

SEQ ID NO: 57043 - protein, 2133 aa, Homo sapiens; identical to SEQ ID NO: 57032
  Payload ID: 11207
  Gene Symbol: NIN
  Gene Name: ninein (GSK3B interacting protein)
  Uniprot ID: Q8N4C6
  ENSP ID: ENSP00000436092

SEQ ID NO: 57044 - protein, 116 aa, Homo sapiens
  Payload ID: 11207
  Gene Symbol: NIN
  Gene Name: ninein (GSK3B interacting protein)
  ENSP ID: ENSP00000473530
  MOD_RES (1)..(1): Any amino acid
XDLCHMLSLEEVAPVLQQTLLQDNLLGRVHFDQFKEALILILSRTLSNEEHFQEPDCSLEAQPKYVRGGKRYGRRSLPEFQESVEEFPEVTVIEPLDEEARPSHIPAGDCSELLES

SEQ ID NO: 57045 - protein, 1382 aa, Homo sapiens
  Payload ID: 11208
  Gene Symbol: NINL
  Gene Name: ninein-like
  Uniprot ID: Q9Y2I6
  ENSP ID: ENSP00000278886
MDEEENHYVSQLREVYSSCDTTGTGFLDRQELTQLCLKLHLEQQLPVLLQTLLGNDHFARVNFEEFKEGFVAVLSSNAGVRPSDEDSSSLESAASSAIPPKYVNGSKWYGRRSRPELCDAATEARRVPEQQTQASLKSHLWRSASLESVESPKSDEEAESTKEAQNELFEAQGQLQTWDSEDFGSPQKSCSPSFDTPESQIRGVWEELGVGSSGHLSEQELAVVCQSVGLQGLEKEELEDLFNKLDQDGDGKVSLEEFQLGLFSHEPALLLESSTRVKPSKAWSHYQVPEESGCHTTTTSSLVSLCSSLRLFSSIDDGSGFAFPDQVLAMWTQEGIQNGREILQSLDFSVDEKVNLLELTWALDNELMTVDSAVQQAALACYHQELSYQQGQVEQLARERDKARQDLERAEKRNLEFVKEMDDCHSTLEQLTEKKIKHLEQGYRERLSLLRSEVEAERELFWEQAHRQRAALEWDVGRLQAEEAGLREKLTLALKENSRLQKEIVEVVEKLSDSERLALKLQKDLEFVLKDKLEPQSAELLAQEERFAAVLKEYELKCRDLQDRNDELQAELEGLWARLPKNRHSPSWSPDGRRRQLPGLGPAGISFLGNSAPVSIETELMMEQVKEHYQDLRTQLETKVNYYEREIAALKRNFEKERKDMEQARRREVSVLEGQKADLEELHEKSQEVIWGLQEQLQDTARGPEPEQMGLAPCCTQALCGLALRHHSHLQQIRREAEAELSGELSGLGALPARRDLTLELEEPPQGPLPRGSQRSEQLELERALKLQPCASEKRAQMCVSLALEEEELELARGKRVDGPSLEAEMQALPKDGLVAGSGQEGTRGLLPLRPGCGERPLAWLAPGDGRESEEAAGAGPRRRQAQDTEATQSPAPAPAPASHGPSERWSRMQPCGVDGDIVPKEPEPFGASAAGLEQPGARELPLLGTERDASQTQPRMWEPPLRPAASCRGQAERLQAIQEERARSWSRGTQEQASEQQARAEGALEPGCHKHSVEVARRGSLPSHLQLADPQGSWQEQLAAPEEGETKIALEREKDDMETKLLHLEDVVRALEKHVDLRENDRLEFHRLSEENTLLKNDLGRVRQELEAAESTHDAQRKEIEVLKKDKEKACSEMEVLNRQNQNYKDQLSQLNVRVLQLGQEASTHQAQNEEHRVTIQMLTQSLEEVVRSGQQQSDQIQKLRVELECLNQEHQSLQLPWSELTQTLEESQDQVQGAHLRLRQAQAQHLQEVRLVPQDRVAELHRLLSLQGEQARRRLDAQREEHEKQLKATEERVEEAEMILKNMEMLLQEKVDKLKEQFEKNTKSDLLLKELYVENAHLVRALQATEEKQRGAEKQSRLLEEKVRALNKLVSRIAPAALSV

SEQ ID NO: 57046 - protein, 147 aa, Homo sapiens
  Payload ID: 11208
  Gene Symbol: NINL
  Gene Name: ninein-like
  ENSP ID: ENSP00000338621
  MOD_RES (1)..(1): Any amino acid
XTARGPEPEQMGLAPCCTQALCGLALRHHSHLQQIRLEFHRLSEENTLLKNDLGRVRQELEAAESTHDAQRKEIEVLKKDKEKACSEMEVLNRQNQNYKDQLSQLNVRVLQLGQEASTHQAQNEEHRVTIQMLTQSLEEVVRSGQQQ

SEQ ID NO: 57047 - protein, 1033 aa, Homo sapiens
  Payload ID: 11208
  Gene Symbol: NINL
  Gene Name: ninein-like
  Uniprot ID: Q9Y2I6
  ENSP ID: ENSP00000410431
MDEEENHYVSQLREVYSSCDTTGTGFLDRQELTQLCLKLHLEQQLPVLLQTLLGNDHFARVNFEEFKEGFVAVLSSNAGVRPSDEDSSSLESAASSAIPPKYVNGSKWYGRRSRPELCDAATEARRVPEQQTQASLKSHLWRSASLESVESPKSDEEAESTKEAQNELFEAQGQLQTWDSEDFGSPQKSCSPSFDTPESQIRGVWEELGVGSSGHLSEQELAVVCQSVGLQGLEKEELEDLFNKLDQDGDGKVSLEEFQLGLFSHEPALLLESSTRVKPSKAWSHYQVPEESGCHTTTTSSLVSLCSSLRLFSSIDDGSGFAFPDQVLAMWTQEGIQNGREILQSLDFSVDEKVNLLELTWALDNELMTVDSAVQQAALACYHQELSYQQGQVEQLARERDKARQDLERAEKRNLEFVKEMDDCHSTLEQLTEKKIKHLEQGYRERLSLLRSEVEAERELFWEQAHRQRAALEWDVGRLQAEEAGLREKLTLALKENSRLQKEIVEVVEKLSDSERLALKLQKDLEFVLKDKLEPQSAELLAQEERFAAVLKEYELKCRDLQDRNDELQAELEGLWARLPKNRHSPSWSPDGRRRQLPGLGPAGISFLGNSAPVSIETELMMEQVKEHYQDLRTQLETKVNYYEREIAALKRNFEKERKDMEQARRREVSVLEGQKADLEELHEKSQEVIWGLQEQLQDTARGPEPEQMGLAPCCTQALCGLALRHHSHLQQIRLEFHRLSEENTLLKNDLGRVRQELEAAESTHDAQRKEIEVLKKDKEKACSEMEVLNRQNQNYKDQLSQLNVRVLQLGQEASTHQAQNEEHRVTIQMLTQSLEEVVRSGQQQSDQIQKLRVELECLNQEHQSLQLPWSELTQTLEESQDQVQGAHLRLRQAQAQHLQEVRLVPQDRVAELHRLLSLQGEQARRRLDAQREEHEKQLKATEERVEEAEMILKNMEMLLQEKVDKLKEQFEKNTKSDLLLKELYVENAHLVRALQATEEKQRGAEKQSRLLEEKVRALNKLVSRIAPAALSV

SEQ ID NO: 57048 - protein, 152 aa, Homo sapiens
  Payload ID: 11209
  Gene Symbol: NINJ1
  Gene Name: ninjurin 1
  Uniprot ID: Q92982
  ENSP ID: ENSP00000364595
MDSGTEEYELNGGLPPGTPGSPDASPARWGWRHGPINVNHYASKKSAAESMLDIALLMANASQLKAVVEQGPSFAFYVPLVVLISISLVLQIGVGVLLIFLVKYDLNNPAKHAKLDFLNNLATGLVFIIVVVNIFITAFGVQKPLMDMAPQQ

SEQ ID NO: 57049 - protein, 188 aa, Homo sapiens
  Payload ID: 11210
  Gene Symbol: NINJ2
  Gene Name: ninjurin 2
  Uniprot ID: Q9NZG7
  ENSP ID: ENSP00000307552
MAGLSRQLCALSHPKKAAETQTAEPGGAHAVCSRHPVRVKGLEGSEMESARENIDLQPGSSDPRSQPINLNHYATKKSVAESMLDVALFMSNAMRLKAVLEQGPSSHYYTTLVTLISLSLLLQVVIGVLLVVIARLNLNEVEKQWRLNQLNNAATILVFFTVVINVFITAFGAHKTGFLAARASRNPL

SEQ ID NO: 57050 - protein, 135 aa, Homo sapiens
  Payload ID: 11210
  Gene Symbol: NINJ2
  Gene Name: ninjurin 2
  ENSP ID: ENSP00000380435
MMYMPGSSDPRSQPINLNHYATKKSVAESMLDVALFMSNAMRLKAVLEQGPSSHYYTTLVTLISLSLLLQVVIGVLLVVIARLNLNEVEKQWRLNQLNNAATILVFFTVVINVFITAFGAHKTGFLAARASRNPL

SEQ ID NO: 57051 - protein, 90 aa, Homo sapiens
  Payload ID: 11210
  Gene Symbol: NINJ2
  Gene Name: ninjurin 2
  ENSP ID: ENSP00000415158
MLDVALFMSNAMRLKAVLEQGPSSHYYTTLVTLISLSLLLQVVIGVLLVVIGEEPSLQSDLLPRHPWLAERPHVSPGPPCIGTGSFATTR

SEQ ID NO: 57052 - protein, 106 aa, Homo sapiens
  Payload ID: 11210
  Gene Symbol: NINJ2
  Gene Name: ninjurin 2
  ENSP ID: ENSP00000438831
MLDVALFMSNAMRLKAVLEQGPSSHYYTTLVTLISLSLLLQVVIGVLLVVIARLNLNEVEKQWRLNQLNNAATILVFFTVVINVFITAFGAHKTGFLAARASRNPL

SEQ ID NO: 57053 - protein, 180 aa, Homo sapiens
  Payload ID: 11211
  Gene Symbol: NIP7
  Gene Name: NIP7, nucleolar pre-rRNA processing protein
  Uniprot ID: Q9Y221
  ENSP ID: ENSP00000254940
MRPLTEEETRVMFEKIAKYIGENLQLLVDRPDGTYCFRLHNDRVYYVSEKIMKLAANISGDKLVSLGTCFGKFTKTHKFRLHVTALDYLAPYAKYKVWIKPGAEQSFLYGNHVLKSGLGRITENTSQYQGVVVYSMADIPLGFGVAAKSTQDCRKVDPMAIVVFHQADIGEYVRHEETLT

SEQ ID NO: 57054 - protein, 133 aa, Homo sapiens
  Payload ID: 11211
  Gene Symbol: NIP7
  Gene Name: NIP7, nucleolar pre-rRNA processing protein
  Uniprot ID: Q9Y221
  ENSP ID: ENSP00000254941
MRPLTEEETRVMFEKIAKYIGENLQLLVDRPDGTYCFRLHNDRVYYVSEKIMKLAANISGDKLVSLGTCFGKFTKTHKFRLHVTALDYLAPYAKGFGVAAKSTQDCRKVDPMAIVVFHQADIGEYVRHEETLT

SEQ ID NO: 57055 - protein, 110 aa, Homo sapiens
  Payload ID: 11211
  Gene Symbol: NIP7
  Gene Name: NIP7, nucleolar pre-rRNA processing protein
  ENSP ID: ENSP00000463739
MRPLTEEETRVMFEKIAKYIGENLQLLVDRPDGTYCFRLHNDRVYYVSEKIMKLAANISGDKLVSLGTCFGKFTKTHKFRLHVTALDYLAPYAKVCGAVSNSATGDEVKD

SEQ ID NO: 57056 - protein, 70 aa, Homo sapiens
  Payload ID: 11211
  Gene Symbol: NIP7
  Gene Name: NIP7, nucleolar pre-rRNA processing protein
  ENSP ID: ENSP00000464159
THKFRLHVTALDYLAPYAKYKVWIKPGAEQSFLYGNHVLKSGLGRITENTSQYQGVVVYSMADIPLCLFF

SEQ ID NO: 57057 - protein, 79 aa, Homo sapiens
  Payload ID: 11211
  Gene Symbol: NIP7
  Gene Name: NIP7, nucleolar pre-rRNA processing protein
  ENSP ID: ENSP00000464348
  MOD_RES (1)..(1): Any amino acid
XKTHKFRLHVTALDYLAPYAKYKVWIKPGAEQSFLYGNHVLKSGLGRITENTSQYQGVVVYSMADIPLTLGNMCGMKRR

SEQ ID NO: 57058 - protein, 410 aa, Homo sapiens
  Payload ID: 11212
  Gene Symbol: NIPAL1
  Gene Name: NIPA-like domain containing 1
  Uniprot ID: Q6NVV3
  ENSP ID: ENSP00000295461
MGAQVRLPPGEPCREGYVLSLVCPNSSQAWCEITNVSQLLASPVLYTDLNYSINNLSISANVENKYSLYVGLVLAVSSSIFIGSSFILKKKGLLQLASKGFTRAGQGGHSYLKEWLWWVGLLSMGAGEAANFAAYAFAPATLVTPLGALSVLISAILSSYFLNEHLNIHGKIGCILSILGSTVMVIHAPQEEEVTSLHEMEMKLRDPGFISFAVIITVISLVLILIVAPKKGQTNILVYISICSLIGAFSVSSVKGLGIAIKELIEWKPVYKHPLVFVLLAVLVLSVTTQINYLNKALDTFNTSLVTPIYYVFFTSMVVTCSAILFQEWYGMTAGDIIGTLSGFFTIIIGIFLLHAFKNTDITWSELTSTAKKEAVSLNVNENNYVLLENLECSAPGYNDDVTLFSRTDD

SEQ ID NO: 57059 - protein, 92 aa, Homo sapiens
  Payload ID: 11212
  Gene Symbol: NIPAL1
  Gene Name: NIPA-like domain containing 1
  ENSP ID: ENSP00000422276
VSQLLASPVLYTDLNYSINNLSISANVENKYSLYVGLVLAVSSSIFIGSSFILKKKGLLQLASKGFTRAGQGGHSYLKEWLWWVGLLSSSIN

SEQ ID NO: 57060 - protein, 131 aa, Homo sapiens
  Payload ID: 11212
  Gene Symbol: NIPAL1
  Gene Name: NIPA-like domain containing 1
  ENSP ID: ENSP00000425795
MGAQVRLPPGEPCREGYVLSLVCPNSSQAWCEITNVSQLLASPVLYTDLNYSINNLSISANVENKYSLYVGLVLAVSSSIFIGSSFILKKKGLLQLASKGFTRAGQGGHSYLKEWLWWVGLLSMQYYLPTF

SEQ ID NO: 57061 - protein, 368 aa, Homo sapiens
  Payload ID: 11213
  Gene Symbol: NIPAL2
  Gene Name: NIPA-like domain containing 2
  Uniprot ID: Q9H841
  ENSP ID: ENSP00000339256
MAAVAPAGPGDSASAALDELSLNFTYGAPGAGNGSLSGDWYRRNQIHLFGVLLAILGNLVISISLNIQKYSHLQLAQQEHPRPYFKSVLWWGGVLLMAVGETGNFAAYGFAPITLIAPLGCVSVTGSAIISVTFLKDNLRASDLLGTTLAFAGTYLLVNFAPNITQAISARTVQYYLVGWQFLIYVILEILIFCILLYFYKRKGMKHMVILLTLVAILASLTVISVKAVSGMITFSVMDKMQLTYPIFYIMFIIMIASCVFQVKFLNQATKLYNTTTVVPVNHIFFTISAIIAGIIFYQEFLGAPFLTVFIYLFGCFLSFLGVFLVTRNREKEHLQQSYIDFGNIPDTTPERKAWRETNVGQNTTRFT

SEQ ID NO: 57062 - protein, 383 aa, Homo sapiens
  Payload ID: 11213
  Gene Symbol: NIPAL2
  Gene Name: NIPA-like domain containing 2
  Uniprot ID: Q9H841
  ENSP ID: ENSP00000407087
MAAVAPAGPGDSASAALDELSLNFTYGAPGAGNGSLSGDWYRRNQIHLFGVLLAILGNLVISISLNIQKYSHLQLAQQEHPRPYFKSVLWWGGVLLMAVGETGNFAAYGFAPITLIAPLGCVSVTGSAIISVTFLKDNLRASDLLGTTLAFAGTYLLVNFAPNITQAISARTVQYYLVGWQFLIYVILEILIFCILLYFYKRKGMKHMVILLTLVAILASLTVISVKAVSGMITFSVMDKMQLTYPIFYIMFIIMIASCVFQVKFLNQATKLYNTTTVVPVNHIFFTISAIIAGIIFYQEFLGAPFLTVFIYLFGCFLSFLGVFLVTRNREKEHLQQSYIDFGNIPGKQMLDKIQPDSHSLSYGTLPDGSDSTKSQSGEKKEV

SEQ ID NO: 57063 - protein, 324 aa, Homo sapiens
  Payload ID: 11214
  Gene Symbol: NIPAL3
  Gene Name: NIPA-like domain containing 3
  Uniprot ID: Q6P499
  ENSP ID: ENSP00000003912
MLLGELGVFASYAFAPLSLIVPLSAVSVIASAIIGIIFIKEKWKPKDFLRRYVLSFVGCGLAVVGTYLLVTFAPNSHEKMTGENVTRHLVSWPFLLYMLVEIILFCLLLYFYKEKNANNIVVILLLVALLGSMTVVTVKAVAGMLVLSIQGNLQLDYPIFYVMFVCMVATAVYQAAFLSQASQMYDSSLIASVGYILSTTIAITAGAIFYLDFIGEDVLHICMFALGCLIAFLGVFLITRNRKKPIPFEPYISMDAMPGMQNMHDKGMTVQPELKASFSYGALENNDNISEIYAPATLPVMQEEHGSRSASGVPYRVLEHTKKE

SEQ ID NO: 57064 - protein, 368 aa, Homo sapiens
  Payload ID: 11214
  Gene Symbol: NIPAL3
  Gene Name: NIPA-like domain containing 3
  ENSP ID: ENSP00000343549
MDGSHSAALKLQQLPPTSSSSAVSEASFSYKENLIGALLAIFGHLVVSIALNLQKYCHIRLAGSKDPRAYFKTKTWWLGLFLMLLGELGVFASYAFAPLSLIVPLSAVSVIASAIIGIIFIKEKWKPKDFLRRYVLSFVGCGLAVVGTYLLVTFAPNSHEKMTGENVTRHLVSWPFLLYMLVEIILFCLLLYFYKEKNANNIVVILLLVALLGSMTVVTVKAVAGMLVLSIQGNLQLDYPIFYVMFVCMVATAVYQAAFLSQASQMYDSSLIASVGYILSTTIAITAGAIFYLDFIGEDVLHICMFALGCLIAFLGVFLITRNRKKPIPFEPYISMDAMPDSYLHNRQLLFKRYSNSRNLPHHNLESL

SEQ ID NO: 57065 - protein, 226 aa, Homo sapiens
  Payload ID: 11214
  Gene Symbol: NIPAL3
  Gene Name: NIPA-like domain containing 3
  Uniprot ID: Q6P499
  ENSP ID: ENSP00000350722
MDGSHSAALKLQQLPPTSSSSAVSEASFSYKENLIGALLAIFGHLVVSIALNLQKYCHIRLAGSKDPRAYFKTKTWWLGLFLMLLGELGVFASYAFAPLSLIVPLSAVSVIASAIIGIIFIKEKWKPKDFLRRYVLSFVGCGLAVVGTYLLVTFAPNSHEKMTGENVTRHLVSWPFLLYMLVEIILFCLLLYFYKEKNANNIVVILLLVALLVLLCHPGWSAVVQS

SEQ ID NO: 57066 - protein, 406 aa, Homo sapiens
  Payload ID: 11214
  Gene Symbol: NIPAL3
  Gene Name: NIPA-like domain containing 3
  Uniprot ID: Q6P499
  ENSP ID: ENSP00000363520
MDGSHSAALKLQQLPPTSSSSAVSEASFSYKENLIGALLAIFGHLVVSIALNLQKYCHIRLAGSKDPRAYFKTKTWWLGLFLMLLGELGVFASYAFAPLSLIVPLSAVSVIASAIIGIIFIKEKWKPKDFLRRYVLSFVGCGLAVVGTYLLVTFAPNSHEKMTGENVTRHLVSWPFLLYMLVEIILFCLLLYFYKEKNANNIVVILLLVALLGSMTVVTVKAVAGMLVLSIQGNLQLDYPIFYVMFVCMVATAVYQAAFLSQASQMYDSSLIASVGYILSTTIAITAGAIFYLDFIGEDVLHICMFALGCLIAFLGVFLITRNRKKPIPFEPYISMDAMPGMQNMHDKGMTVQPELKASFSYGALENNDNISEIYAPATLPVMQEEHGSRSASGVPYRVLEHTKKE

SEQ ID NO: 57067 - protein, 134 aa, Homo sapiens
  Payload ID: 11214
  Gene Symbol: NIPAL3
  Gene Name: NIPA-like domain containing 3
  ENSP ID: ENSP00000392170
  MOD_RES (1)..(1): Any amino acid
XVAGMLVLSIQGNLQLDYPIFYVMFVCMVATAVYQAAFSKTDSSPANENNSPYLRESHEALMRMSLGKCPVFESSLTDVRLLFDCQCGLHSVHNHCYHSRCNILPGLHRGGRAAHLHVCTGVPHCILGRLLNHA

SEQ ID NO: 57068 - protein, 466 aa, Homo sapiens
  Payload ID: 11215
  Gene Symbol: NIPAL4
  Gene Name: NIPA-like domain containing 4
  Uniprot ID: Q0D2K0
  ENSP ID: ENSP00000311687
MPGDSSPGTLPLWDASLSPPLGPDPGGFSRASHAGDKSRPPAPELGSPGAVRPRVGSCAPGPMELRVSNTSCENGSLLHLYCSSQEVLCQIVNDLSPEVPSNATFHSWQERIRQNYGFYIGLGLAFLSSFLIGSSVILKKKGLLRLVATGATRAVDGGFGYLKDAMWWAGFLTMAAGEVANFGAYAFAPATVVTPLGALSVLISAILSSYFLRESLNLLGKLGCVICVAGSTVMVIHAPEEEKVTTIMEMASKMKDTGFIVFAVLLLVSCLILIFVIAPRYGQRNILIYIIICSVIGAFSVAAVKGLGITIKNFFQGLPVVRHPLPYILSLILALSLSTQVNFLNRALDIFNTSLVFPIYYVFFTTVVVTSSIILFKEWYSMSAVDIAGTLSGFVTIILGVFMLHAFKDLDISCASLPHMHKNPPPSPAPEPTVIRLEDKNVLVDNIELASTSSPEEKPKVFIIHS

SEQ ID NO: 57069 - protein, 447 aa, Homo sapiens
  Payload ID: 11215
  Gene Symbol: NIPAL4
  Gene Name: NIPA-like domain containing 4
  Uniprot ID: Q0D2K0
  ENSP ID: ENSP00000406456
MPGDSSPGTLPLWDASLSPPLGPDPGGFSRASHAGDKSRPPAPELGSPGAVRPRVGSCAPGPMELRVSNTSCENGSLLHLYCSSQEVLCQIVNDLSPEVPSNATFHSWQERIRQNYGFYIGLGLAFLSSFLIGSSVILKKKGLLRLVATGATRAVAAGEVANFGAYAFAPATVVTPLGALSVLISAILSSYFLRESLNLLGKLGCVICVAGSTVMVIHAPEEEKVTTIMEMASKMKDTGFIVFAVLLLVSCLILIFVIAPRYGQRNILIYIIICSVIGAFSVAAVKGLGITIKNFFQGLPVVRHPLPYILSLILALSLSTQVNFLNRALDIFNTSLVFPIYYVFFTTVVVTSSIILFKEWYSMSAVDIAGTLSGFVTIILGVFMLHAFKDLDISCASLPHMHKNPPPSPAPEPTVIRLEDKNVLVDNIELASTSSPEEKPKVFIIHS

SEQ ID NO: 57070 - protein, 132 aa, Homo sapiens
  Payload ID: 11215
  Gene Symbol: NIPAL4
  Gene Name: NIPA-like domain containing 4
  ENSP ID: ENSP00000430810
PAPELGSPGAVRPRVGSCAPGPMELRVSNTSCENAGMAERSQGRKVPCSTSTAPPKKSCARLSMTSALRCPAMPPFTAGRKESGRTMASTSAWAWHSCLASSSAAASSSRRKASCDSWPREPLELWMEASAT

SEQ ID NO: 57071 - protein, 2804 aa, Homo sapiens
  Payload ID: 11216
  Gene Symbol: NIPBL
  Gene Name: Nipped-B homolog (Drosophila)
  Uniprot ID: Q6KC79
  ENSP ID: ENSP00000282516
MNGDMPHVPITTLAGIASLTDLLNQLPLPSPLPATTTKSLLFNARIAEEVNCLLACRDDNLVSQLVHSLNQVSTDHIELKDNLGSDDPEGDIPVLLQAVLARSPNVFREKSMQNRYVQSGMMMSQYKLSQNSMHSSPASSNYQQTTISHSPSSRFVPPQTSSGNRFMPQQNSPVPSPYAPQSPAGYMPYSHPSSYTTHPQMQQASVSSPIVAGGLRNIHDNKVSGPLSGNSANHHADNPRHGSSEDYLHMVHRLSSDDGDSSTMRNAASFPLRSPQPVCSPAGSEGTPKGSRPPLILQSQSLPCSSPRDVPPDILLDSPERKQKKQKKMKLGKDEKEQSEKAAMYDIISSPSKDSTKLTLRLSRVRSSDMDQQEDMISGVENSNVSENDIPFNVQYPGQTSKTPITPQDINRPLNAAQCLSQQEQTAFLPANQVPVLQQNTSVAAKQPQTSVVQNQQQISQQGPIYDEVELDALAEIERIERESAIERERFSKEVQDKDKPLKKRKQDSYPQEAGGATGGNRPASQETGSTGNGSRPALMVSIDLHQAGRVDSQASITQDSDSIKKPEEIKQCNDAPVSVLQEDIVGSLKSTPENHPETPKKKSDPELSKSEMKQSESRLAESKPNENRLVETKSSENKLETKVETQTEELKQNESRTTECKQNESTIVEPKQNENRLSDTKPNDNKQNNGRSETTKSRPETPKQKGESRPETPKQKSDGHPETPKQKGDGRPETPKQKGESRPETPKQKNEGRPETPKHRHDNRRDSGKPSTEKKPEVSKHKQDTKSDSPRLKSERAEALKQRPDGRSVSESLRRDHDNKQKSDDRGESERHRGDQSRVRRPETLRSSSRNEHGIKSDSSKTDKLERKHRHESGDSRERPSSGEQKSRPDSPRVKQGDSNKSRSDKLGFKSPTSKDDKRTEGNKSKVDTNKAHPDNKAEFPSYLLGGRSGALKNFVIPKIKRDKDGNVTQETKKMEMKGEPKDKVEKIGLVEDLNKGAKPVVVLQKLSLDDVQKLIKDREDKSRSSLKPIKNKPSKSNKGSIDQSVLKELPPELLAEIESTMPLCERVKMNKRKRSTVNEKPKYAEISSDEDNDSDEAFESSRKRHKKDDDKAWEYEERDRRSSGDHRRSGHSHEGRRSSGGGRYRNRSPSDSDMEDYSPPPSLSEVARKMKKKEKQKKRKAYEPKLTPEEMMDSSTFKRFTASIENILDNLEDMDFTAFGDDDEIPQELLLGKHQLNELGSESAKIKAMGIMDKLSTDKTVKVLNILEKNIQDGSKLSTLLNHNNDTEEEERLWRDLIMERVTKSADACLTTINIMTSPNMPKAVYIEDVIERVIQYTKFHLQNTLYPQYDPVYRLDPHGGGLLSSKAKRAKCSTHKQRVIVMLYNKVCDIVSSLSELLEIQLLTDTTILQVSSMGITPFFVENVSELQLCAIKLVTAVFSRYEKHRQLILEEIFTSLARLPTSKRSLRNFRLNSSDMDGEPMYIQMVTALVLQLIQCVVHLPSSEKDSNAEEDSNKKIDQDVVITNSYETAMRTAQNFLSIFLKKCGSKQGEEDYRPLFENFVQDLLSTVNKPEWPAAELLLSLLGRLLVHQFSNKSTEMALRVASLDYLGTVAARLRKDAVTSKMDQGSIERILKQVSGGEDEIQQLQKALLDYLDENTETDPSLVFSRKFYIAQWFRDTTLETEKAMKSQKDEESSEGTHHAKEIETTGQIMHRAENRKKFLRSIIKTTPSQFSTLKMNSDTVDYDDACLIVRYLASMRPFAQSFDIYLTQILRVLGENAIAVRTKAMKCLSEVVAVDPSILARLDMQRGVHGRLMDNSTSVREAAVELLGRFVLCRPQLAEQYYDMLIERILDTGISVRKRVIKILRDICIEQPTFPKITEMCVKMIRRVNDEEGIKKLVNETFQKLWFTPTPHNDKEAMTRKILNITDVVAACRDTGYDWFEQLLQNLLKSEEDSSYKPVKKACTQLVDNLVEHILKYEESLADSDNKGVNSGRLVACITTLFLFSKIRPQLMVKHAMTMQPYLTTKCSTQNDFMVICNVAKILELVVPLMEHPSETFLATIEEDLMKLIIKYGMTVVQHCVSCLGAVVNKVTQNFKFVWACFNRYYGAISKLKSQHQEDPNNTSLLTNKPALLRSLFTVGALCRHFDFDLEDFKGNSKVNIKDKVLELLMYFTKHSDEEVQTKAIIGLGFAFIQHPSLMFEQEVKNLYNNILSDKNSSVNLKIQVLKNLQTYLQEEDTRMQQADRDWKKVAKQEDLKEMGDVSSGMSSSIMQLYLKQVLEAFFHTQSSVRHFALNVIALTLNQGLIHPVQCVPYLIAMGTDPEPAMRNKADQQLVEIDKKYAGFIHMKAVAGMKMSYQVQQAINTCLKDPVRGFRQDESSSALCSHLYSMIRGNRQHRRAFLISLLNLFDDTAKTDVTMLLYIADNLACFPYQTQEEPLFIMHHIDITLSVSGSNLLQSFKESMVKDKRKERKSSPSKENESSDSEEEVSRPRKSRKRVDSDSDSDSEDDINSVMKCLPENSAPLIEFANVSQGILLLLMLKQHLKNLCGFSDSKIQKYSPSESAKVYDKAINRKTGVHFHPKQTLDFLRSDMANSKITEEVKRSIVKQYLDFKLLMEHLDPDEEEEEGEVSASTNARNKAITSLLGGGSPKNNTAAETEDDESDGEDRGGGTSGSLRRSKRNSDSTELAAQMNESVDVMDVIAICCPKYKDRPQIARVVQKTSSGFSVQWMAGSYSGSWTEAKRRDGRKLVPWVDTIKESDIIYKKIALTSANKLTNKVVQTLRSLYAAKDGTSS

SEQ ID NO: 57072 - protein, 2697 aa, Homo sapiens
  Payload ID: 11216
  Gene Symbol: NIPBL
  Gene Name: Nipped-B homolog (Drosophila)
  Uniprot ID: Q6KC79
  ENSP ID: ENSP00000406266
MNGDMPHVPITTLAGIASLTDLLNQLPLPSPLPATTTKSLLFNARIAEEVNCLLACRDDNLVSQLVHSLNQVSTDHIELKDNLGSDDPEGDIPVLLQAVLARSPNVFREKSMQNRYVQSGMMMSQYKLSQNSMHSSPASSNYQQTTISHSPSSRFVPPQTSSGNRFMPQQNSPVPSPYAPQSPAGYMPYSHPSSYTTHPQMQQASVSSPIVAGGLRNIHDNKVSGPLSGNSANHHADNPRHGSSEDYLHMVHRLSSDDGDSSTMRNAASFPLRSPQPVCSPAGSEGTPKGSRPPLILQSQSLPCSSPRDVPPDILLDSPERKQKKQKKMKLGKDEKEQSEKAAMYDIISSPSKDSTKLTLRLSRVRSSDMDQQEDMISGVENSNVSENDIPFNVQYPGQTSKTPITPQDINRPLNAAQCLSQQEQTAFLPANQVPVLQQNTSVAAKQPQTSVVQNQQQISQQGPIYDEVELDALAEIERIERESAIERERFSKEVQDKDKPLKKRKQDSYPQEAGGATGGNRPASQETGSTGNGSRPALMVSIDLHQAGRVDSQASITQDSDSIKKPEEIKQCNDAPVSVLQEDIVGSLKSTPENHPETPKKKSDPELSKSEMKQSESRLAESKPNENRLVETKSSENKLETKVETQTEELKQNESRTTECKQNESTIVEPKQNENRLSDTKPNDNKQNNGRSETTKSRPETPKQKGESRPETPKQKSDGHPETPKQKGDGRPETPKQKGESRPETPKQKNEGRPETPKHRHDNRRDSGKPSTEKKPEVSKHKQDTKSDSPRLKSERAEALKQRPDGRSVSESLRRDHDNKQKSDDRGESERHRGDQSRVRRPETLRSSSRNEHGIKSDSSKTDKLERKHRHESGDSRERPSSGEQKSRPDSPRVKQGDSNKSRSDKLGFKSPTSKDDKRTEGNKSKVDTNKAHPDNKAEFPSYLLGGRSGALKNFVIPKIKRDKDGNVTQETKKMEMKGEPKDKVEKIGLVEDLNKGAKPVVVLQKLSLDDVQKLIKDREDKSRSSLKPIKNKPSKSNKGSIDQSVLKELPPELLAEIESTMPLCERVKMNKRKRSTVNEKPKYAEISSDEDNDSDEAFESSRKRHKKDDDKAWEYEERDRRSSGDHRRSGHSHEGRRSSGGGRYRNRSPSDSDMEDYSPPPSLSEVARKMKKKEKQKKRKAYEPKLTPEEMMDSSTFKRFTASIENILDNLEDMDFTAFGDDDEIPQELLLGKHQLNELGSESAKIKAMGIMDKLSTDKTVKVLNILEKNIQDGSKLSTLLNHNNDTEEEERLWRDLIMERVTKSADACLTTINIMTSPNMPKAVYIEDVIERVIQYTKFHLQNTLYPQYDPVYRLDPHGGGLLSSKAKRAKCSTHKQRVIVMLYNKVCDIVSSLSELLEIQLLTDTTILQVSSMGITPFFVENVSELQLCAIKLVTAVFSRYEKHRQLILEEIFTSLARLPTSKRSLRNFRLNSSDMDGEPMYIQMVTALVLQLIQCVVHLPSSEKDSNAEEDSNKKIDQDVVITNSYETAMRTAQNFLSIFLKKCGSKQGEEDYRPLFENFVQDLLSTVNKPEWPAAELLLSLLGRLLVHQFSNKSTEMALRVASLDYLGTVAARLRKDAVTSKMDQGSIERILKQVSGGEDEIQQLQKALLDYLDENTETDPSLVFSRKFYIAQWFRDTTLETEKAMKSQKDEESSEGTHHAKEIETTGQIMHRAENRKKFLRSIIKTTPSQFSTLKMNSDTVDYDDACLIVRYLASMRPFAQSFDIYLTQILRVLGENAIAVRTKAMKCLSEVVAVDPSILARLDMQRGVHGRLMDNSTSVREAAVELLGRFVLCRPQLAEQYYDMLIERILDTGISVRKRVIKILRDICIEQPTFPKITEMCVKMIRRVNDEEGIKKLVNETFQKLWFTPTPHNDKEAMTRKILNITDVVAACRDTGYDWFEQLLQNLLKSEEDSSYKPVKKACTQLVDNLVEHILKYEESLADSDNKGVNSGRLVACITTLFLFSKIRPQLMVKHAMTMQPYLTTKCSTQNDFMVICNVAKILELVVPLMEHPSETFLATIEEDLMKLIIKYGMTVVQHCVSCLGAVVNKVTQNFKFVWACFNRYYGAISKLKSQHQEDPNNTSLLTNKPALLRSLFTVGALCRHFDFDLEDFKGNSKVNIKDKVLELLMYFTKHSDEEVQTKAIIGLGFAFIQHPSLMFEQEVKNLYNNILSDKNSSVNLKIQVLKNLQTYLQEEDTRMQQADRDWKKVAKQEDLKEMGDVSSGMSSSIMQLYLKQVLEAFFHTQSSVRHFALNVIALTLNQGLIHPVQCVPYLIAMGTDPEPAMRNKADQQLVEIDKKYAGFIHMKAVAGMKMSYQVQQAINTCLKDPVRGFRQDESSSALCSHLYSMIRGNRQHRRAFLISLLNLFDDTAKTDVTMLLYIADNLACFPYQTQEEPLFIMHHIDITLSVSGSNLLQSFKESMVKDKRKERKSSPSKENESSDSEEEVSRPRKSRKRVDSDSDSDSEDDINSVMKCLPENSAPLIEFANVSQGILLLLMLKQHLKNLCGFSDSKIQKYSPSESAKVYDKAINRKTGVHFHPKQTLDFLRSDMANSKITEEVKRSIVKQYLDFKLLMEHLDPDEEEEEGEVSASTNARNKAITSLLGGGSPKNNTAAETEDDESDGEDRGGGTSGVRRRRSQRISQRIT

SEQ ID NO: 57073 - protein, 150 aa, Homo sapiens
  Payload ID: 11216
  Gene Symbol: NIPBL
  Gene Name: Nipped-B homolog (Drosophila)
  ENSP ID: ENSP00000421504
DKRKERKSSPSKENESSDSEEEVSRPRKSRKRVDSDSDSDSEDDINSVMKCLPENSAPLIEFANVSQGILLLLMLKQHLKNLCGFSDSSNFSWNIWTLMKKKKKGRFQLAQMLGTKQLPHCLEEAALKIIQQQRQKMMKVMGRIEEEALQ

SEQ ID NO: 57074 - protein, 104 aa, Homo sapiens
  Payload ID: 11216
  Gene Symbol: NIPBL
  Gene Name: Nipped-B homolog (Drosophila)
  ENSP ID: ENSP00000480694
MNESVDVMDVIAICCPKYKDRPQIARVVQKTSSGFSVQWMAGSYSGSWTEAKRRDGRKLVPWVDTIKESDIIYKKIALTSANKLTNKVVQTLRSLYAAKDGTSS

SEQ ID NO: 57075 - protein, 284 aa, Homo sapiens
  Payload ID: 11217
  Gene Symbol: NIPSNAP1
  Gene Name: nipsnap homolog 1 (C. elegans)
  Uniprot ID: Q9BPW8
  ENSP ID: ENSP00000216121
MAPRLCSISVTARRLLGGPGPRAGDVASAAAARFYSKDNEGSWFRSLFVHKVDPRKDAHSTLLSKKETSNLYKIQFHNVKPEYLDAYNSLTEAVLPKLHLDEDYPCSLVGNWNTWYGEQDQAVHLWRFSGGYPALMDCMNKLKNNKEYLEFRRERSQMLLSRRNQLLLEFSFWNEPQPRMGPNIYELRTYKLKPGTMIEWGNNWARAIKYRQENQEAVGGFFSQIGELYVVHHLWAYKDLQSREETRNAAWRKRGWDENVYYTVPLVRHMESRIMIPLKISPLQ

SEQ ID NO: 57076 - protein, 75 aa, Homo sapiens
  Payload ID: 11217
  Gene Symbol: NIPSNAP1
  Gene Name: nipsnap homolog 1 (C. elegans)
  ENSP ID: ENSP00000403448
MDCMNKLKNNKEYLEFRRERSQMLLSRRNQLLLEFSFWNEPQPRMGPNIYELRTYKLKPGTMIEWGNNWARAIKY

SEQ ID NO: 57077 - protein, 128 aa, Homo sapiens
  Payload ID: 11217
  Gene Symbol: NIPSNAP1
  Gene Name: nipsnap homolog 1 (C. elegans)
  ENSP ID: ENSP00000404227
MAPRLCSISVTARRLLGGPGPRAGDVASAAAARFYSKDNEGSWFRSLFVHKVDPRKDAHSTLLSKKETSNLYKIQFHNVKPEYLDAYNSLTEAVLPKLHLDEDYPCSLVGNWNTWYGEQDQAGHSWFW

SEQ ID NO: 57078 - protein, 221 aa, Homo sapiens
  Payload ID: 11217
  Gene Symbol: NIPSNAP1
  Gene Name: nipsnap homolog 1 (C. elegans)
  ENSP ID: ENSP00000407851
  MOD_RES (1)..(1): Any amino acid
XRLCSISVTARRLLGGPGPRAGDVASAAAARLPPSEGSGLCMVKEYLPKNFYSKDNEGSWFRSLFVHKVDPRKDAHSTLLSKKETSNLYKIQFHNVKPEYLDAYNSLTEAVLPKLHLDEDYPCSLVGNWNTWYGEQDQAVHLWRFSGGYPALMDCMNKLKNNKEYLEFRRERSQMLLSRRNQLLLEFSFWNEPQPRMGPNIYELRTYKLKPGTMIEWGNNW

SEQ ID NO: 57079 - protein, 247 aa, Homo sapiens
  Payload ID: 11218
  Gene Symbol: NIPSNAP3A
  Gene Name: nipsnap homolog 3A (C. elegans)
  Uniprot ID: Q9UFN0
  ENSP ID: ENSP00000363899
MLVLRSALTRALASRTLAPQMCSSFATGPRQYDGIFYEFRSYYLKPSKMNEFLENFEKNAHLRTAHSELVGYWSVEFGGRMNTVFHIWKYDNFAHRTEVRKALAKDKEWQEQFLIPNLALIDKQESEITYLVPWCKLEKPPKEGVYELATFQMKPGGPALWGDAFKRAVHAHVNLGYTKLVGVFHTEYGALNRVHVLWWNESADSRAAGRHKSHEDPRVVAAVRESVNYLVSQQNMLLIPTSFSPLK

SEQ ID NO: 57080 - protein, 247 aa, Homo sapiens
  Payload ID: 11219
  Gene Symbol: NIPSNAP3B
  Gene Name: nipsnap homolog 3B (C. elegans)
  Uniprot ID: Q9BS92
  ENSP ID: ENSP00000363894
MLVLRSGLTKALASRTLAPQVCSSFATGPRQYDGTFYEFRTYYLKPSNMNAFMENLKKNIHLRTSYSELVGFWSVEFGGRTNKVFHIWKYDNFAHRAEVRKALANCKEWQEQSIIPNLARIDKQETEITYLIPWSKLEKPPKEGVYELAVFQMKPGGPALWGDAFERAINAHVNLGYTKVVGVFHTEYGELNRVHVLWWNESADSRAAGRHKSHEDPRVVAAVRESVNYLVSQQNMLLIPASFSPLK

SEQ ID NO: 57081 - protein, 197 aa, Homo sapiens
  Payload ID: 11219
  Gene Symbol: NIPSNAP3B
  Gene Name: nipsnap homolog 3B (C. elegans)
  ENSP ID: ENSP00000435209
MLVLRSGLTKALASRTLAPQVCSSFATGPRQYDGTFYEFRTYYLKPSNMNAFMENLKKNIHLRTSYSELVGFWSVEFGGRTNKVFHIWKYDNFAHRAEVRKALANCKEWQEQSIIPNLARIDKQETEITYLIPWSKLEKPPKEVHVLWWNESADSRAAGRHKSHEDPRVVAAVRESVNYLVSQQNMLLIPASFSPLK

SEQ ID NO: 57082 - protein, 1504 aa, Homo sapiens
  Payload ID: 11220
  Gene Symbol: NISCH
  Gene Name: nischarin
  Uniprot ID: Q9Y2I1
  ENSP ID: ENSP00000339958
MATARTFGPEREAEPAKEARVVGSELVDTYTVYIIQVTDGSHEWTVKHRYSDFHDLHEKLVAERKIDKNLLPPKKIIGKNSRSLVEKREKDLEVYLQKLLAAFPGVTPRVLAHFLHFHFYEINGITAALAEELFEKGEQLLGAGEVFAIGPLQLYAVTEQLQQGKPTCASGDAKTDLGHILDFTCRLKYLKVSGTEGPFGTSNIQEQLLPFDLSIFKSLHQVEISHCDAKHIRGLVASKPTLATLSVRFSATSMKEVLVPEASEFDEWEPEGTTLEGPVTAVIPTWQALTTLDLSHNSVSEIDESVKLIPKIEFLDLSHNGLLVVDNLQHLYNLVHLDLSYNKLSSLEGLHTKLGNIKTLNLAGNLLESLSGLHKLYSLVNLDLRDNRIEQMEEVRSIGSLPCLEHVSLLNNPLSIIPDYRTKVLAQFGERASEVCLDDTVTTEKELDTVEVLKAIQKAKEVKSKLSNPEKKGGEDSRLSAAPCIRPSSSPPTVAPASASLPQPILSNQGIMFVQEEALASSLSSTDSLTPEHQPIAQGCSDSLESIPAGQAASDDLRDVPGAVGGASPEHAEPEVQVVPGSGQIIFLPFTCIGYTATNQDFIQRLSTLIRQAIERQLPAWIEAANQREEGQGEQGEEEDEEEEEEEDVAENRYFEMGPPDVEEEEGGGQGEEEEEEEEDEEAEEERLALEWALGADEDFLLEHIRILKVLWCFLIHVQGSIRQFAACLVLTDFGIAVFEIPHQESRGSSQHILSSLRFVFCFPHGDLTEFGFLMPELCLVLKVRHSENTLFIISDAANLHEFHADLRSCFAPQHMAMLCSPILYGSHTSLQEFLRQLLTFYKVAGGCQERSQGCFPVYLVYSDKRMVQTAAGDYSGNIEWASCTLCSAVRRSCCAPSEAVKSAAIPYWLLLTPQHLNVIKADFNPMPNRGTHNCRNRNSFKLSRVPLSTVLLDPTRSCTQPRGAFADGHVLELLVGYRFVTAIFVLPHEKFHFLRVYNQLRASLQDLKTVVIAKTPGTGGSPQGSFADGQPAERRASNDQRPQEVPAEALAPAPAEVPAPAPAAASASGPAKTPAPAEASTSALVPEETPVEAPAPPPAEAPAQYPSEHLIQATSEENQIPSHLPACPSLRHVASLRGSAIIELFHSSIAEVENEELRHLMWSSVVFYQTPGLEVTACVLLSTKAVYFVLHDGLRRYFSEPLQDFWHQKNTDYNNSPFHISQCFVLKLSDLQSVNVGLFDQHFRLTGSTPMQVVTCLTRDSYLTHCFLQHLMVVLSSLERTPSPEPVDKDFYSEFGNKTTGKMENYELIHSSRVKFTYPSEEEIGDLTFTVAQKMAEPEKAPALSILLYVQAFQVGMPPPGCCRGPLRPKTLLLTSSEIFLLDEDCVHYPLPEFAKEPPQRDRYRLDDGRRVRDLDRVLMGYQTYPQALTLVFDDVQGHDLMGSVTLDHFGEVPGGPARASQGREVQWQVFVPSAESREKLISLLARQWEALCGRELPVELTG

SEQ ID NO: 57083 - protein, 515 aa, Homo sapiens
  Payload ID: 11220
  Gene Symbol: NISCH
  Gene Name: nischarin
  Uniprot ID: Q9Y2I1
  ENSP ID: ENSP00000392484
MATARTFGPEREAEPAKEARVVGSELVDTYTVYIIQVTDGSHEWTVKHRYSDFHDLHEKLVAERKIDKNLLPPKKIIGKNSRSLVEKREKDLEVYLQKLLAAFPGVTPRVLAHFLHFHFYEINGITAALAEELFEKGEQLLGAGEVFAIGPLQLYAVTEQLQQGKPTCASGDAKTDLGHILDFTCRLKYLKVSGTEGPFGTSNIQEQLLPFDLSIFKSLHQVEISHCDAKHIRGLVASKPTLATLSVRFSATSMKEVLVPEASEFDEWEPEGTTLEGPVTAVIPTWQALTTLDLSHNSVSEIDESVKLIPKIEFLDLSHNGLLVVDNLQHLYNLVHLDLSYNKLSSLEGLHTKLGNIKTLNLAGNLLESLSGLHKLYSLVNLDLRDNRIEQMEEVRSIGSLPCLEHVSLLNNPLSIIPDYRTKVLAQFGERASEVCLDDTVTTEKELDTVEVLKAIQKAKEVKSKLSNPEKKGGEDSRLSAAPCIRPSSSPPTVAPASASLPQPILSNQGILGDE

SEQ ID NO: 57084 - protein, 583 aa, Homo sapiens
  Payload ID: 11220
  Gene Symbol: NISCH
  Gene Name: nischarin
  ENSP ID: ENSP00000417812
MATARTFGPEREAEPAKEARVVGSELVDTYTVYIIQVTDGSHEWTVKHRYSDFHDLHEKLVAERKIDKNLLPPKKIIGKNSRSLVEKREKDLEVYLQKLLAAFPGVTPRVLAHFLHFHFYEINGITAALAEELFEKGEQLLGAGEVFAIGPLQLYAVTEQLQQGKPTCASGDAKTDLGHILDFTCRLKYLKVSGTEGPFGTSNIQEQLLPFDLSIFKSLHQVEISHCDAKHIRGLVASKPTLATLSVRFSATSMKEVLVPEASEFDEWEPEGTTLEGPVTAVIPTWQALTTLDLSHNSVSEIDESVKLIPKIEFLDLSHNGLLVVDNLQHLYNLVHLDLSYNKLSSLEGLHTKLGNIKTLNLAGNLLESLSGLHKLYSLVNLDLRDNRIEQMEEVRSIGSLPCLEHVSLLNNPLSIIPDYRTKVLAQFGERASEVCLDDTVTTEKELDTVEVLKAIQKAKEVKSKLSNPEKKGGEDSRLSAAPCIRPSSSPPTVAPASASLPQPILSNQGNRVCILLLVEPHSPAWAPWLGWGWGRGASTCFQQGQTQGGQCLLQAGPRGGTHGRGAWPDASCCLLGEDSQLL

SEQ ID NO: 57085 - protein, 1504 aa, Homo sapiens; identical to SEQ ID NO: 57082
  Payload ID: 11220
  Gene Symbol: NISCH
  Gene Name: nischarin
  Uniprot ID: Q9Y2I1
  ENSP ID: ENSP00000418232

SEQ ID NO: 57086 - protein, 698 aa, Homo sapiens
  Payload ID: 11221
  Gene Symbol: NOA1
  Gene Name: nitric oxide associated 1
  Uniprot ID: Q8NC60
  ENSP ID: ENSP00000264230
MLPARLPFRLLSLFLRGSAPTAARHGLREPLLERRCAAASSFQHSSSLGRELPYDPVDTEGFGEGGDMQERFLFPEYILDPEPQPTREKQLQELQQQQEEEERQRQQRREERRQQNLRARSREHPVVGHPDPALPPSGVNCSGCGAELHCQDAGVPGYLPREKFLRTAEADGGLARTVCQRCWLLSHHRRALRLQVSREQYLELVSAALRRPGPSLVLYMVDLLDLPDALLPDLPALVGPKQLIVLGNKVDLLPQDAPGYRQRLRERLWEDCARAGLLLAPGHQGPQRPVKDEPQDGENPNPPNWSRTVVRDVRLISAKTGYGVEELISALQRSWRYRGDVYLVGATNAGKSTLFNTLLESDYCTAKGSEAIDRATISPWPGTTLNLLKFPICNPTPYRMFKRHQRLKKDSTQAEEDLSEQEQNQLNVLKKHGYVVGRVGRTFLYSEEQKDNIPFEFDADSLAFDMENDPVMGTHKSTKQVELTAQDVKDAHWFYDTPGITKENCILNLLTEKEVNIVLPTQSIVPRTFVLKPGMVLFLGAIGRIDFLQGNQSAWFTVVASNILPVHITSLDRADALYQKHAGHTLLQIPMGGKERMAGFPPLVAEDIMLKEGLGASEAVADIKFSSAGWVSVTPNFKDRLHLRGYTPEGTVLTVRPPLLPYIVNIKGQRIKKSVAYKTKKPPSLMYNVRKKKGKINV

SEQ ID NO: 57087 - protein, 1434 aa, Homo sapiens
  Payload ID: 11222
  Gene Symbol: NOS1
  Gene Name: nitric oxide synthase 1 (neuronal)
  Uniprot ID: P29475
  ENSP ID: ENSP00000320758
MEDHMFGVQQIQPNVISVRLFKRKVGGLGFLVKERVSKPPVIISDLIRGGAAEQSGLIQAGDIILAVNGRPLVDLSYDSALEVLRGIASETHVVLILRGPEGFTTHLETTFTGDGTPKTIRVTQPLGPPTKAVDLSHQPPAGKEQPLAVDGASGPGNGPQHAYDDGQEAGSLPHANGLAPRPPGQDPAKKATRVSLQGRGENNELLKEIEPVLSLLTSGSRGVKGGAPAKAEMKDMGIQVDRDLDGKSHKPLPLGVENDRVFNDLWGKGNVPVVLNNPYSEKEQPPTSGKQSPTKNGSPSKCPRFLKVKNWETEVVLTDTLHLKSTLETGCTEYICMGSIMHPSQHARRPEDVRTKGQLFPLAKEFIDQYYSSIKRFGSKAHMERLEEVNKEIDTTSTYQLKDTELIYGAKHAWRNASRCVGRIQWSKLQVFDARDCTTAHGMFNYICNHVKYATNKGNLRSAITIFPQRTDGKHDFRVWNSQLIRYAGYKQPDGSTLGDPANVQFTEICIQQGWKPPRGRFDVLPLLLQANGNDPELFQIPPELVLEVPIRHPKFEWFKDLGLKWYGLPAVSNMLLEIGGLEFSACPFSGWYMGTEIGVRDYCDNSRYNILEEVAKKMNLDMRKTSSLWKDQALVEINIAVLYSFQSDKVTIVDHHSATESFIKHMENEYRCRGGCPADWVWIVPPMSGSITPVFHQEMLNYRLTPSFEYQPDPWNTHVWKGTNGTPTKRRAIGFKKLAEAVKFSAKLMGQAMAKRVKATILYATETGKSQAYAKTLCEIFKHAFDAKVMSMEEYDIVHLEHETLVLVVTSTFGNGDPPENGEKFGCALMEMRHPNSVQEERKSYKVRFNSVSSYSDSQKSSGDGPDLRDNFESAGPLANVRFSVFGLGSRAYPHFCAFGHAVDTLLEELGGERILKMREGDELCGQEEAFRTWAKKVFKAACDVFCVGDDVNIEKANNSLISNDRSWKRNKFRLTFVAEAPELTQGLSNVHKKRVSAARLLSRQNLQSPKSSRSTIFVRLHTNGSQELQYQPGDHLGVFPGNHEDLVNALIERLEDAPPVNQMVKVELLEERNTALGVISNWTDELRLPPCTIFQAFKYYLDITTPPTPLQLQQFASLATSEKEKQRLLVLSKGLQEYEEWKWGKNPTIVEVLEEFPSIQMPATLLLTQLSLLQPRYYSISSSPDMYPDEVHLTVAIVSYRTRDGEGPIHHGVCSSWLNRIQADELVPCFVRGAPSFHLPRNPQVPCILVGPGTGIAPFRSFWQQRQFDIQHKGMNPCPMVLVFGCRQSKIDHIYREETLQAKNKGVFRELYTAYSREPDKPKKYVQDILQEQLAESVYRALKEQGGHIYVCGDVTMAADVLKAIQRIMTQQGKLSAEDAGVFISRMRDDNRYHEDIFGVTLRTYEVTNRLRSESIAFIEESKKDTDEVFSS

SEQ ID NO: 57088 - protein, 1468 aa, Homo sapiens
  Payload ID: 11222
  Gene Symbol: NOS1
  Gene Name: nitric oxide synthase 1 (neuronal)
  Uniprot ID: P29475
  ENSP ID: ENSP00000337459
MEDHMFGVQQIQPNVISVRLFKRKVGGLGFLVKERVSKPPVIISDLIRGGAAEQSGLIQAGDIILAVNGRPLVDLSYDSALEVLRGIASETHVVLILRGPEGFTTHLETTFTGDGTPKTIRVTQPLGPPTKAVDLSHQPPAGKEQPLAVDGASGPGNGPQHAYDDGQEAGSLPHANGLAPRPPGQDPAKKATRVSLQGRGENNELLKEIEPVLSLLTSGSRGVKGGAPAKAEMKDMGIQVDRDLDGKSHKPLPLGVENDRVFNDLWGKGNVPVVLNNPYSEKEQPPTSGKQSPTKNGSPSKCPRFLKVKNWETEVVLTDTLHLKSTLETGCTEYICMGSIMHPSQHARRPEDVRTKGQLFPLAKEFIDQYYSSIKRFGSKAHMERLEEVNKEIDTTSTYQLKDTELIYGAKHAWRNASRCVGRIQWSKLQVFDARDCTTAHGMFNYICNHVKYATNKGNLRSAITIFPQRTDGKHDFRVWNSQLIRYAGYKQPDGSTLGDPANVQFTEICIQQGWKPPRGRFDVLPLLLQANGNDPELFQIPPELVLEVPIRHPKFEWFKDLGLKWYGLPAVSNMLLEIGGLEFSACPFSGWYMGTEIGVRDYCDNSRYNILEEVAKKMNLDMRKTSSLWKDQALVEINIAVLYSFQSDKVTIVDHHSATESFIKHMENEYRCRGGCPADWVWIVPPMSGSITPVFHQEMLNYRLTPSFEYQPDPWNTHVWKGTNGTPTKRRAIGFKKLAEAVKFSAKLMGQAMAKRVKATILYATETGKSQAYAKTLCEIFKHAFDAKVMSMEEYDIVHLEHETLVLVVTSTFGNGDPPENGEKFGCALMEMRHPNSVQEERKYPEPLRFFPRKGPPLPNGDTEVHGLAAARDSQHRSYKVRFNSVSSYSDSQKSSGDGPDLRDNFESAGPLANVRFSVFGLGSRAYPHFCAFGHAVDTLLEELGGERILKMREGDELCGQEEAFRTWAKKVFKAACDVFCVGDDVNIEKANNSLISNDRSWKRNKFRLTFVAEAPELTQGLSNVHKKRVSAARLLSRQNLQSPKSSRSTIFVRLHTNGSQELQYQPGDHLGVFPGNHEDLVNALIERLEDAPPVNQMVKVELLEERNTALGVISNWTDELRLPPCTIFQAFKYYLDITTPPTPLQLQQFASLATSEKEKQRLLVLSKGLQEYEEWKWGKNPTIVEVLEEFPSIQMPATLLLTQLSLLQPRYYSISSSPDMYPDEVHLTVAIVSYRTRDGEGPIHHGVCSSWLNRIQADELVPCFVRGAPSFHLPRNPQVPCILVGPGTGIAPFRSFWQQRQFDIQHKGMNPCPMVLVFGCRQSKIDHIYREETLQAKNKGVFRELYTAYSREPDKPKKYVQDILQEQLAESVYRALKEQGGHIYVCGDVTMAADVLKAIQRIMTQQGKLSAEDAGVFISRMRDDNRYHEDIFGVTLRTYEVTNRLRSESIAFIEESKKDTDEVFSS

SEQ ID NO: 57089 - protein, 1433 aa, Homo sapiens [sequence omitted]

SEQ ID NO: 57090 - protein, 1468 aa, Homo sapiens; identical to SEQ ID NO: 57088
  Payload ID: 11222
  Gene Symbol: NOS1
  Gene Name: nitric oxide synthase 1 (neuronal)
  Uniprot ID: P29475
  ENSP ID: ENSP00000477999

SEQ ID NO: 57091 - protein, 506 aa, Homo sapiens
  Payload ID: 11223
  Gene Symbol: NOS1AP
  Gene Name: nitric oxide synthase 1 (neuronal) adaptor protein
  Uniprot ID: O75052
  ENSP ID: ENSP00000355133
MPSKTKYNLVDDGHDLRIPLHNEDAFQHGICFEAKYVGSLDVPRPNSRVEIVAAMRRIRYEFKAKNIKKKKVSIMVSVDGVKVILKKKKKLLLLQKKEWTWDESKMLVMQDPIYRIFYVSHDSQDLKIFSYIARDGASNIFRCNVFKSKKKSQAMRIVRTVGQAFEVCHKLSLQHTQQNADGQEDGESERNSNSSGDPGRQLTGAERASTATAEETDIDAVEVPLPGNDVLEFSRGVTDLDAVGKEGGSHTGSKVSHPQEPMLTASPRMLLPSSSSKPPGLGTETPLSTHHQMQLLQQLLQQQQQQTQVAVAQVHLLKDQLAAEAAARLEAQARVHQLLLQNKDMLQHISLLVKQVQELELKLSGQNAMGSQDSLLEITFRSGALPVLCDPTTPKPEDLHSPPLGAGLADFAHPAGSPLGRRDCLVKLECFRFLPPEDTPPPAQGEALLGGLELIKFRESGIASEYESNTDESEERDSWSQEELPRLLNVLQRQELGDGLDDEIAV

SEQ ID NO: 57092 - protein, 349 aa, Homo sapiens
  Payload ID: 11223
  Gene Symbol: NOS1AP
  Gene Name: nitric oxide synthase 1 (neuronal) adaptor protein
  ENSP ID: ENSP00000396713
MPSKTKYNLVDDGHDLRIPLHNEDAFQHGICFEAKYVGSLDVPRPNSRVEIVAAMRRIRYEFKAKNIKKKKVSIMVSVDGVKVILKKKKKKKEWTWDESKMLVMQDPIYRIFYVSHDSQDLKIFSYIARDGASNIFRCNVFKSKKKSQAMRIVRTVGQAFEVCHKLSLQHTQQNADGQEDGESERNSNSSGDPGRQLTGAERASTATAEETDIDAVEVPLPGNDVLEFSRGVTDLDAVGKEGGSHTGSKVSHPQEPMLTASPRMLLPSSSSKPPGLGTETPLSTHHQMQLLQQLLQQQQQQTQVAVAQCVVGQIALVLSTAISMCLLLPNFSLALPSLLMEELESRYTC

SEQ ID NO: 57093 - protein, 501 aa, Homo sapiens
  Payload ID: 11223
  Gene Symbol: NOS1AP
  Gene Name: nitric oxide synthase 1 (neuronal) adaptor protein
  Uniprot ID: O75052
  ENSP ID: ENSP00000431586
MPSKTKYNLVDDGHDLRIPLHNEDAFQHGICFEAKYVGSLDVPRPNSRVEIVAAMRRIRYEFKAKNIKKKKVSIMVSVDGVKVILKKKKKKKEWTWDESKMLVMQDPIYRIFYVSHDSQDLKIFSYIARDGASNIFRCNVFKSKKKSQAMRIVRTVGQAFEVCHKLSLQHTQQNADGQEDGESERNSNSSGDPGRQLTGAERASTATAEETDIDAVEVPLPGNDVLEFSRGVTDLDAVGKEGGSHTGSKVSHPQEPMLTASPRMLLPSSSSKPPGLGTETPLSTHHQMQLLQQLLQQQQQQTQVAVAQVHLLKDQLAAEAAARLEAQARVHQLLLQNKDMLQHISLLVKQVQELELKLSGQNAMGSQDSLLEITFRSGALPVLCDPTTPKPEDLHSPPLGAGLADFAHPAGSPLGRRDCLVKLECFRFLPPEDTPPPAQGEALLGGLELIKFRESGIASEYESNTDESEERDSWSQEELPRLLNVLQRQELGDGLDDEIAV

SEQ ID NO: 57094 - protein, 211 aa, Homo sapiens
  Payload ID: 11223
  Gene Symbol: NOS1AP
  Gene Name: nitric oxide synthase 1 (neuronal) adaptor protein
  Uniprot ID: O75052
  ENSP ID: ENSP00000434988
MSLSSLCPVFSAAASSLQVHLLKDQLAAEAAARLEAQARVHQLLLQNKDMLQHISLLVKQVQELELKLSGQNAMGSQDSLLEITFRSGALPVLCDPTTPKPEDLHSPPLGAGLADFAHPAGSPLGRRDCLVKLECFRFLPPEDTPPPAQGEALLGGLELIKFRESGIASEYESNTDESEERDSWSQEELPRLLNVLQRQELGDGLDDEIAV

SEQ ID NO: 57095 - protein, 81 aa, Homo sapiens
  Payload ID: 11223
  Gene Symbol: NOS1AP
  Gene Name: nitric oxide synthase 1 (neuronal) adaptor protein
  ENSP ID: ENSP00000435711
MLQHISLLVKQVQELELKLSGQNAMGSQDSLLEITFRSGALPVLCDPTTPKPEDLHSPPLGAGLADFAHPAGSPLGRRDCL

SEQ ID NO: 57096 - protein, 1153 aa, Homo sapiens
  Payload ID: 11224
  Gene Symbol: NOS2
  Gene Name: nitric oxide synthase 2, inducible
  Uniprot ID: P35228
  ENSP ID: ENSP00000327251
MACPWKFLFKTKFHQYAMNGEKDINNNVEKAPCATSSPVTQDDLQYHNLSKQQNESPQPLVETGKKSPESLVKLDATPLSSPRHVRIKNWGSGMTFQDTLHHKAKGILTCRSKSCLGSIMTPKSLTRGPRDKPTPPDELLPQAIEFVNQYYGSFKEAKIEEHLARVEAVTKEIETTGTYQLTGDELIFATKQAWRNAPRCIGRIQWSNLQVFDARSCSTAREMFEHICRHVRYSTNNGNIRSAITVFPQRSDGKHDFRVWNAQLIRYAGYQMPDGSIRGDPANVEFTQLCIDLGWKPKYGRFDVVPLVLQANGRDPELFEIPPDLVLEVAMEHPKYEWFRELELKWYALPAVANMLLEVGGLEFPGCPFNGWYMGTEIGVRDFCDVQRYNILEEVGRRMGLETHKLASLWKDQAVVEINIAVLHSFQKQNVTIMDHHSAAESFMKYMQNEYRSRGGCPADWIWLVPPMSGSITPVFHQEMLNYVLSPFYYYQVEAWKTHVWQDEKRRPKRREIPLKVLVKAVLFACMLMRKTMASRVRVTILFATETGKSEALAWDLGALFSCAFNPKVVCMDKYRLSCLEEERLLLVVTSTFGNGDCPGNGEKLKKSLFMLKELNNKFRYAVFGLGSSMYPRFCAFAHDIDQKLSHLGASQLTPMGEGDELSGQEDAFRSWAVQTFKAACETFDVRGKQHIQIPKLYTSNVTWDPHHYRLVQDSQPLDLSKALSSMHAKNVFTMRLKSRQNLQSPTSSRATILVELSCEDGQGLNYLPGEHLGVCPGNQPALVQGILERVVDGPTPHQTVRLEALDESGSYWVSDKRLPPCSLSQALTYFLDITTPPTQLLLQKLAQVATEEPERQRLEALCQPSEYSKWKFTNSPTFLEVLEEFPSLRVSAGFLLSQLPILKPRFYSISSSRDHTPTEIHLTVAVVTYHTRDGQGPLHHGVCSTWLNSLKPQDPVPCFVRNASGFHLPEDPSHPCILIGPGTGIAPFRSFWQQRLHDSQHKGVRGGRMTLVFGCRRPDEDHIYQEEMLEMAQKGVLHAVHTAYSRLPGKPKVYVQDILRQQLASEVLRVLHKEPGHLYVCGDVRMARDVAHTLKQLVAAKLKLNEEQVEDYFFQLKSQKRYHEDIFGAVFPYEAKKDRVAVQPSSLEMSAL

SEQ ID NO: 57097 - protein, 1114 aa, Homo sapiens
  Payload ID: 11224
  Gene Symbol: NOS2
  Gene Name: nitric oxide synthase 2, inducible
  Uniprot ID: P35228
  ENSP ID: ENSP00000482291
MACPWKFLFKTKFHQYAMNGEKDINNNVEKAPCATSSPVTQDDLQYHNLSKQQNESPQPLVETGKKSPESLVKLDATPLSSPRHVRIKNWGSGMTFQDTLHHKAKGILTCRSKSCLGSIMTPKSLTRGPRDKPTPPDELLPQAIEFVNQYYGSFKEAKIEEHLARVEAVTKEIETTGTYQLTGDELIFATKQAWRNAPRCIGRIQWSNLQVFDARSCSTAREMFEHICRHVRYSTNNGNIRSAITVFPQRSDGKHDFRVWNAQLCIDLGWKPNGRDPELFEIPPDLVLEVAMEHPKYEWFRELELKWYALPAVANMLLEVGGLEFPGCPFNGWYMGTEIGVRDFCDVQRYNILEEVGRRMGLETHKLASLWKDQAVVEINIAVLHSFQKQNVTIMDHHSAAESFMKYMQNEYRSRGGCPADWIWLVPPMSGSITPVFHQEMLNYVLSPFYYYQVEAWKTHVWQDEKRRPKRREIPLKVLVKAVLFACMLMRKTMASRVRVTILFATETGKSEALAWDLGALFSCAFNPKVVCMDKYRLSCLEEERLLLVVTSTFGNGDCPGNGEKLKKSLFMLKELNNKFRYAVFGLGSSMYPRFCAFAHDIDQKLSHLGASQLTPMGEGDELSGQEDAFRSWAVQTFKAACETFDVRGKQHIQIPKLYTSNVTWDPHHYRLVQDSQPLDLSKALSSMHAKNVFTMRLKSRQNLQSPTSSRATILVELSCEDGQGLNYLPGEHLGVCPGNQPALVQGILERVVDGPTPHQTVRLEALDESGSYWVSDKRLPPCSLSQALTYFLDITTPPTQLLLQKLAQVATEEPERQRLEALCQPSEYSKWKFTNSPTFLEVLEEFPSLRVSAGFLLSQLPILKPRFYSISSSRDHTPTEIHLTVAVVTYHTRDGQGPLHHGVCSTWLNSLKPQDPVPCFVRNASGFHLPEDPSHPCILIGPGTGIAPFRSFWQQRLHDSQHKGVRGGRMTLVFGCRRPDEDHIYQEEMLEMAQKGVLHAVHTAYSRLPGKPKVYVQDILRQQLASEVLRVLHKEPGHLYVCGDVRMARDVAHTLKQLVAAKLKLNEEQVEDYFFQLKSQKRYHEDIFGAVFPYEAKKDRVAVQPSSLEMSAL

SEQ ID NO: 57098 - protein, 1203 aa, Homo sapiens
  Payload ID: 11225
  Gene Symbol: NOS3
  Gene Name: nitric oxide synthase 3 (endothelial cell)
  Uniprot ID: P29474
  ENSP ID: ENSP00000297494
MGNLKSVAQEPGPPCGLGLGLGLGLCGKQGPATPAPEPSRAPASLLPPAPEHSPPSSPLTQPPEGPKFPRVKNWEVGSITYDTLSAQAQQDGPCTPRRCLGSLVFPRKLQGRPSPGPPAPEQLLSQARDFINQYYSSIKRSGSQAHEQRLQEVEAEVAATGTYQLRESELVFGAKQAWRNAPRCVGRIQWGKLQVFDARDCRSAQEMFTYICNHIKYATNRGNLRSAITVFPQRCPGRGDFRIWNSQLVRYAGYRQQDGSVRGDPANVEITELCIQHGWTPGNGRFDVLPLLLQAPDDPPELFLLPPELVLEVPLEHPTLEWFAALGLRWYALPAVSNMLLEIGGLEFPAAPFSGWYMSTEIGTRNLCDPHRYNILEDVAVCMDLDTRTTSSLWKDKAAVEINVAVLHSYQLAKVTIVDHHAATASFMKHLENEQKARGGCPADWAWIVPPISGSLTPVFHQEMVNYFLSPAFRYQPDPWKGSAAKGTGITRKKTFKEVANAVKISASLMGTVMAKRVKATILYGSETGRAQSYAQQLGRLFRKAFDPRVLCMDEYDVVSLEHETLVLVVTSTFGNGDPPENGESFAAALMEMSGPYNSSPRPEQHKSYKIRFNSISCSDPLVSSWRRKRKESSNTDSAGALGTLRFCVFGLGSRAYPHFCAFARAVDTRLEELGGERLLQLGQGDELCGQEEAFRGWAQAAFQAACETFCVGEDAKAAARDIFSPKRSWKRQRYRLSAQAEGLQLLPGLIHVHRRKMFQATIRSVENLQSSKSTRATILVRLDTGGQEGLQYQPGDHIGVCPPNRPGLVEALLSRVEDPPAPTEPVAVEQLEKGSPGGPPPGWVRDPRLPPCTLRQALTFFLDITSPPSPQLLRLLSTLAEEPREQQELEALSQDPRRYEEWKWFRCPTLLEVLEQFPSVALPAPLLLTQLPLLQPRYYSVSSAPSTHPGEIHLTVAVLAYRTQDGLGPLHYGVCSTWLSQLKPGDPVPCFIRGAPSFRLPPDPSLPCILVGPGTGIAPFRGFWQERLHDIESKGLQPTPMTLVFGCRCSQLDHLYRDEVQNAQQRGVFGRVLTAFSREPDNPKTYVQDILRTELAAEVHRVLCLERGHMFVCGDVTMATNVLQTVQRILATEGDMELDEAGDVIGVLRDQQRYHEDIFGLTLRTQEVTSRIRTQSFSLQERQLRGAVPWAFDPPGSDTNSP

SEQ ID NO: 57099 - protein, 997 aa, Homo sapiens
  Payload ID: 11225
  Gene Symbol: NOS3
  Gene Name: nitric oxide synthase 3 (endothelial cell)
  ENSP ID: ENSP00000417143
MFTYICNHIKYATNRGNLRSAITVFPQRCPGRGDFRIWNSQLVRYAGYRQQDGSVRGDPANVEITELCIQHGWTPGNGRFDVLPLLLQAPDDPPELFLLPPELVLEVPLEHPTLEWFAALGLRWYALPAVSNMLLEIGGLEFPAAPFSGWYMSTEIGTRNLCDPHRYNILEDVAVCMDLDTRTTSSLWKDKAAVEINVAVLHSYQLAKVTIVDHHAATASFMKHLENEQKARGGCPADWAWIVPPISGSLTPVFHQEMVNYFLSPAFRYQPDPWKGSAAKGTGITRKKTFKEVANAVKISASLMGTVMAKRVKATILYGSETGRAQSYAQQLGRLFRKAFDPRVLCMDEYDVVSLEHETLVLVVTSTFGNGDPPENGESFAAALMEMSGPYNSSPRPEQHKSYKIRFNSISCSDPLVSSWRRKRKESSNTDSAGALGTLRFCVFGLGSRAYPHFCAFARAVDTRLEELGGERLLQLGQGDELCGQEEAFRGWAQAAFQAACETFCVGEDAKAAARDIFSPKRSWKRQRYRLSAQAEGLQLLPGLIHVHRRKMFQATIRSVENLQSSKSTRATILVRLDTGGQEGLQYQPGDHIGVCPPNRPGLVEALLSRVEDPPAPTEPVAVEQLEKGSPGGPPPGWVRDPRLPPCTLRQALTFFLDITSPPSPQLLRLLSTLAEEPREQQELEALSQDPRRYEEWKWFRCPTLLEVLEQFPSVALPAPLLLTQLPLLQPRYYSVSSAPSTHPGEIHLTVAVLAYRTQDGLGPLHYGVCSTWLSQLKPGDPVPCFIRGAPSFRLPPDPSLPCILVGPGTGIAPFRGFWQERLHDIESKGLQPTPMTLVFGCRCSQLDHLYRDEVQNAQQRGVFGRVLTAFSREPDNPKTYVQDILRTELAAEVHRVLCLERGHMFVCGDVTMATNVLQTVQRILATEGDMELDEAGDVIGVLRDQQRYHEDIFGLTLRTQEVTSRIRTQSFSLQERQLRGAVPWAFDPPGSDTNSP

SEQ ID NO: 57100 - protein, 306 aa, Homo sapiens
  Payload ID: 11225
  Gene Symbol: NOS3
  Gene Name: nitric oxide synthase 3 (endothelial cell)
  ENSP ID: ENSP00000418245
  MOD_RES (1)..(1): Any amino acid
XETFCVGEDAKAAARDIFSPKRSWKRQRYRLSAQAEGLQLLPGLIHVHRRKMFQATIRSVENLQSSKSTRATILVRLDTGGQEGLQYQPGDHIGVCPPNRPGLVEALLSRVEDPPAPTEPVAVEQLEKGSPGGPPPGWVRDPRLPPCTLRQALTFFLDITSPPSPQLLRLLSTLAEEPREQQELEALSQDPRRYEEWKWFRCPTLLEVLEQFPSVALPAPLLLTQLPLLQPRYYSVSSAPSTHPGEIHLTVAVLAYRTQDGLGPLHYGVCSTWLSQLKPGDPVPCFIRGLGITGVSHRARTEGEGF

SEQ ID NO: 57101 - protein, 629 aa, Homo sapiens
  Payload ID: 11225
  Gene Symbol: NOS3
  Gene Name: nitric oxide synthase 3 (endothelial cell)
  Uniprot ID: P29474
  ENSP ID: ENSP00000420215
MGNLKSVAQEPGPPCGLGLGLGLGLCGKQGPATPAPEPSRAPASLLPPAPEHSPPSSPLTQPPEGPKFPRVKNWEVGSITYDTLSAQAQQDGPCTPRRCLGSLVFPRKLQGRPSPGPPAPEQLLSQARDFINQYYSSIKRSGSQAHEQRLQEVEAEVAATGTYQLRESELVFGAKQAWRNAPRCVGRIQWGKLQVFDARDCRSAQEMFTYICNHIKYATNRGNLRSAITVFPQRCPGRGDFRIWNSQLVRYAGYRQQDGSVRGDPANVEITELCIQHGWTPGNGRFDVLPLLLQAPDDPPELFLLPPELVLEVPLEHPTLEWFAALGLRWYALPAVSNMLLEIGGLEFPAAPFSGWYMSTEIGTRNLCDPHRYNILEDVAVCMDLDTRTTSSLWKDKAAVEINVAVLHSYQLAKVTIVDHHAATASFMKHLENEQKARGGCPADWAWIVPPISGSLTPVFHQEMVNYFLSPAFRYQPDPWKGSAAKGTGITRKKTFKEVANAVKISASLMGTVMAKRVKATILYGSETGRAQSYAQQLGRLFRKAFDPRVLCMDEYDVVSLEHETLVLVVTSTFGNGDPPENGEGLTLWPRLECSSTITAHCSLNLLDSSNPPTSTSQVVGTTGACHDA

SEQ ID NO: 57102 - protein, 614 aa, Homo sapiens
  Payload ID: 11225
  Gene Symbol: NOS3
  Gene Name: nitric oxide synthase 3 (endothelial cell)
  ENSP ID: ENSP00000420551
MGNLKSVAQEPGPPCGLGLGLGLGLCGKQGPATPAPEPSRAPASLLPPAPEHSPPSSPLTQPPEGPKFPRVKNWEVGSITYDTLSAQAQQDGPCTPRRCLGSLVFPRKLQGRPSPGPPAPEQLLSQARDFINQYYSSIKRSGSQAHEQRLQEVEAEVAATGTYQLRESELVFGAKQAWRNAPRCVGRIQWGKLQVFDARDCRSAQEMFTYICNHIKYATNRGNLRSAITVFPQRCPGRGDFRIWNSQLVRYAGYRQQDGSVRGDPANVEITELCIQHGWTPGNGRFDVLPLLLQAPDDPPELFLLPPELVLEVPLEHPTLEWFAALGLRWYALPAVSNMLLEIGGLEFPAAPFSGWYMSTEIGTRNLCDPHRYNILEDVAVCMDLDTRTTSSLWKDKAAVEINVAVLHSYQLAKVTIVDHHAATASFMKHLENEQKARGGCPADWAWIVPPISGSLTPVFHQEMVNYFLSPAFRYQPDPWKGSAAKGTGITRKKTFKEVANAVKISASLMGTVMAKRVKATILYGSETGRAQSYAQQLGRLFRKAFDPRVLCMDEYDVVSLEHETLVLVVTSTFGNGDPPENGERWGFAMLPRLVSNSWVQAIHLPRPPKVLRL

SEQ ID NO: 57103 - protein, 304 aa, Homo sapiens
  Payload ID: 11226
  Gene Symbol: NOSIP
  Gene Name: nitric oxide synthase interacting protein
  ENSP ID: ENSP00000343497
MTRHGKNCTAGAVYTYHEKKKDTAASGYGTQNIRLSRDAVKDFDCCCLSLQPCHDPVVTPDGYLYEREAILEYILHQKKEIARQMKAYEKQRGTRREEQKELQRAASQDHVRGFLEKESAIVSRPLNPFTAKALSGTSPGDSDDVQPGPSVGPPSKDKDKVLPSFWIPSLTPEAKATKLEKPSRTVTCPMSGKPLRMSDLTPVHFTPLDSSVDRVGLITRSERYVCAVTRDSLSNATPCAVLRPSGAVVTLECVEKLIRKDMVDPVTGDKLTDRDIIVLQRGGTGFAGSGVKLQAEKSRPVMQA

SEQ ID NO: 57104 - protein, 96 aa, Homo sapiens
  Payload ID: 11226
  Gene Symbol: NOSIP
  Gene Name: nitric oxide synthase interacting protein
  ENSP ID: ENSP00000468974
MTRHGKNCTAGAVYTYHEKKKDTAASGYGTQNIRLSRDAVKDFDCCCLSLQPCHDPVVTPDGYLYEREAILEYILHQKKEIARQMKAYEKQRGTRR

SEQ ID NO: 57105 - protein, 301 aa, Homo sapiens
  Payload ID: 11226
  Gene Symbol: NOSIP
  Gene Name: nitric oxide synthase interacting protein
  Uniprot ID: Q9Y314
  ENSP ID: ENSP00000470034
MTRHGKNCTAGAVYTYHEKKKDTAASGYGTQNIRLSRDAVKDFDCCCLSLQPCHDPVVTPDGYLYEREAILEYILHQKKEIARQMKAYEKQRGTRREEQKELQRAASQDHVRGFLEKESAIVSRPLNPFTAKALSGTSPDDVQPGPSVGPPSKDKDKVLPSFWIPSLTPEAKATKLEKPSRTVTCPMSGKPLRMSDLTPVHFTPLDSSVDRVGLITRSERYVCAVTRDSLSNATPCAVLRPSGAVVTLECVEKLIRKDMVDPVTGDKLTDRDIIVLQRGGTGFAGSGVKLQAEKSRPVMQA

SEQ ID NO: 57106 - protein, 232 aa, Homo sapiens
  Payload ID: 11226
  Gene Symbol: NOSIP
  Gene Name: nitric oxide synthase interacting protein
  ENSP ID: ENSP00000470450
  MOD_RES (1)..(1): Any amino acid
XDTAASGYGTQNIRLSRDAVKDFDCCCLSLQPCHDPVVTPDGYLYEREAILEYILHQKKEIARQMKAYEKQRGTRREEQKELQRAASQDHVRGFLEKESAIVSRPLNPFTAKALSGTSPDDVQPGPSVGPPSKDKDKVLPSFWIPSLTPEAKATKLEKPWGCGHPRMRGEADSEGHGGPCDWRQTHRPRHHRAAAGRYRLRGLRSEAASGEITAGDAGLSVCGRPNKPAWVR

SEQ ID NO: 57107 - protein, 63 aa, Homo sapiens
  Payload ID: 11226
  Gene Symbol: NOSIP
  Gene Name: nitric oxide synthase interacting protein
  ENSP ID: ENSP00000471291
MTRHGKNCTAGAVYTYHEKKKDTAASGYGTQNIRLSRDAVKDFDCCCLSLQPCHDPVVTWLPV

SEQ ID NO: 57108 - protein, 176 aa, Homo sapiens
  Payload ID: 11226
  Gene Symbol: NOSIP
  Gene Name: nitric oxide synthase interacting protein
  ENSP ID: ENSP00000471929
MTRHGKNCTAGAVYTYHEKKKDTAASGYGTQNIRLSRDAVKDFDCCCLSLQPCHDPVVTPDGYLYEREAILEYILHQKKEIARQMKAYEKQRGTRREEQKELQRAASQDHVRGFLEKESAIVSRPLNPFTAKALSGTSPDDVQPGPSVGPPNSSVDRVGLITRSERYVCAVTRDSL

SEQ ID NO: 57109 - protein, 63 aa, Homo sapiens; identical to SEQ ID NO: 57107
  Payload ID: 11226
  Gene Symbol: NOSIP
  Gene Name: nitric oxide synthase interacting protein
  ENSP ID: ENSP00000472103

SEQ ID NO: 57110 - protein, 241 aa, Homo sapiens
  Payload ID: 11226
  Gene Symbol: NOSIP
  Gene Name: nitric oxide synthase interacting protein
  ENSP ID: ENSP00000473109
MTRHGKNCTAGAVYTYHEKKKDTAASGYGTQNIRLSRDAVKDFDCCCLSLQPCHDPVVTPDGYLYEREAILEYILHQKKEIARQMKAYEKQRGTRREEQKELQRAASQDHVRGFLEKESAIVSRPLNPFTAKALSGTSPDDVQPGPSVGPPSKDKDKVLPSFWIPSLTPEAKATKLEKPSRTVTCPMSGKPLRMSDLTPVHFTPLDSSVDRVGLITRSERYVCAVTRDSLSNATPCAVLRP

SEQ ID NO: 57111 - protein, 506 aa, Homo sapiens
  Payload ID: 11227
  Gene Symbol: NOSTRIN
  Gene Name: nitric oxide synthase trafficking
  Uniprot ID: Q8IVI9
  ENSP ID: ENSP00000318921
MRDPLTDCPYNKVYKNLKEFSQNGENFCKQVTSVLQQRANLEISYAKGLQKLASKLSKALQNTRKSCVSSAWAWASEGMKSTADLHQKLGKAIELEAIKPTYQVLNVQEKKRKSLDNEVEKTANLVISNWNQQIKAKKKLMVSTKKHEALFQLVESSKQSMTEKEKRKLLNKLTKSTEKLEKEDENYYQKNMAGYSTRLKWENTLENCYQSILELEKERIQLLCNNLNQYSQHISLFGQTLTTCHTQIHCAISKIDIEKDIQAVMEETAILSTENKSEFLLTDYFEEDPNSAMDKERRKSLLKPKLLRLQRDIEKASKDKEGLERMLKTYSSTSSFSDAKSQKDTAALMDENNLKLDLLEANSYKLSSMLAELEQRPQPSHPCSNSIFRWREKEHTHSYVKISRPFLMKRLENIVSKASSGGQSNPGSSTPAPGAAQLSSRLCKALYSFQARQDDELNLEKGDIVIIHEKKEGGWWFGSLNGKKGHFPAAYVEELPSNAGNTATKA

SEQ ID NO: 57112 - protein, 428 aa, Homo sapiens
  Payload ID: 11227
  Gene Symbol: NOSTRIN
  Gene Name: nitric oxide synthase trafficking
  Uniprot ID: Q8IVI9
  ENSP ID: ENSP00000380390
MKSTADLHQKLGKAIELEAIKPTYQVLNVQEKKRKSLDNEVEKTANLVISNWNQQIKAKKKLMVSTKKHEALFQLVESSKQSMTEKEKRKLLNKLTKSTEKLEKEDENYYQKNMAGYSTRLKWENTLENCYQSILELEKERIQLLCNNLNQYSQHISLFGQTLTTCHTQIHCAISKIDIEKDIQAVMEETAILSTENKSEFLLTDYFEEDPNSAMDKERRKSLLKPKLLRLQRDIEKASKDKEGLERMLKTYSSTSSFSDAKSQKDTAALMDENNLKLDLLEANSYKLSSMLAELEQRPQPSHPCSNSIFRWREKEHTHSYVKISRPFLMKRLENIVSKASSGGQSNPGSSTPAPGAAQLSSRLCKALYSFQARQDDELNLEKGDIVIIHEKKEGGWWFGSLNGKKGHFPAAYVEELPSNAGNTATKA

SEQ ID NO: 57113 - protein, 478 aa, Homo sapiens
  Payload ID: 11227
  Gene Symbol: NOSTRIN
  Gene Name: nitric oxide synthase trafficking
  Uniprot ID: Q8IVI9
  ENSP ID: ENSP00000380392
MRDPLTDCPYNKVYKNLKEFSQNGENFCKQVTSVLQQSCVSSAWAWASEGMKSTADLHQKLGKAIELEAIKPTYQVLNVQEKKRKSLDNEVEKTANLVISNWNQQIKAKKKLMVSTKKHEALFQLVESSKQSMTEKEKRKLLNKLTKSTEKLEKEDENYYQKNMAGYSTRLKWENTLENCYQSILELEKERIQLLCNNLNQYSQHISLFGQTLTTCHTQIHCAISKIDIEKDIQAVMEETAILSTENKSEFLLTDYFEEDPNSAMDKERRKSLLKPKLLRLQRDIEKASKDKEGLERMLKTYSSTSSFSDAKSQKDTAALMDENNLKLDLLEANSYKLSSMLAELEQRPQPSHPCSNSIFRWREKEHTHSYVKISRPFLMKRLENIVSKASSGGQSNPGSSTPAPGAAQLSSRLCKALYSFQARQDDELNLEKGDIVIIHEKKEGGWWFGSLNGKKGHFPAAYVEELPSNAGNTATKA

SEQ ID NO: 57114 - protein, 20 aa, Homo sapiens
  Payload ID: 11227
  Gene Symbol: NOSTRIN
  Gene Name: nitric oxide synthase trafficking
  ENSP ID: ENSP00000388597
  MOD_RES (1)..(1): Any amino acid
XQRDIEKASKDKEEVRHVRL

SEQ ID NO: 57115 - protein, 165 aa, Homo sapiens
  Payload ID: 11227
  Gene Symbol: NOSTRIN
  Gene Name: nitric oxide synthase trafficking
  ENSP ID: ENSP00000390383
MKSTADLHQKLGKAIELEAIKPTYQVLNVQEKKRKSLDNEVEKTANLVISNWNQQIKAKKKLMVSTKKHEALFQLVESSKQSMTEKEKRKLLNKLTKSTEKLEKEDENYYQKNMAGYSTRLKWENTLENCYQSILELEKERIQLLCNNLNQYSQHISLFGQTLTT

SEQ ID NO: 57116 - protein, 563 aa, Homo sapiens
  Payload ID: 11227
  Gene Symbol: NOSTRIN
  Gene Name: nitric oxide synthase trafficking
  Uniprot ID: Q8IVI9
  ENSP ID: ENSP00000394051
MRDPLTDCPYNKVYKNLKEFSQNGENFCKQVTSVLQQRANLEISYAKGLQKLASKLSKALQNTRKSCVSSAWAWASEGMKSTADLHQKLGKAIELEAIKPTYQVLNVQEKKRKSLDNEVEKTANLVISNWNQQIKAKKKLMVSTKKHEALFQLVESSKQSMTEKEKRKLLNKLTKSTEKLEKEDENYYQKNMAGYSTRLKWENTLENCYQVTHSICLYAFWVKRAWGKCVSDLRYQDTFLPGNLPPLWFGYDIVKRLIMRLCSVCLQSILELEKERIQLLCNNLNQYSQHISLFGQTLTTCHTQIHCAISKIDIEKDIQAVMEETAILSTENKSEFLLTDYFEEDPNSAMDKERRKSLLKPKLLRLQRDIEKASKDKEGLERMLKTYSSTSSFSDAKSQKDTAALMDENNLKLDLLEANSYKLSSMLAELEQRPQPSHPCSNSIFRWREKEHTHSYVKISRPFLMKRLENIVSKASSGGQSNPGSSTPAPGAAQLSSRLCKALYSFQARQDDELNLEKGDIVIIHEKKEGGWWFGSLNGKKGHFPAAYVEELPSNAGNTATKA

SEQ ID NO: 57117 - protein, 563 aa, Homo sapiens; identical to SEQ ID NO: 57116
  Payload ID: 11227
  Gene Symbol: NOSTRIN
  Gene Name: nitric oxide synthase trafficking
  Uniprot ID: Q8IVI9
  ENSP ID: ENSP00000402140

SEQ ID NO: 57118 - protein, 428 aa, Homo sapiens; identical to SEQ ID NO: 57112
  Payload ID: 11227
  Gene Symbol: NOSTRIN
  Gene Name: nitric oxide synthase trafficking
  Uniprot ID: Q8IVI9
  ENSP ID: ENSP00000404413

SEQ ID NO: 57119 - protein, 97 aa, Homo sapiens
  Payload ID: 11227
  Gene Symbol: NOSTRIN
  Gene Name: nitric oxide synthase trafficking
  ENSP ID: ENSP00000415337
MRDPLTDCPYNKVYKNLKEFSQNGENFCKQVTSVLQQRDGVLILLLRLECSGAIIACCSLRLLCSRTPLASASQVARTAGQTWKLAMPKDFRNWQAS

SEQ ID NO: 57120 - protein, 20 aa, Homo sapiens
  Payload ID: 11227
  Gene Symbol: NOSTRIN
  Gene Name: nitric oxide synthase trafficking
  ENSP ID: ENSP00000478446
  MOD_RES (1)..(1): Any amino acid
XQRDIEKASKDKEEVRHVRL

SEQ ID NO: 57121 - protein, 392 aa, Homo sapiens
  Payload ID: 11227
  Gene Symbol: NOSTRIN
  Gene Name: nitric oxide synthase trafficking
  ENSP ID: ENSP00000478690
LDNEVEKTANLVISNWNQQIKAKKKLMVSTKKHEALFQLVESSKQSMTEKEKRKLLNKLTKSTEKLEKEDENYYQKNMAGYSTRLKWENTLENCYQSILELEKERIQLLCNNLNQYSQHISLFGQTLTTCHTQIHCAISKIDIEKDIQAVMEETAILSTENKSEFLLTDYFEEDPNSAMDKERRKSLLKPKLLRLQRDIEKASKDKEGLERMLKTYSSTSSFSDAKSQKDTAALMDENNLKLDLLEANSYKLSSMLAELEQRPQPSHPCSNSIFRWREKEHTHSYVKISRPFLMKRLENIVSKASSGGQSNPGSSTPAPGAAQLSSRLCKALYSFQARQDDELNLEKGDIVIIHEKKEEGWWFGSLNGKKGHFPAAYVEELPSNAGNTATKA

SEQ ID NO: 57122 - protein, 392 aa, Homo sapiens; identical to SEQ ID NO: 57121
  Payload ID: 11227
  Gene Symbol: NOSTRIN
  Gene Name: nitric oxide synthase trafficking
  ENSP ID: ENSP00000480854

SEQ ID NO: 57123 - protein, 392 aa, Homo sapiens; identical to SEQ ID NO: 57121
  Payload ID: 11227
  Gene Symbol: NOSTRIN
  Gene Name: nitric oxide synthase trafficking
  ENSP ID: ENSP00000481062

SEQ ID NO: 57124 - protein, 129 aa, Homo sapiens
  Payload ID: 11227
  Gene Symbol: NOSTRIN
  Gene Name: nitric oxide synthase trafficking
  ENSP ID: ENSP00000481671
LDNEVEKTANLVISNWNQQIKAKKKLMVSTKKHEALFQLVESSKQSMTEKEKRKLLNKLTKSTEKLEKEDENYYQKNMAGYSTRLKWENTLENCYQSILELEKERIQLLCNNLNQYSQHISLFGQTLTT

SEQ ID NO: 57125 - protein, 392 aa, Homo sapiens; identical to SEQ ID NO: 57121
  Payload ID: 11227
  Gene Symbol: NOSTRIN
  Gene Name: nitric oxide synthase trafficking
  ENSP ID: ENSP00000483177

SEQ ID NO: 57126 - protein, 392 aa, Homo sapiens; identical to SEQ ID NO: 57121
  Payload ID: 11227
  Gene Symbol: NOSTRIN
  Gene Name: nitric oxide synthase trafficking
  ENSP ID: ENSP00000484358

SEQ ID NO: 57127 - protein, 449 aa, Homo sapiens
  Payload ID: 11227
  Gene Symbol: NOSTRIN
  Gene Name: nitric oxide synthase trafficking
  ENSP ID: ENSP00000484418
LDNEVEKTANLVISNWNQQIKAKKKLMVSTKKHEALFQLVESSKQSMTEKEKRKLLNKLTKSTEKLEKEDENYYQKNMAGYSTRLKWENTLENCYQVTHSICLYAFWVKRAWGKCVSDLRYQDIFLPGNLPPLWFGYDIVKRLIMRLCSVCLQSILELEKERIQLLCNNLNQYSQHISLFGQTLTTCHTQIHCAISKIDIEKDIQAVMEETAILSTENKSEFLLTDYFEEDPNSAMDKERRKSLLKPKLLRLQRDIEKASKDKEGLERMLKTYSSTSSFSDAKSQKDTAALMDENNLKLDLLEANSYKLSSMLAELEQRPQPSHPCSNSIFRWREKEHTHSYVKISRPFLMKRLENIVSKASSGGQSNPGSSTPAPGAAQLSSRLCKALYSFQARQDDELNLEKGDIVIIHEKKEEGWWFGSLNGKKGHFPAAYVEELPSNAGNTATKA

SEQ ID NO: 57128 - protein, 478 aa, Homo sapiens; identical to SEQ ID NO: 57113
  Payload ID: 11227
  Gene Symbol: NOSTRIN
  Gene Name: nitric oxide synthase trafficking
  Uniprot ID: Q8IVI9
  ENSP ID: ENSP00000485819

SEQ ID NO: 57129 - protein, 312 aa, Homo sapiens
  Payload ID: 11228
  Gene Symbol: NIT1
  Gene Name: nitrilase 1
  Uniprot ID: Q86X76
  ENSP ID: ENSP00000356986
MTFGLRKRLSEERGFSLMPRAMAISSSSCELPLVAVCQVTSTPDKQQNFKTCAELVREAARLGACLAFLPEAFDFIARDPAETLHLSEPLGGKLLEEYTQLARECGLWLSLGGFHERGQDWEQTQKIYNCHVLLNSKGAVVATYRKTHLCDVEIPGQGPMCESNSTMPGPSLESPVSTPAGKIGLAVCYDMRFPELSLALAQAGAEILTYPSAFGSITGPAHWEVLLRARAIETQCYVVAAAQCGRHHEKRASYGHSMVVDPWGTVVARCSEGPGLCLARIDLNYLRQLRRHLPVFQHRRPDLYGNLGHPLS

SEQ ID NO: 57130 - protein, 243 aa, Homo sapiens
  Payload ID: 11228
  Gene Symbol: NIT1
  Gene Name: nitrilase 1
  Uniprot ID: Q86X76
  ENSP ID: ENSP00000356987
MLGFITRPPHRFLSLLCPGLRIPQLSVLCAQPRPRAMAISSSSCELPLVAVCQVTSTPDKQQNFKTCAELVREAARLGACLAFLPEAFDFIARDPAETLHLSEPLGGKLLEEYTQLARECGLWLSLGGFHERGQDWEQTQKIYNCHVLLNSKGAVVATYRKTHLCDVEIPGQGPMCESNSTMPGPSLESPVSTPAGKIGLAVCYDMRFPELSLALAQAGAEILTYPSAFGSITGPAHWEPVSS

SEQ ID NO: 57131 - protein, 327 aa, Homo sapiens
  Payload ID: 11228
  Gene Symbol: NIT1
  Gene Name: nitrilase 1
  Uniprot ID: Q86X76
  ENSP ID: ENSP00000356988
MLGFITRPPHRFLSLLCPGLRIPQLSVLCAQPRPRAMAISSSSCELPLVAVCQVTSTPDKQQNFKTCAELVREAARLGACLAFLPEAFDFIARDPAETLHLSEPLGGKLLEEYTQLARECGLWLSLGGFHERGQDWEQTQKIYNCHVLLNSKGAVVATYRKTHLCDVEIPGQGPMCESNSTMPGPSLESPVSTPAGKIGLAVCYDMRFPELSLALAQAGAEILTYPSAFGSITGPAHWEVLLRARAIETQCYVVAAAQCGRHHEKRASYGHSMVVDPWGTVVARCSEGPGLCLARIDLNYLRQLRRHLPVFQHRRPDLYGNLGHPLS

SEQ ID NO: 57132 - protein, 291 aa, Homo sapiens
  Payload ID: 11228
  Gene Symbol: NIT1
  Gene Name: nitrilase 1
  Uniprot ID: Q86X76
  ENSP ID: ENSP00000376028
MAISSSSCELPLVAVCQVTSTPDKQQNFKTCAELVREAARLGACLAFLPEAFDFIARDPAETLHLSEPLGGKLLEEYTQLARECGLWLSLGGFHERGQDWEQTQKIYNCHVLLNSKGAVVATYRKTHLCDVEIPGQGPMCESNSTMPGPSLESPVSTPAGKIGLAVCYDMRFPELSLALAQAGAEILTYPSAFGSITGPAHWEVLLRARAIETQCYVVAAAQCGRHHEKRASYGHSMVVDPWGTVVARCSEGPGLCLARIDLNYLRQLRRHLPVFQHRRPDLYGNLGHPLS

SEQ ID NO: 57133 - protein, 276 aa, Homo sapiens
  Payload ID: 11229
  Gene Symbol: NIT2
  Gene Name: nitrilase family, member 2
  Uniprot ID: Q9NQR4
  ENSP ID: ENSP00000377696
MTSFRLALIQLQISSIKSDNVTRACSFIREAATQGAKIVSLPECFNSPYGAKYFPEYAEKIPGESTQKLSEVAKECSIYLIGGSIPEEDAGKLYNTCAVFGPDGTLLAKYRKIHLFDIDVPGKITFQESKTLSPGDSFSTFDTPYCRVGLGICYDMRFAELAQIYAQRGCQLLVYPGAFNLTTGPAHWELLQRSRAVDNQVYVATASPARDDKASYVAWGHSTVVNPWGEVLAKAGTEEAIVYSDIDLKKLAEIRQQIPVFRQKRSDLYAVEMKKP

SEQ ID NO: 57134 - protein, 92 aa, Homo sapiens
  Payload ID: 11229
  Gene Symbol: NIT2
  Gene Name: nitrilase family, member 2
  ENSP ID: ENSP00000419157
MTSFRLALIQLQISSIKSDNVTRACSFIREAATQGAKIVSLPECFNSPYGAKYFPEYAEKIPGESTQKLSEVAKECSIYLIGGNFLPTRLYP

SEQ ID NO: 57135 - protein, 265 aa, Homo sapiens
  Payload ID: 11229
  Gene Symbol: NIT2
  Gene Name: nitrilase family, member 2
  ENSP ID: ENSP00000419189
  MOD_RES (1)..(1): Any amino acid
XPRAAARVRAAGEALERRRRWLGRLSPSAPRPRRARPSLRRASAWVRDRVAGRPGALPGFQASGVAGEAQKAPGHPAAPAPAASCLTEADGRVFLHAFRLALIQLQISSIKSDNVTRACSFIREAATQGAKIVSLPECFNSPYGAKYFPEYAEKIPGESTQKLSEVAKECSIYLIGGSIPEEDAGKLYNTCAVFGPDGTLLAKYRKIHLFDIDVPGKITFQESKTLSPGDSFSTFDTPYCRVGLGICYDMRFAELAQIYAQRGEA

SEQ ID NO: 57136 - protein, 44 aa, Homo sapiens
  Payload ID: 11229
  Gene Symbol: NIT2
  Gene Name: nitrilase family, member 2
  ENSP ID: ENSP00000419239
MTCKWRGRALQLEFGPRGRLWSGAGGGSAGSAPPPRVPAVRGLP

SEQ ID NO: 57137 - protein, 411 aa, Homo sapiens
  Payload ID: 11230
  Gene Symbol: NKX1-1
  Gene Name: NK1 homeobox 1
  Uniprot ID: Q15270
  ENSP ID: ENSP00000407978
MDGRAELPAFPRAGAPPLAASDTVPAAPEGAGAARPAAPLRPTSFSVLDILDPNKFNSRRRRCVLLGPVAPAACAPCASAPCAPAPAASGRPPRAEELERRALAGAGGVGAAGAEPPNAGDPFKAGEAETNDTNGYSSGGGGHSPSADSGDEVPDDEDDDEDEAPETEAARGAEEARGGGGGLGARGSGCQGAAETDASPGATVDEAAAPGPRENSPVAQGPPGGAAAPGGAGTTPQGTATAAKPKRKRTGSDSKSGKPRRARTAFTYEQLVALENKFKATRYLSVCERLNLALSLSLTETQVKIWFQNRRTKWKKQNPGADTSAPTGGGGGPGPGAGPGTGLPGGLSPLSPSPPMGAPLGMHGPAGYPAHGPGGLVCAAQLPFLSSPAVLSPFVLGSQTYGAPAFYAPHL

SEQ ID NO: 57138 - protein, 310 aa, Homo sapiens
  Payload ID: 11231
  Gene Symbol: NKX1-2
  Gene Name: NK1 homeobox 2
  Uniprot ID: Q9UD57
  ENSP ID: ENSP00000451945
MLAWQDGGAKAAPSHHKISFSVLDILDPQKFTRAALPAVRPAPREARKSLAEVEAGKDASSRDPVRQLETPDAAGPGAGQASPLEGSEAEEEEDAEDPRRPRLRERAARLLPGLARSPDAPAGALASGEPCEDGGGGPVRSPPGSPGSPRPRRRRLEPNCAKPRRARTAFTYEQLVALENKFRATRYLSVCERLNLALSLSLTETQVKIWFQNRRTKWKKQNPGADGAAQVGGGAPQPGAAGGGGGGGSGGSPGPPGTGALHFQTFPSYSAANVLFPSAASFPLTAAAPGSPFAPFLGPSYLTPFYAPRL

SEQ ID NO: 57139 - protein, 401 aa, Homo sapiens
  Payload ID: 11232
  Gene Symbol: NKX2-1
  Gene Name: NK2 homeobox 1
  Uniprot ID: P43699
  ENSP ID: ENSP00000346879
MWSGGSGKARGWEAAAGGRSSPGRLSRRRIMSMSPKHTTPFSVSDILSPLEESYKKVGMEGGGLGAPLAAYRQGQAAPPTAAMQQHAVGHHGAVTAAYHMTAAGVPQLSHSAVGGYCNGNLGNMSELPPYQDTMRNSASGPGWYGANPDPRFPAISRFMGPASGMNMSGMGGLGSLGDVSKNMAPLPSAPRRKRRVLFSQAQVYELERRFKQQKYLSAPEREHLASMIHLTPTQVKIWFQNHRYKMKRQAKDKAAQQQLQQDSGGGGGGGGTGCPQQQQAQQQSPRRVAVPVLVKDGKPCQAGAPAPGAASLQGHAQQQAQHQAQAAQAAAAAISVGSGGAGLGAHPGHQPGSAGQSPDLAHHAASPAALQGQVSSLSHLNSSGSDYGTMSCSTLLYGRTW

SEQ ID NO: 57140 - protein, 371 aa, Homo sapiens
  Payload ID: 11232
  Gene Symbol: NKX2-1
  Gene Name: NK2 homeobox 1
  Uniprot ID: P43699
  ENSP ID: ENSP00000428341
MSMSPKHTTPFSVSDILSPLEESYKKVGMEGGGLGAPLAAYRQGQAAPPTAAMQQHAVGHHGAVTAAYHMTAAGVPQLSHSAVGGYCNGNLGNMSELPPYQDTMRNSASGPGWYGANPDPRFPAISRFMGPASGMNMSGMGGLGSLGDVSKNMAPLPSAPRRKRRVLFSQAQVYELERRFKQQKYLSAPEREHLASMIHLTPTQVKIWFQNHRYKMKRQAKDKAAQQQLQQDSGGGGGGGGTGCPQQQQAQQQSPRRVAVPVLVKDGKPCQAGAPAPGAASLQGHAQQQAQHQAQAAQAAAAAISVGSGGAGLGAHPGHQPGSAGQSPDLAHHAASPAALQGQVSSLSHLNSSGSDYGTMSCSTLLYGRTW

SEQ ID NO: 57141 - protein, 371 aa, Homo sapiens; identical to SEQ ID NO: 57140
  Payload ID: 11232
  Gene Symbol: NKX2-1
  Gene Name: NK2 homeobox 1
  Uniprot ID: P43699
  ENSP ID: ENSP00000429519

SEQ ID NO: 57142 - protein, 371 aa, Homo sapiens; identical to SEQ ID NO: 57140
  Payload ID: 11232
  Gene Symbol: NKX2-1
  Gene Name: NK2 homeobox 1
  Uniprot ID: P43699
  ENSP ID: ENSP00000429607

SEQ ID NO: 57143 - protein, 34 aa, Homo sapiens
  Payload ID: 11232
  Gene Symbol: NKX2-1
  Gene Name: NK2 homeobox 1
  ENSP ID: ENSP00000449302
MWSGGSGKARGWEAAAGGRSSPGRLSAYAPPLVA

SEQ ID NO: 57144 - protein, 273 aa, Homo sapiens
  Payload ID: 11233
  Gene Symbol: NKX2-2
  Gene Name: NK2 homeobox 2
  Uniprot ID: O95096
  ENSP ID: ENSP00000366347
MSLTNTKTGFSVKDILDLPDTNDEEGSVAEGPEEENEGPEPAKRAGPLGQGALDAVQSLPLKNPFYDSSDNPYTRWLASTEGLQYSLHGLAAGAPPQDSSSKSPEPSADESPDNDKETPGGGGDAGKKRKRRVLFSKAQTYELERRFRQQRYLSAPEREHLASLIRLTPTQVKIWFQNHRYKMKRARAEKGMEVTPLPSPRRVAVPVLVRDGKPCHALKAQDLAAATFQAGIPFSAYSAQSLQHMQYNAQYSSASTPQYPTAHPLVQAQQWTW

SEQ ID NO: 57145 - protein, 364 aa, Homo sapiens
  Payload ID: 11234
  Gene Symbol: NKX2-3
  Gene Name: NK2 homeobox 3
  Uniprot ID: Q8TAU0
  ENSP ID: ENSP00000342828
MMLPSPVTSTPFSVKDILNLEQQHQHFHGAHLQADLEHHFHSAPCMLAAAEGTQFSDGGEEDEEDEGEKLSYLNSLAAADGHGDSGLCPQGYVHTVLRDSCSEPKEHEEEPEVVRDRSQKSCQLKKSLETAGDCKAAEESERPKPRSRRKPRVLFSQAQVFELERRFKQQRYLSAPEREHLASSLKLTSTQVKIWFQNRRYKCKRQRQDKSLELGAHAPPPPPRRVAVPVLVRDGKPCVTPSAQAYGAPYSVGASAYSYNSFPAYGYGNSAAAAAAAAAAAAAAAAYSSSYGCAYPAGGGGGGGGTSAATTAMQPACSAAGGGPFVNVSNLGGFGSGGSAQPLHQGTAAGAACAQGTLQGIRAW

SEQ ID NO: 57146 - protein, 296 aa, Homo sapiens
  Payload ID: 11234
  Gene Symbol: NKX2-3
  Gene Name: NK2 homeobox 3
  ENSP ID: ENSP00000479692
MMLPSPVTSTPFSVKDILNLEQQHQHFHGAHLQADLEHHFHSAPCMLAAAEGTQFSDGGEEDEEDEGEKLSYLNSLAAADGHGDSGLCPQGYVHTVLRDSCSEPKEHEEEPEVVRDRSQKSCQLKKSLETAGDCKAAEESERPKPRSRRKPRVLFSQAQVFELERRFKQQRYLSAPEREHLASSLKLTSTQVKIWFQNRRYKCKRQRQDKSLELGAHAPPPPPRRVAVPVLVRDGKPCVTPSAQAYGAPYSVGASAYSYNSFPAYGYGNSAAAAAGPPRRPLPCSPPAARPEAAPL

SEQ ID NO: 57147 - protein, 354 aa, Homo sapiens
  Payload ID: 11235
  Gene Symbol: NKX2-4
  Gene Name: NK2 homeobox 4
  Uniprot ID: Q9H2Z4
  ENSP ID: ENSP00000345147
MSLSPKHTTPFSVSDILSPIEETYKKFSGAMDGAPPGLGAPLGAAAAYRAPPPGPSSQAATVAGMQPSHAMAGHNAAAAAAAAAAAAAAAATYHMPPGVSQFPHGAMGSYCNGGLGNMGELPAYTDGMRGGAATGWYGANPDPRYSSISRFMGPSAGVNVAGMGSLTGIADAAKSLGPLHAAAAAAAPRRKRRVLFSQAQVYELERRFKQQKYLSAPEREHLASMIHLTPTQVKIWFQNHRYKMKRQAKDKAAQQLQQEGGLGPPPPPPPSPRRVAVPVLVKDGKPCQNGASTPTPGQAGPQPPAPTPAPELEELSPSPPALHGPGGGLAALDAAAGEYSGGVLGANLLYGRTW

SEQ ID NO: 57148 - protein, 324 aa, Homo sapiens
  Payload ID: 11236
  Gene Symbol: NKX2-5
  Gene Name: NK2 homeobox 5
  Uniprot ID: P52952
  ENSP ID: ENSP00000327758
MFPSPALTPTPFSVKDILNLEQQQRSLAAAGELSARLEATLAPSSCMLAAFKPEAYAGPEAAAPGLPELRAELGRAPSPAKCASAFPAAPAFYPRAYSDPDPAKDPRAEKKELCALQKAVELEKTEADNAERPRARRRRKPRVLFSQAQVYELERRFKQQRYLSAPERDQLASVLKLTSTQVKIWFQNRRYKCKRQRQDQTLELVGLPPPPPPPARRIAVPVLVRDGKPCLGDSAPYAPAYGVGLNPYGYNAYPAYPGYGGAACSPGYSCTAAYPAGPSPAQPATAAANNNFVNFGVGDLNAVQSPGIPQSNSGVSTLHGIRAW

SEQ ID NO: 57149 - protein, 112 aa, Homo sapiens
  Payload ID: 11236
  Gene Symbol: NKX2-5
  Gene Name: NK2 homeobox 5
  Uniprot ID: P52952
  ENSP ID: ENSP00000395378
MFPSPALTPTPFSVKDILNLEQQQRSLAAAGELSARLEATLAPSSCMLAAFKPEAYAGPEAAAPGLPELRAELGRAPSPAKCASAFPAAPAFYPRAYSDPDPAKDPRAEKKA

SEQ ID NO: 57150 - protein, 151 aa, Homo sapiens
  Payload ID: 11236
  Gene Symbol: NKX2-5
  Gene Name: NK2 homeobox 5
  Uniprot ID: P52952
  ENSP ID: ENSP00000427906
MFPSPALTPTPFSVKDILNLEQQQRSLAAAGELSARLEATLAPSSCMLAAFKPEAYAGPEAAAPGLPELRAELGRAPSPAKCASAFPAAPAFYPRAYSDPDPAKDPRAEKKGCELPRGQRPPVLFSSALSQPDFLQMLSETCRWLPVHLAE

SEQ ID NO: 57151 - protein, 142 aa, Homo sapiens
  Payload ID: 11236
  Gene Symbol: NKX2-5
  Gene Name: NK2 homeobox 5
  ENSP ID: ENSP00000429905
MFPSPALTPTPFSVKDILNLEQQQRSLAAAGELSARLEATLAPSSCMLAAFKPEAYAGPEAAAPGLPELRAELGRAPSPAKCASAFPAAPAFYPRAYSDPDPAKDPRAEKKAQLAGAARAERFPRGKVRKCCATAGTREWTR

SEQ ID NO: 57152 - protein, 301 aa, Homo sapiens
  Payload ID: 11237
  Gene Symbol: NKX2-6
  Gene Name: NK2 homeobox 6
  Uniprot ID: A6NCS4
  ENSP ID: ENSP00000320089
MLLSPVTSTPFSVKDILRLERERSCPAASPHPRVRKSPENFQYLRMDAEPRGSEVHNAGGGGGDRKLDGSEPPGGPCEAVLEMDAERMGEPQPGLNAASPLGGGTRVPERGVGNSGDSVRGGRSEQPKARQRRKPRVLFSQAQVLALERRFKQQRYLSAPEREHLASALQLTSTQVKIWFQNRRYKCKRQRQDKSLELAGHPLTPRRVAVPVLVRDGKPCLGPGPGAPAFPSPYSAAVSPYSCYGGYSGAPYGAGYGTCYAGAPSGPAPHTPLASAGFGHGGQNATPQGHLAATLQGVRAW

SEQ ID NO: 57153 - protein, 239 aa, Homo sapiens
  Payload ID: 11238
  Gene Symbol: NKX2-8
  Gene Name: NK2 homeobox 8
  Uniprot ID: O15522
  ENSP ID: ENSP00000258829
MATSGRLSFTVRSLLDLPEQDAQHLPRREPEPRAPQPDPCAAWLDSERGHYPSSDESSLETSPPDSSQRPSARPASPGSDAEKRKKRRVLFSKAQTLELERRFRQQRYLSAPEREQLASLLRLTPTQVKIWFQNHRYKLKRARAPGAAESPDLAASAELHAAPGLLRRVVVPVLVRDGQPCGGGGGGEVGTAAAQEKCGAPPAAACPLPGYPAFGPGSALGLFPAYQHLASPALVSWNW

SEQ ID NO: 57154 - protein, 234 aa, Homo sapiens
  Payload ID: 11239
  Gene Symbol: NKX3-1
  Gene Name: NK3 homeobox 1
  Uniprot ID: Q99801
  ENSP ID: ENSP00000370253
MLRVPEPRPGEAKAEGAAPPTPSKPLTSFLIQDILRDGAQRQGGRTSSQRQRDPEPEPEPEPEGGRSRAGAQNDQLSTGPRAAPEEAETLAETEPERHLGSYLLDSENTSGALPRLPQTPKQPQKRSRAAFSHTQVIELERKFSHQKYLSAPERAHLAKNLKLTETQVKIWFQNRRYKTKRKQLSSELGDLEKHSSLPALKEEAFSRASLVSVYNSYPYYPYLYCVGSWSPAFW

SEQ ID NO: 57155 - protein, 159 aa, Homo sapiens
  Payload ID: 11239
  Gene Symbol: NKX3-1
  Gene Name: NK3 homeobox 1
  Uniprot ID: Q99801
  ENSP ID: ENSP00000429729
MLRVPEPRPGEAETLAETEPERHLGSYLLDSENTSGALPRLPQTPKQPQKRSRAAFSHTQVIELERKFSHQKYLSAPERAHLAKNLKLTETQVKIWFQNRRYKTKRKQLSSELGDLEKHSSLPALKEEAFSRASLVSVYNSYPYYPYLYCVGSWSPAFW

SEQ ID NO: 57156 - protein, 333 aa, Homo sapiens
  Payload ID: 11240
  Gene Symbol: NKX3-2
  Gene Name: NK3 homeobox 2
  Uniprot ID: P78367
  ENSP ID: ENSP00000371875
MAVRGANTLTSFSIQAILNKKEERGGLAAPEGRPAPGGTAASVAAAPAVCCWRLFGERDAGALGGAEDSLLASPAGTRTAAGRTAESPEGWDSDSALSEENESRRRCADARGASGAGLAGGSLSLGQPVCELAASKDLEEEAAGRSDSEMSASVSGDRSPRTEDDGVGPRGAHVSALCSGAGGGGGSGPAGVAEEEEEPAAPKPRKKRSRAAFSHAQVFELERRFNHQRYLSGPERADLAASLKLTETQVKIWFQNRRYKTKRRQMAADLLASAPAAKKVAVKVLVRDDQRQYLPGEVLRPPSLLPLQPSYYYPYYCLPGWALSTCAAAAGTQ

SEQ ID NO: 57157 - protein, 367 aa, Homo sapiens
  Payload ID: 11241
  Gene Symbol: NKX6-1
  Gene Name: NK6 homeobox 1
  Uniprot ID: P78426
  ENSP ID: ENSP00000295886
MLAVGAMEGTRQSAFLLSSPPLAALHSMAEMKTPLYPAAYPPLPAGPPSSSSSSSSSSSPSPPLGTHNPGGLKPPATGGLSSLGSPPQQLSAATPHGINDILSRPSMPVASGAALPSASPSGSSSSSSSSASASSASAAAAAAAAAAAAASSPAGLLAGLPRFSSLSPPPPPPGLYFSPSAAAVAAVGRYPKPLAELPGRTPIFWPGVMQSPPWRDARLACTPHQGSILLDKDGKRKHTRPTFSGQQIFALEKTFEQTKYLAGPERARLAYSLGMTESQVKVWFQNRRTKWRKKHAAEMATAKKKQDSETERLKGASENEEEDDDYNKPLDPNSDDEKITQLLKKHKSSSGGGGGLLLHASEPESSS

SEQ ID NO: 57158 - protein, 93 aa, Homo sapiens
  Payload ID: 11241
  Gene Symbol: NKX6-1
  Gene Name: NK6 homeobox 1
  ENSP ID: ENSP00000449761
MTESQVKVWFQNRRTKWRKKHAAEMATAKKKQDSETERLKGASENEEEDDDYNKPLDPNSDDEKITQLLKKHKSSSGGGGGLLLHASEPESSS

SEQ ID NO: 57159 - protein, 277 aa, Homo sapiens
  Payload ID: 11242
  Gene Symbol: NKX6-2
  Gene Name: NK6 homeobox 2
  Uniprot ID: Q9C056
  ENSP ID: ENSP00000357581
MDTNRPGAFVLSSAPLAALHNMAEMKTSLFPYALQGPAGFKAPALGGLGAQLPLGTPHGISDILGRPVGAAGGGLLGGLPRLNGLASSAGVYFGPAAAVARGYPKPLAELPGRPPIFWPGVVQGAPWRDPRLAGPAPAGGVLDKDGKKKHSRPTFSGQQIFALEKTFEQTKYLAGPERARLAYSLGMTESQVKVWFQNRRTKWRKRHAVEMASAKKKQDSDAEKLKVGGSDAEDDDEYNRPLDPNSDDEKITRLLKKHKPSNLALVSPCGGGAGDAL

SEQ ID NO: 57160 - protein, 265 aa, Homo sapiens
  Payload ID: 11243
  Gene Symbol: NKX6-3
  Gene Name: NK6 homeobox 3
  Uniprot ID: A6NJ46
  ENSP ID: ENSP00000428361
MESNLQGTFLLNNTPLAQFPEMKAPVCQYSVQNSFYKLSPPGLGPQLAAGTPHGITDILSRPVAAPNNSLLSGYPHVAGFGGLSSQGVYYSPQVGNFSKAGNEYPTRTRNCWADTGQDWRGGRQCSNTPDPLSDSIHKKKHTRPTFTGHQIFALEKTFEQTKYLAGPERARLAYSLGMTESQVKVWFQNRRTKWRKKSALEPSSSTPRAPGGAGAGAGGDRAPSENEDDEYNKPLDPDSDDEKIRLLLRKHRAAFSVLSLGAHSV

SEQ ID NO: 57161 - protein, 135 aa, Homo sapiens
  Payload ID: 11243
  Gene Symbol: NKX6-3
  Gene Name: NK6 homeobox 3
  Uniprot ID: A6NJ46
  ENSP ID: ENSP00000429553
MQQGQLAPGSRLCSGPWGLPELQPAAPSSSAAQLPWGESWGEEADTPACLSASGVWFQNRRTKWRKKSALEPSSSTPRAPGGAGAGAGGDRAPSENEDDEYNKPLDPDSDDEKIRLLLRKHRAAFSVLSLGAHSV

SEQ ID NO: 57162 - protein, 975 aa, Homo sapiens
  Payload ID: 11244
  Gene Symbol: NLRX1
  Gene Name: NLR family member X1
  Uniprot ID: Q86UT6
  ENSP ID: ENSP00000292199
MRWGHHLPRASWGSGFRRALQRPDDRIPFLIHWSWPLQGERPFGPPRAFIRHHGSSVDSAPPPGRHGRLFPSASATEAIQRHRRNLAEWFSRLPREERQFGPTFALDTVHVDPVIRESTPDELLRPPAELALEHQPPQAGLPPLALSQLFNPDACGRRVQTVVLYGTVGTGKSTLVRKMVLDWCYGRLPAFELLIPFSCEDLSSLGPAPASLCQLVAQRYTPLKEVLPLMAAAGSHLLFVLHGLEHLNLDFRLAGTGLCSDPEEPQEPAAIIVNLLRKYMLPQASILVTTRPSAIGRIPSKYVGRYGEICGFSDTNLQKLYFQLRLNQPYCGYAVGGSGVSATPAQRDHLVQMLSRNLEGHHQIAAACFLPSYCWLVCATLHFLHAPTPAGQTLTSIYTSFLRLNFSGETLDSTDPSNLSLMAYAARTMGKLAYEGVSSRKTYFSEEDVCGCLEAGIRTEEEFQLLHIFRRDALRFFLAPCVEPGRAGTFVFTVPAMQEYLAALYIVLGLRKTTLQKVGKEVAELVGRVGEDVSLVLGIMAKLLPLRALPLLFNLIKVVPRVFGRMVGKSREAVAQAMVLEMFREEDYYNDDVLDQMGASILGVEGPRRHPDEPPEDEVFELFPMFMGGLLSAHNRAVLAQLGCPIKNLDALENAQAIKKKLGKLGRQVLPPSELLDHLFFHYEFQNQRFSAEVLSSLRQLNLAGVRMTPVKCTVVAAVLGSGRHALDEVNLASCQLDPAGLRTLLPVFLRARKLGLQLNSLGPEACKDLRDLLLHDQCQITTLRLSNNPLTAAGVAVLMEGLAGNTSVTHLSLLHTGLGDEGLELLAAQLDRNRQLQELNVAYNGAGDTAALALARAAREHPSLELLHLYFNELSSEGRQVLRDLGGAAEGGARVVVSLTEGTAVSEYWSVILSEVQRNLNSWDRARVQRHLELLLRDLEDSRGATLNPWRKAQLLRVEGEVRALLEQLGSSGS

SEQ ID NO: 57163 - protein, 975 aa, Homo sapiens; identical to SEQ ID NO: 57162
  Payload ID: 11244
  Gene Symbol: NLRX1
  Gene Name: NLR family member X1
  Uniprot ID: Q86UT6
  ENSP ID: ENSP00000386851

SEQ ID NO: 57164 - protein, 975 aa, Homo sapiens; identical to SEQ ID NO: 57162
  Payload ID: 11244
  Gene Symbol: NLRX1
  Gene Name: NLR family member X1
  Uniprot ID: Q86UT6
  ENSP ID: ENSP00000386858

SEQ ID NO: 57165 - protein, 975 aa, Homo sapiens; identical to SEQ ID NO: 57162
  Payload ID: 11244
  Gene Symbol: NLRX1
  Gene Name: NLR family member X1
  Uniprot ID: Q86UT6
  ENSP ID: ENSP00000387334

SEQ ID NO: 57166 - protein, 151 aa, Homo sapiens
  Payload ID: 11244
  Gene Symbol: NLRX1
  Gene Name: NLR family member X1
  ENSP ID: ENSP00000400268
MRWGHHLPRASWGSGFRRALQRPDDRIPFLIHWSWPLQGERPFGPPRAFIRHHGSSVDSAPPPGRHGRLFPSASATEAIQRHRRNLAEWFSRLPREERQFGPTFALDTVHVDPVIRESTPDELLRPPAELALEHQPPQAGLPPLALSQLFN

SEQ ID NO: 57167 - protein, 127 aa, Homo sapiens
  Payload ID: 11244
  Gene Symbol: NLRX1
  Gene Name: NLR family member X1
  ENSP ID: ENSP00000402381
MRWGHHLPRASWGSGFRRALQRPDDRIPFLIHWSWPLQGERPFGPPRAFIRHHGSSVDSAPPPGRHGRLFPSASATEAIQRHRRNLAEWFSRLPREERQFGPTFALDTVHVDPVIRESTPDELLRPP

SEQ ID NO: 57168 - protein, 137 aa, Homo sapiens
  Payload ID: 11244
  Gene Symbol: NLRX1
  Gene Name: NLR family member X1
  ENSP ID: ENSP00000402801
MRWGHHLPRASWGSGFRRALQRPDDRIPFLIHWSWPLQGERPFGPPRAFIRHHGSSVDSAPPPGRHGRLFPSASATEAIQRHRRNLAEWFSRLPREERQFGPTFALDTVHVDPVIRESTPDELLRPPAELALEHQPP

SEQ ID NO: 57169 - protein, 921 aa, Homo sapiens
  Payload ID: 11244
  Gene Symbol: NLRX1
  Gene Name: NLR family member X1
  Uniprot ID: Q86UT6
  ENSP ID: ENSP00000433442
MRWGHHLPRASWGSGFRRALQRPDDRIPFLIHWSWPLQGERPFGPPRAFIRHHGSSVDSAPPPGRHGRLFPSASATEAIQRHRRNLAEWFSRLPREERQFGPTFALDTVHVDPVIRESTPDELLRPPAELALEHQPPQAGLPPLALSQLFNPDACGRRVQTVVLYGTVGTGKSTLVRKMVLDWCYGRLPAFELLIPFSCEDLSSLGPAPASLCQLVAQRYTPLKEVLPLMAAAGSHLLFVLHGLEHLNLDFRLAGTGLCSDPEEPQEPAAIIVNLLRKYMLPQASILVTTRPSAIGRIPSKYVGRYGEICGFSDTNLQKLYFQLRLNQPYCGYAVGGSGVSATPAQRDHLVQMLSRNLEGHHQIAAACFLPSYCWLVCATLHFLHAPTPAGQTLTSIYTSFLRLNFSGETLDSTDPSNLSLMAYAARTMGKLAYEGVSSRKTYFSEEDVCGCLEAGIRTEEEFQLLHIFRRDALRFFLAPCVEPGRAGTFVFTVPAMQEYLAALYIVLGLRKTTLQKVGKEVAELVGRVGEDVSLVLGIMAKLLPLRALPLLFNLIKVVPRVFGRMVGKSREAVAQAMVLEMFREEDYYNDDVLDQMGASILGVEGPRRHPDEPPEDEVFELFPMFMGGLLSAHNRAVLAQLGCPIKNLDALENAQAIKKKLGKLGRQVLPPSELLDHLFFHYEFQNQRFSAEVLSSLRQLNLAGVRMTPVKCTVVAAVLGSGRHALDEVNLASCQLDPAGLRTLLPVFLRARKLGLQLNSLGPEACKDLRDLLLHDQCQITTLRLSNNPLTAAGVAVLMEGLAGNTSVTHLSLLHTGLGDEGLELLAAQLDRNRQLQELNVAYNGAGDTAALALARAAREHPSLELLQGVAIQMCWKLPLLPYAHLWTPRMPSHWCFLLILMPPLPQWYDGLVAPRGRCT

SEQ ID NO: 57170 - protein, 1241 aa, Homo sapiens
  Payload ID: 11245
  Gene Symbol: NAIP
  Gene Name: NLR family, apoptosis inhibitory protein
  Uniprot ID: Q13075
  ENSP ID: ENSP00000424913
MPLHIGDFVWDSKVHSLQSSLNIFSLLPTKGRTEHLFFSHILSFHWPAFSSIRLELWINLRCEFLRSKKSSEEITQYIQSYKGFVDITGEHFVNSWVQRELPMASAYCNDSIFAYEELRLDSFKDWPRESAVGVAALAKAGLFYTGIKDIVQCFSCGGCLEKWQEGDDPLDDHTRCFPNCPFLQNMKSSAEVTPDLQSRGELCELLETTSESNLEDSIAVGPIVPEMAQGEAQWFQEAKNLNEQLRAAYTSASFRHMSLLDISSDLATDHLLGCDLSIASKHISKPVQEPLVLPEVFGNLNSVMCVEGEAGSGKTVLLKKIAFLWASGCCPLLNRFQLVFYLSLSSTRPDEGLASIICDQLLEKEGSVTEMCVRNIIQQLKNQVLFLLDDYKEICSIPQVIGKLIQKNHLSRTCLLIAVRTNRARDIRRYLETILEIKAFPFYNTVCILRKLFSHNMTRLRKFMVYFGKNQSLQKIQKTPLFVAAICAHWFQYPFDPSFDDVAVFKSYMERLSLRNKATAEILKATVSSCGELALKGFFSCCFEFNDDDLAEAGVDEDEDLTMCLMSKFTAQRLRPFYRFLSPAFQEFLAGMRLIELLDSDRQEHQDLGLYHLKQINSPMMTVSAYNNFLNYVSSLPSTKAGPKIVSHLLHLVDNKESLENISENDDYLKHQPEISLQMQLLRGLWQICPQAYFSMVSEHLLVLALKTAYQSNTVAACSPFVLQFLQGRTLTLGALNLQYFFDHPESLSLLRSIHFPIRGNKTSPRAHFSVLETCFDKSQVPTIDQDYASAFEPMNEWERNLAEKEDNVKSYMDMQRRASPDLSTGYWKLSPKQYKIPCLEVDVNDIDVVGQDMLEILMTVFSASQRIELHLNHSRGFIESIRPALELSKASVTKCSISKLELSAAEQELLLTLPSLESLEVSGTIQSQDQIFPNLDKFLCLKELSVDLEGNINVFSVIPEEFPNFHHMEKLLIQISAEYDPSKLVKLIQNSPNLHVFHLKCNFFSDFGSLMTMLVSCKKLTEIKFSDSFFQAVPFVASLPNFISLKILNLEGQQFPDEETSEKFAYILGSLSNLEELILPTGDGIYRVAKLIIQQCQQLHCLRVLSFFKTLNDDSVVEIAKVAISGGFQKLENLKLSINHKITEEGYRNFFQALDNMPNLQELDISRHFTECIKAQATTVKSLSQCVLRLPRLIRLNMLSWLLDADDIALLNVMKERHPQSKYLTILQKWILPFSPIIQK

SEQ ID NO: 57171 - protein, 193 aa, Homo sapiens
  Payload ID: 11245
  Gene Symbol: NAIP
  Gene Name: NLR family, apoptosis inhibitory protein
  ENSP ID: ENSP00000428226
  MOD_RES (1)..(1): Any amino acid
XISLKILNLEGQQFPDEETSEKFAYILGSLSNLEELILPTGDGIYRVAKLIIQQCQQLHCLRVLSFFKTLNDDSVVEIDGVLLCHPGWSAVVGFWLTATSTSQVQADSPASASRVAGITAKVAISGGFQKLENLKLSINHKITEEGYRNFFQALDNMPNLQELDISRHFTECIKAQATTVKSLSQCVLRLPRL

SEQ ID NO: 57172 - protein, 1241 aa, Homo sapiens; identical to SEQ ID NO: 57170
  Payload ID: 11245
  Gene Symbol: NAIP
  Gene Name: NLR family, apoptosis inhibitory protein
  Uniprot ID: Q13075
  ENSP ID: ENSP00000428363

SEQ ID NO: 57173 - protein, 1403 aa, Homo sapiens
  Payload ID: 11245
  Gene Symbol: NAIP
  Gene Name: NLR family, apoptosis inhibitory protein
  Uniprot ID: Q13075
  ENSP ID: ENSP00000428657
MATQQKASDERISQFDHNLLPELSALLGLDAVQLAKELEEEEQKERAKMQKGYNSQMRSEAKRLKTFVTYEPYSSWIPQEMAAAGFYFTGVKSGIQCFCCSLILFGAGLTRLPIEDHKRFHPDCGFLLNKDVGNIAKYDIRVKNLKSRLRGGKMRYQEEEARLASFRNWPFYVQGISPCVLSEAGFVFTGKQDTVQCFSCGGCLGNWEEGDDPWKEHAKWFPKCEFLRSKKSSEEITQYIQSYKGFVDITGEHFVNSWVQRELPMASAYCNDSIFAYEELRLDSFKDWPRESAVGVAALAKAGLFYTGIKDIVQCFSCGGCLEKWQEGDDPLDDHTRCFPNCPFLQNMKSSAEVTPDLQSRGELCELLETTSESNLEDSIAVGPIVPEMAQGEAQWFQEAKNLNEQLRAAYTSASFRHMSLLDISSDLATDHLLGCDLSIASKHISKPVQEPLVLPEVFGNLNSVMCVEGEAGSGKTVLLKKIAFLWASGCCPLLNRFQLVFYLSLSSTRPDEGLASIICDQLLEKEGSVTEMCVRNIIQQLKNQVLFLLDDYKEICSIPQVIGKLIQKNHLSRTCLLIAVRTNRARDIRRYLETILEIKAFPFYNTVCILRKLFSHNMTRLRKFMVYFGKNQSLQKIQKTPLFVAAICAHWFQYPFDPSFDDVAVFKSYMERLSLRNKATAEILKATVSSCGELALKGFFSCCFEFNDDDLAEAGVDEDEDLTMCLMSKFTAQRLRPFYRFLSPAFQEFLAGMRLIELLDSDRQEHQDLGLYHLKQINSPMMTVSAYNNFLNYVSSLPSTKAGPKIVSHLLHLVDNKESLENISENDDYLKHQPEISLQMQLLRGLWQICPQAYFSMVSEHLLVLALKTAYQSNTVAACSPFVLQFLQGRTLTLGALNLQYFFDHPESLSLLRSIHFPIRGNKTSPRAHFSVLETCFDKSQVPTIDQDYASAFEPMNEWERNLAEKEDNVKSYMDMQRRASPDLSTGYWKLSPKQYKIPCLEVDVNDIDVVGQDMLEILMTVFSASQRIELHLNHSRGFIESIRPALELSKASVTKCSISKLELSAAEQELLLTLPSLESLEVSGTIQSQDQIFPNLDKFLCLKELSVDLEGNINVFSVIPEEFPNFHHMEKLLIQISAEYDPSKLVKLIQNSPNLHVFHLKCNFFSDFGSLMTMLVSCKKLTEIKFSDSFFQAVPFVASLPNFISLKILNLEGQQFPDEETSEKFAYILGSLSNLEELILPTGDGIYRVAKLIIQQCQQLHCLRVLSFFKTLNDDSVVEIAKVAISGGFQKLENLKLSINHKITEEGYRNFFQALDNMPNLQELDISRHFTECIKAQATTVKSLSQCVLRLPRLIRLNMLSWLLDADDIALLNVMKERHPQSKYLTILQKWILPFSPIIQK

SEQ ID NO: 57174 - protein, 198 aa, Homo sapiens
  Payload ID: 11245
  Gene Symbol: NAIP
  Gene Name: NLR family, apoptosis inhibitory protein
  ENSP ID: ENSP00000429154
MATQQKASDERISQFDHNLLPELSALLGLDAVQLAKELEEEEQKERAKMQKGYNSQMRSEAKRLKTFVTYEPYSSWIPQEMAAAGFYFTGVKSGIQCFCCSLILFGAGLTRLPIEDHKRFHPDCGFLLNKDVGNIAKYDIRVKNLKSRLRGGKMRYQEEEARLASFRNWPFYVQGISPCVLSEAGFVFTAEFMEAQRL

SEQ ID NO: 57175 - protein, 1347 aa, Homo sapiens
  Payload ID: 11245
  Gene Symbol: NAIP
  Gene Name: NLR family, apoptosis inhibitory protein
  ENSP ID: ENSP00000429545
MATQQKASDERISQFDHNLLPELSALLGLDAVQLAKELEEEEQKERAKMQKGYNSQMRSEAKRLKTFVTYEPYSSWIPQEMAAAGFYFTGVKSGIQCFCCSLILFGAGLTRLPIEDHKRFHPDCGFLLNKDVGNIAKYDIRVKNLKSRLRGGKMRYQEEEARLASFRNWPFYVQGISPCVLSEAGFVFTGKQDTVQCFSCGGCLGNWEEGDDPWKEHAKWFPKCEFLRSKKSSEEITQYIQSYKGFVDITGEHFVNSWVQRELPMASAYCNDSIFAYEELRLDSFKDWPRESAVGVAALAKAGLFYTGIKDIVQCFSCGGCLEKWQEGDDPLDDHTRCFPNCPFLQNMKSSAEVTPDLQSRGELCELLETTSESNLEDSIAVGPIVPEMAQGEAQWFQEAKNLNEQLRAAYTSASFRHMSLLDISSDLATDHLLGCDLSIASKHISKPVQEPLVLPEVFGNLNSVMCVEGEAGSGKTVLLKKIAFLWASGCCPLLNRFQLVFYLSLSSTRPDEGLASIICDQLLEKEGSVTEMCVRNIIQQLKNQVLFLLDDYKEICSIPQVIGKLIQKNHLSRTCLLIAVRTNRARDIRRYLETILEIKAFPFYNTVCILRKLFSHNMTRLRKFMVYFGKNQSLQKIQKTPLFVAAICAHWFQYPFDPSFDDVAVFKSYMERLSLRNKATAEILKATVSSCGELALKGFFSCCFEFNDDDLAEAGVDEDEDLTMCLMSKFTAQRLRPFYRFLSPAFQEFLAGMRLIELLDSDRQEHQDLGLYHLKQINSPMMTVSAYNNFLNYVSSLPSTKAGPKIVSHLLHLVDNKESLENISENDDYLKHQPEISLQMQLLRGLWQICPQAYFSMVSEHLLVLALKTAYQSNTVAACSPFVLQFLQGRTLTLGALNLQYFFDHPESLSLLRSIHFPIRGNKTSPRAHFSVLETCFDKSQVPTIDQDYASAFEPMNEWERNLAEKEDNVKSYMDMQRRASPDLSTGYWKLSPKQYKIPCLEVDVNDIDVVGQDMLEILMTVFSASQRIELHLNHSRGFIESIRPALELSKASVTKCSISKLELSAAEQELLLTLPSLESLEVSGTIQSQVKLIQNSPNLHVFHLKCNFFSDFGSLMTMLVSCKKLTEIKFSDSFFQAVPFVASLPNFISLKILNLEGQQFPDEETSEKFAYILGSLSNLEELILPTGDGIYRVAKLIIQQCQQLHCLRVLSFFKTLNDDSVVEIAKVAISGGFQKLENLKLSINHKITEEGYRNFFQALDNMPNLQELDISRHFTECIKAQATTVKSLSQCVLRLPRLIRLNMLSWLLDADDIALLNVMKERHPQSKYLTILQKWILPFSPIIQK

SEQ ID NO: 57176 - protein, 4 aa, Homo sapiens
  Payload ID: 11245
  Gene Symbol: NAIP
  Gene Name: NLR family, apoptosis inhibitory protein
  ENSP ID: ENSP00000429591
AQRL

SEQ ID NO: 57177 - protein, 1403 aa, Homo sapiens; identical to SEQ ID NO: 57173
  Payload ID: 11245
  Gene Symbol: NAIP
  Gene Name: NLR family, apoptosis inhibitory protein
  Uniprot ID: Q13075
  ENSP ID: ENSP00000443944

SEQ ID NO: 57178 - protein, 1241 aa, Homo sapiens
  Payload ID: 11245
  Gene Symbol: NAIP
  Gene Name: NLR family, apoptosis inhibitory protein
  ENSP ID: ENSP00000477938
MPLHIGDFVWDSKVHSLQSSLNIFSLLPTKGRTEHLFFSHILSFHWPAFSSIRLELWINLRCEFLRSKKSSEEITQYIQSYKGFVDITGEHFVNSWVQRELPMASAYCNDSIFAYEELRLDSFKDWPRESAVGVAALAKAGLFYTGIKDIVQCFSCGGCLEKWQEGDDPLDDHTRCFPNCPFLQNMKSSAEVTPDLQSRGELCELLETTSESNLEDSIAVGPIVPEMAQGEAQWFQEAKNLNEQLRAAYTSASFRHMSLLDISSDLATDHLLGCDLSIASKHISKPVQEPLVLPEVFGNLNSVMCVEGEAGSGKTVLLKKIAFLWASGCCPLLNRFQLVFYLSLSSTRPDEGLASIICDQLLEKEGSVTEMCMRNIIQQLKNQVLFLLDDYKEICSIPQVIGKLIQKNHLSRTCLLIAVRTNRARDIRRYLETILEIKAFPFYNTVCILRKLFSHNMTRLRKFMVYFGKNQSLQKIQKTPLFVAAICAHWFQYPFDPSFDDVAVFKSYMERLSLRNKATAEILKATVSSCGELALKGFFSCCFEFNDDDLAEAGVDEDEDLTMCLMSKFTAQRLRPFYRFLSPAFQEFLAGMRLIELLDSDRQEHQDLGLYHLKQINSPMMTVSAYNNFLNYVSSLPSTKAGPKIVSHLLHLVDNKESLENISENDDYLKHQPEISLQMQLLRGLWQICPQAYFSMVSEHLLVLALKTAYQSNTVAACSPFVLQFLQGRTLTLGALNLQYFFDHPESLSLLRSIHFPIRGNKTSPRAHFSVLETCFDKSQVPTIDQDYASAFEPMNEWERNLAEKEDNVKSYMDMQRRASPDLSTGYWKLSPKQYKIPCLEVDVNDIDVVGQDMLEILMTVFSASQRIELHLNHSRGFIESIRPALELSKASVTKCSISKLELSAAEQELLLTLPSLESLEVSGTIQSQDQIFPNLDKFLCLKELSVDLEGNINVFSVIPEEFPNFHHMEKLLIQISAEYDPSKLVKLIQNSPNLHVFHLKCNFFSDFGSLMTMLVSCKKLTEIKFSDSFFQAVPFVASLPNFISLKILNLEGQQFPDEETSEKFAYILGSLSNLEELILPTGDGIYRVAKLIIQQCQQLHCLRVLSFFKTLNDDSVVEIAKVAISGGFQKLENLKLSINHKITEEGYRNFFQALDNMPNLQELDISRHFTECIKAQATTVKSLSQCVLRLPRLIRLNMLSWLLDADDIALLNVMKERHPQSKYLTILQKWILPFSPIIQK

SEQ ID NO: 57179 - protein, 1347 aa, Homo sapiens
  Payload ID: 11245
  Gene Symbol: NAIP
  Gene Name: NLR family, apoptosis inhibitory protein
  ENSP ID: ENSP00000479075
MATQQKASDERISQFDHNLLPELSALLGLDAVQLAKELEEEEQKERAKMQKGYNSQMRSEAKRLKTFVTYEPYSSWIPQEMAAAGFYFTGVKSGIQCFCCSLILFGAGLTRLPIEDHKRFHPDCGFLLNKDVGNIAKYDIRVKNLKSRLRGGKMRYQEEEARLASFRNWPFYVQGISPCVLSEAGFVFTGKQDTVQCFSCGGCLGNWEEGDDPWKEHAKWFPKCEFLRSKKSSEEITQYIQSYKGFVDITGEHFVNSWVQRELPMASAYCNDSIFAYEELRLDSFKDWPRESAVGVAALAKAGLFYTGIKDIVQCFSCGGCLEKWQEGDDPLDDHTRCFPNCPFLQNMKSSAEVTPDLQSRGELCELLETTSESNLEDSIAVGPIVPEMAQGEAQWFQEAKNLNEQLRAAYTSASFRHMSLLDISSDLATDHLLGCDLSIASKHISKPVQEPLVLPEVFGNLNSVMCVEGEAGSGKTVLLKKIAFLWASGCCPLLNRFQLVFYLSLSSTRPDEGLASIICDQLLEKEGSVTEMCMRNIIQQLKNQVLFLLDDYKEICSIPQVIGKLIQKNHLSRTCLLIAVRTNRARDIRRYLETILEIKAFPFYNTVCILRKLFSHNMTRLRKFMVYFGKNQSLQKIQKTPLFVAAICAHWFQYPFDPSFDDVAVFKSYMERLSLRNKATAEILKATVSSCGELALKGFFSCCFEFNDDDLAEAGVDEDEDLTMCLMSKFTAQRLRPFYRFLSPAFQEFLAGMRLIELLDSDRQEHQDLGLYHLKQINSPMMTVSAYNNFLNYVSSLPSTKAGPKIVSHLLHLVDNKESLENISENDDYLKHQPEISLQMQLLRGLWQICPQAYFSMVSEHLLVLALKTAYQSNTVAACSPFVLQFLQGRTLTLGALNLQYFFDHPESLSLLRSIHFPIRGNKTSPRAHFSVLETCFDKSQVPTIDQDYASAFEPMNEWERNLAEKEDNVKSYMDMQRRASPDLSTGYWKLSPKQYKIPCLEVDVNDIDVVGQDMLEILMTVFSASQRIELHLNHSRGFIESIRPALELSKASVTKCSISKLELSAAEQELLLTLPSLESLEVSGTIQSQVKLIQNSPNLHVFHLKCNFFSDFGSLMTMLVSCKKLTEIKFSDSFFQAVPFVASLPNFISLKILNLEGQQFPDEETSEKFAYILGSLSNLEELILPTGDGIYRVAKLIIQQCQQLHCLRVLSFFKTLNDDSVVEIAKVAISGGFQKLENLKLSINHKITEEGYRNFFQALDNMPNLQELDISRHFTECIKAQATTVKSLSQCVLRLPRLIRLNMLSWLLDADDIALLNVMKERHPQSKYLTILQKWILPFSPIIQK

SEQ ID NO: 57180 - protein, 193 aa, Homo sapiens; identical to SEQ ID NO: 57171
  Payload ID: 11245
  Gene Symbol: NAIP
  Gene Name: NLR family, apoptosis inhibitory protein
  ENSP ID: ENSP00000479321
  MOD_RES (1)..(1): Any amino acid

SEQ ID NO: 57181 - protein, 1241 aa, Homo sapiens; identical to SEQ ID NO: 57178
  Payload ID: 11245
  Gene Symbol: NAIP
  Gene Name: NLR family, apoptosis inhibitory protein
  ENSP ID: ENSP00000481094

SEQ ID NO: 57182 - protein, 1347 aa, Homo sapiens; identical to SEQ ID NO: 57179
  Payload ID: 11245
  Gene Symbol: NAIP
  Gene Name: NLR family, apoptosis inhibitory protein
  ENSP ID: ENSP00000483012

SEQ ID NO: 57183 - protein, 1160 aa, Homo sapiens
  Payload ID: 11245
  Gene Symbol: NAIP
  Gene Name: NLR family, apoptosis inhibitory protein
  Uniprot ID: Q13075
  ENSP ID: ENSP00000484107
MPLHIGDFVWDSKVHSLQSSLNIFSLLPTKGRTEHLFFSHILSFHWPAFSSIRLELWINLRCEFLRSKKSSEEITQYIQSYKGFVDITGEHFVNSWVQRELPMASAYCNDSIFAYEELRLDSFKDWPRESAVGVAALAKAGLFYTGIKDIVQCFSCGGCLEKWQEGDDPLDDHTRCFPNCPFLQNMKSSAEVTPDLQSRGELCELLETTSESNLEDSIAVGPIVPEMAQGEAQWFQEAKNLNEQLRAAYTSASFRHMSLLDISSDLATDHLLGCDLSIASKHISKPVQEPLVLPEVFGNLNSVMCVEGEAGSGKTVLLKKIAFLWASGCCPLLNRFQLVFYLSLSSTRPDEGLASIICDQLLEKEGSVTEMCMRNIIQQLKNQVLFLLDDYKEICSIPQVIGKLIQKNHLSRTCLLIAVRTNRARDIRRYLETILEIKAFPFYNTVCILRKLFSHNMTRLRKFMVYFGKNQSLQKIQKTPLFVAAICAHWFQYPFDPSFDDVAVFKSYMERLSLRNKATAEILKATVSSCGELALKGFFSCCFEFNDDDLAEAGVDEDEDLTMCLMSKFTAQRLRPFYRFLSPAFQEFLAGMRLIELLDSDRQEHQDLGLYHLKQINSPMMTVSAYNNFLNYVSSLPSTKAGPKIVSHLLHLVDNKESLENISENDDYLKHQPEISLQMQLLRGLWQICPQAYFSMVSEHLLVLALKTAYQSNTVAACSPFVLQFLQGRTLTLGALNLQYFFDHPESLSLLRSIHFPIRGNKTSPRAHFSVLETCFDKSQVPTIDQDYASAFEPMNEWERNLAEKEDNVKSYMDMQRRASPDLSTGYWKLSPKQYKIPCLEVDVNDIDVVGQDMLEILMTVFSASQRIELHLNHSRGFIESIRPALELSKASVTKCSISKLELSAAEQELLLTLPSLESLEVSGTIQSQDQIFPNLDKFLCLKELSVDLEGNINVFSVIPEEFPNFHHMEKLLIQISAEYDPSKLVKLIQNSPNLHVFHLKCNFFSDFGSLMTMLVSCKKLTEIKFSDSFFQAVPFVASLPNFISLKILNLEGQQFPDEETSEKFAYILGSLSNLEELILPTGDGIYRVAKLIIQQCQQLHCLRVLSFFKTLNDDSVVEIAKVAISGGFQKLENLKLSINHKITEEGYRNFFQALDNMPN

SEQ ID NO: 57184 - protein, 1403 aa, Homo sapiens
  Payload ID: 11245
  Gene Symbol: NAIP
  Gene Name: NLR family, apoptosis inhibitory protein
  Uniprot ID: Q13075
  ENSP ID: ENSP00000484731
MATQQKASDERISQFDHNLLPELSALLGLDAVQLAKELEEEEQKERAKMQKGYNSQMRSEAKRLKTFVTYEPYSSWIPQEMAAAGFYFTGVKSGIQCFCCSLILFGAGLTRLPIEDHKRFHPDCGFLLNKDVGNIAKYDIRVKNLKSRLRGGKMRYQEEEARLASFRNWPFYVQGISPCVLSEAGFVFTGKQDTVQCFSCGGCLGNWEEGDDPWKEHAKWFPKCEFLRSKKSSEEITQYIQSYKGFVDITGEHFVNSWVQRELPMASAYCNDSIFAYEELRLDSFKDWPRESAVGVAALAKAGLFYTGIKDIVQCFSCGGCLEKWQEGDDPLDDHTRCFPNCPFLQNMKSSAEVTPDLQSRGELCELLETTSESNLEDSIAVGPIVPEMAQGEAQWFQEAKNLNEQLRAAYTSASFRHMSLLDISSDLATDHLLGCDLSIASKHISKPVQEPLVLPEVFGNLNSVMCVEGEAGSGKTVLLKKIAFLWASGCCPLLNRFQLVFYLSLSSTRPDEGLASIICDQLLEKEGSVTEMCMRNIIQQLKNQVLFLLDDYKEICSIPQVIGKLIQKNHLSRTCLLIAVRTNRARDIRRYLETILEIKAFPFYNTVCILRKLFSHNMTRLRKFMVYFGKNQSLQKIQKTPLFVAAICAHWFQYPFDPSFDDVAVFKSYMERLSLRNKATAEILKATVSSCGELALKGFFSCCFEFNDDDLAEAGVDEDEDLTMCLMSKFTAQRLRPFYRFLSPAFQEFLAGMRLIELLDSDRQEHQDLGLYHLKQINSPMMTVSAYNNFLNYVSSLPSTKAGPKIVSHLLHLVDNKESLENISENDDYLKHQPEISLQMQLLRGLWQICPQAYFSMVSEHLLVLALKTAYQSNTVAACSPFVLQFLQGRTLTLGALNLQYFFDHPESLSLLRSIHFPIRGNKTSPRAHFSVLETCFDKSQVPTIDQDYASAFEPMNEWERNLAEKEDNVKSYMDMQRRASPDLSTGYWKLSPKQYKIPCLEVDVNDIDVVGQDMLEILMTVFSASQRIELHLNHSRGFIESIRPALELSKASVTKCSISKLELSAAEQELLLTLPSLESLEVSGTIQSQDQIFPNLDKFLCLKELSVDLEGNINVFSVIPEEFPNFHHMEKLLIQISAEYDPSKLVKLIQNSPNLHVFHLKCNFFSDFGSLMTMLVSCKKLTEIKFSDSFFQAVPFVASLPNFISLKILNLEGQQFPDEETSEKFAYILGSLSNLEELILPTGDGIYRVAKLIIQQCQQLHCLRVLSFFKTLNDDSVVEIAKVAISGGFQKLENLKLSINHKITEEGYRNFFQALDNMPNLQELDISRHFTECIKAQATTVKSLSQCVLRLPRLIRLNMLSWLLDADDIALLNVMKERHPQSKYLTILQKWILPFSPIIQK

SEQ ID NO: 57185 - protein, 1403 aa, Homo sapiens; identical to SEQ ID NO: 57184
  Payload ID: 11245
  Gene Symbol: NAIP
  Gene Name: NLR family, apoptosis inhibitory protein
  ENSP ID: ENSP00000484845

SEQ ID NO: 57186 - protein, 4 aa, Homo sapiens
  Payload ID: 11245
  Gene Symbol: NAIP
  Gene Name: NLR family, apoptosis inhibitory protein
  ENSP ID: ENSP00000485362
AQRL

SEQ ID NO: 57187 - protein, 198 aa, Homo sapiens; identical to SEQ ID NO: 57174
  Payload ID: 11245
  Gene Symbol: NAIP
  Gene Name: NLR family, apoptosis inhibitory protein
  ENSP ID: ENSP00000485660

SEQ ID NO: 57188 - protein, 1160 aa, Homo sapiens; identical to SEQ ID NO: 57183
  Payload ID: 11245
  Gene Symbol: NAIP
  Gene Name: NLR family, apoptosis inhibitory protein
  ENSP ID: ENSP00000485780

SEQ ID NO: 57189 - protein, 1403 aa, Homo sapiens; identical to SEQ ID NO: 57184
  Payload ID: 11245
  Gene Symbol: NAIP
  Gene Name: NLR family, apoptosis inhibitory protein
  ENSP ID: ENSP00000487347

SEQ ID NO: 57190 - protein, 198 aa, Homo sapiens; identical to SEQ ID NO: 57174
  Payload ID: 11245
  Gene Symbol: NAIP
  Gene Name: NLR family, apoptosis inhibitory protein
  ENSP ID: ENSP00000487396

SEQ ID NO: 57191 - protein, 1112 aa, Homo sapiens
  Payload ID: 11246
  Gene Symbol: NLRC3
  Gene Name: NLR family, CARD domain containing 3
  ENSP ID: ENSP00000323897
MEMDAPRPPSLAVPGAASRPGRLLDGGHGRQQVQALSSQLLEVIPDSMRKQEVRTGREAGQGHGTGSPAEQVKALMDLLAGKGSQGSQAPQALDRTPDAPLGPCSNDSRIQRHRKALLSKVGGGPELGGPWHRLASLLLVEGLTDLQLREHDFTQVEATRGGGHPARTVALDRLFLPLSRVSVPPRVSITIGVAGMGKTTLVRHFVRLWAHGQVGKDFSLVLPLTFRDLNTHEKLCADRLICSVFPHVGEPSLAVAVPARALLILDGLDECRTPLDFSNTVACTDPKKEIPVDHLITNIIRGNLFPEVSIWITSRPSASGQIPGGLVDRMTEIRGFNEEEIKVCLEQMFPEDQALLGWMLSQVQADRALYLMCTVPAFCRLTGMALGHLWRSRTGPQDAELWPPRTLCELYSWYFRMALSGEGQEKGKASPRIEQVAHGGRKMVGTLGRLAFHGLLKKKYVFYEQDMKAFGVDLALLQGAPCSCFLQREETLASSVAYCFTHLSLQEFVAAAYYYGASRRAIFDLFTESGVSWPRLGFLTHFRSAAQRAMQAEDGRLDVFLRFLSGLLSPRVNALLAGSLLAQGEHQAYRTQVAELLQGCLRPDAAVCARAINVLHCLHELQHTELARSVEEAMESGALARLTGPAHRAALAYLLQVSDACAQEANLSLSLSQGVLQSLLPQLLYCRKLRLDTNQFQDPVMELLGSVLSGKDCRIQKISLAENQISNKGAKALARSLLVNRSLTSLDLRGNSIGPQGAKALADALKINRTLTSLSLQGNTVRDDGARSMAEALASNRTLSMLHLQKNSIGPMGAQRMADALKQNRSLKELMFSSNSIGDGGAKALAEALKVNQGLESLDLQSNSISDAGVAALMGALCTNQTLLSLSLRENSISPEGAQAIAHALCANSTLKNLDLTANLLHDQGARAIAVAVRENRTLTSLHLQWNFIQAGAAQALGQALQLNRSLTSLDLQENAIGDDGACAVARALKVNTALTALYLQVASIGASGAQVLGEALAVNRTLEILDLRGNAIGVAGAKALANALKVNSSLRRLNLQENSLGMDGAICIATALSGNHRLQHINLQGNHIGDSGARMISEAIKTNAPTCTVEM

SEQ ID NO: 57192 - protein, 1065 aa, Homo sapiens
  Payload ID: 11246
  Gene Symbol: NLRC3
  Gene Name: NLR family, CARD domain containing 3
  Uniprot ID: Q7RTR2
  ENSP ID: ENSP00000352039
MRKQEVRTGREAGQGHGTGSPAEQVKALMDLLAGKGSQGSQAPQALDRTPDAPLGPCSNDSRIQRHRKALLSKVGGGPELGGPWHRLASLLLVEGLTDLQLREHDFTQVEATRGGGHPARTVALDRLFLPLSRVSVPPRVSITIGVAGMGKTTLVRHFVRLWAHGQVGKDFSLVLPLTFRDLNTHEKLCADRLICSVFPHVGEPSLAVAVPARALLILDGLDECRTPLDFSNTVACTDPKKEIPVDHLITNIIRGNLFPEVSIWITSRPSASGQIPGGLVDRMTEIRGFNEEEIKVCLEQMFPEDQALLGWMLSQVQADRALYLMCTVPAFCRLTGMALGHLWRSRTGPQDAELWPPRTLCELYSWYFRMALSGEGQEKGKASPRIEQVAHGGRKMVGTLGRLAFHGLLKKKYVFYEQDMKAFGVDLALLQGAPCSCFLQREETLASSVAYCFTHLSLQEFVAAAYYYGASRRAIFDLFTESGVSWPRLGFLTHFRSAAQRAMQAEDGRLDVFLRFLSGLLSPRVNALLAGSLLAQGEHQAYRTQVAELLQGCLRPDAAVCARAINVLHCLHELQHTELARSVEEAMESGALARLTGPAHRAALAYLLQVSDACAQEANLSLSLSQGVLQSLLPQLLYCRKLRLDTNQFQDPVMELLGSVLSGKDCRIQKISLAENQISNKGAKALARSLLVNRSLTSLDLRGNSIGPQGAKALADALKINRTLTSLSLQGNTVRDDGARSMAEALASNRTLSMLHLQKNSIGPMGAQRMADALKQNRSLKELMFSSNSIGDGGAKALAEALKVNQGLESLDLQSNSISDAGVAALMGALCTNQTLLSLSLRENSISPEGAQAIAHALCANSTLKNLDLTANLLHDQGARAIAVAVRENRTLTSLHLQWNFIQAGAAQALGQALQLNRSLTSLDLQENAIGDDGACAVARALKVNTALTALYLQVASIGASGAQVLGEALAVNRTLEILDLRGNAIGVAGAKALANALKVNSSLRRLNLQENSLGMDGAICIATALSGNHRLQHINLQGNHIGDSGARMISEAIKTNAPTCTVEM

SEQ ID NO: 57193 - protein, 1065 aa, Homo sapiens; identical to SEQ ID NO: 57192
  Payload ID: 11246
  Gene Symbol: NLRC3
  Gene Name: NLR family, CARD domain containing 3
  Uniprot ID: Q7RTR2
  ENSP ID: ENSP00000414415

SEQ ID NO: 57194 - protein, 196 aa, Homo sapiens
  Payload ID: 11246
  Gene Symbol: NLRC3
  Gene Name: NLR family, CARD domain containing 3
  ENSP ID: ENSP00000482302
  MOD_RES (1)..(1): Any amino acid
XLRGNSIGPQGAKALADALKINRTLTSLSLQGNTVRDDGARSMAEALASNRTLSMLHLQKNSIGPMGAQRMADALKQNRSLKELMFSSNSIGDGGAKALAEALKVNQGLESLDLQSNSISDAGVAALMGALCTNQTLLSLSLRENSISPEGAQAIAHALCANSTLKNLDLQWNFIQAGAAQALGQALQLNRSLTSL

SEQ ID NO: 57195 - protein, 761 aa, Homo sapiens
  Payload ID: 11246
  Gene Symbol: NLRC3
  Gene Name: NLR family, CARD domain containing 3
  Uniprot ID: Q7RTR2
  ENSP ID: ENSP00000482989
MRKQEVRTGREAGQGHGTGSPAEQVKALMDLLAGKGSQGSQAPQALDRTPDAPLGPCSNDSRIQRHRKALLSKVGGGPELGGPWHRLASLLLVEGLTDLQLREHDFTQVEATRGGGHPARTVALDRLFLPLSRVSVPPRVSITIGVAGMGKTTLVRHFVRLWAHGQVGKDFSLVLPLTFRDLNTHEKLCADRLICSVFPHVGEPSLAVAVPARALLILDGLDECRTPLDFSNTVACTDPKKEIPVDHLITNIIRGNLFPEVSIWITSRPSASGQIPGGLVDRMTEIRGFNEEEIKVCLEQMFPEDQALLGWMLSQVQADRALYLMCTVPAFCRLTGMALGHLWRSRTGPQDAELWPPRTLCELYSWYFRMALSGEGQEKGKASPRIEQVAHGGRKMVGTLGRLAFHGLLKKKYVFYEQDMKAFGVDLALLQGAPCSCFLQREETLASSVAYCFTHLSLQEFVAAAYYYGASRRAIFDLFTESGVSWPRLGFLTHFRSAAQRAMQAEDGRLDVFLRFLSGLLSPRVNALLAGSLLAQGEHQAYRTQVAELLQGCLRPDAAVCARAINVLHCLHELQHTELARSVEEAMESGALARLTGPAHRAALAYLLQVSDACAQEANLSLSLSQGVLQSLLPQLLYCRKLRLDTNQFQDPVMELLGSVLSGKDCRIQKISLAENQISNKGAKALARSLLVNRSLTSLDLRGNSIGPQGAKALADALKINRTLTSLRVKFMYHKIDCFRRVPEADACNPSTLGGQGRWIT

SEQ ID NO: 57196 - protein, 359 aa, Homo sapiens
  Payload ID: 11247
  Gene Symbol: NLRC4
  Gene Name: NLR family, CARD domain containing 4
  Uniprot ID: Q9NPP4
  ENSP ID: ENSP00000339666
MNFIKDNSRALIQRMGMTVIKQITDDLFVWNVLNREEVNIICCEKVEQDAARGIIHMILKKGSESCNLFLKSLKEWNYPLFQDLNGQSGLTDSLGNLKNLTKLIMDNIKMNEEDAIKLAEGLKNLKKMCLFHLTHLSDIGEGMDYIVKSLSSEPCDLEEIQLVSCCLSANAVKILAQNLHNLVKLSILDLSENYLEKDGNEALHELIDRMNVLEQLTALMLPWGCDVQGSLSSLLKHLEEVPQLVKLGLKNWRLTDTEIRILGAFFGKNPLKNFQQLNLAGNRVSSDGWLAFMGVFENLKQLVFFDFSTKEFLPDPALVRKLSQVLSKLTFLQEARLVGWQFDDDDLSVITGAFKLVTA

SEQ ID NO: 57197 - protein, 1024 aa, Homo sapiens
  Payload ID: 11247
  Gene Symbol: NLRC4
  Gene Name: NLR family, CARD domain containing 4
  Uniprot ID: Q9NPP4
  ENSP ID: ENSP00000354159
MNFIKDNSRALIQRMGMTVIKQITDDLFVWNVLNREEVNIICCEKVEQDAARGIIHMILKKGSESCNLFLKSLKEWNYPLFQDLNGQSLFHQTSEGDLDDLAQDLKDLYHTPSFLNFYPLGEDIDIIFNLKSTFTEPVLWRKDQHHHRVEQLTLNGLLQALQSPCIIEGESGKGKSTLLQRIAMLWGSGKCKALTKFKFVFFLRLSRAQGGLFETLCDQLLDIPGTIRKQTFMAMLLKLRQRVLFLLDGYNEFKPQNCPEIEALIKENHRFKNMVIVTTTTECLRHIRQFGALTAEVGDMTEDSAQALIREVLIKELAEGLLLQIQKSRCLRNLMKTPLFVVITCAIQMGESEFHSHTQTTLFHTFYDLLIQKNKHKHKGVAASDFIRSLDHCGDLALEGVFSHKFDFELQDVSSVNEDVLLTTGLLCKYTAQRFKPKYKFFHKSFQEYTAGRRLSSLLTSHEPEEVTKGNGYLQKMVSISDITSTYSSLLRYTCGSSVEATRAVMKHLAAVYQHGCLLGLSIAKRPLWRQESLQSVKNTTEQEILKAININSFVECGIHLYQESTSKSALSQEFEAFFQGKSLYINSGNIPDYLFDFFEHLPNCASALDFIKLDFYGGAMASWEKAAEDTGGIHMEEAPETYIPSRAVSLFFNWKQEFRTLEVTLRDFSKLNKQDIRYLGKIFSSATSLRLQIKRCAGVAGSLSLVLSTCKNIYSLMVEASPLTIEDERHITSVTNLKTLSIHDLQNQRLPGGLTDSLGNLKNLTKLIMDNIKMNEEDAIKLAEGLKNLKKMCLFHLTHLSDIGEGMDYIVKSLSSEPCDLEEIQLVSCCLSANAVKILAQNLHNLVKLSILDLSENYLEKDGNEALHELIDRMNVLEQLTALMLPWGCDVQGSLSSLLKHLEEVPQLVKLGLKNWRLTDTEIRILGAFFGKNPLKNFQQLNLAGNRVSSDGWLAFMGVFENLKQLVFFDFSTKEFLPDPALVRKLSQVLSKLTFLQEARLVGWQFDDDDLSVITGAFKLVTA

SEQ ID NO: 57198 - protein, 1024 aa, Homo sapiens; identical to SEQ ID NO: 57197
  Payload ID: 11247
  Gene Symbol: NLRC4
  Gene Name: NLR family, CARD domain containing 4
  Uniprot ID: Q9NPP4
  ENSP ID: ENSP00000385090

SEQ ID NO: 57199 - protein, 1024 aa, Homo sapiens; identical to SEQ ID NO: 57197
  Payload ID: 11247
  Gene Symbol: NLRC4
  Gene Name: NLR family, CARD domain containing 4
  Uniprot ID: Q9NPP4
  ENSP ID: ENSP00000385428

SEQ ID NO: 57200 - protein, 1866 aa, Homo sapiens
  Payload ID: 11248
  Gene Symbol: NLRC5
  Gene Name: NLR family, CARD domain containing 5
  Uniprot ID: Q86WI3
  ENSP ID: ENSP00000262510
MDPVGLQLGNKNLWSCLVRLLTKDPEWLNAKMKFFLPNTDLDSRNETLDPEQRVILQLNKLHVQGSDTWQSFIHCVCMQLEVPLDLEVLLLSTFGYDDGFTSQLGAEGKSQPESQLHHGLKRPHQSCGSSPRRKQCKKQQLELAKKYLQLLRTSAQQRYRSQIPGSGQPHAFHQVYVPPILRRATASLDTPEGAIMGDVKVEDGADVSISDLFNTRVNKGPRVTVLLGKAGMGKTTLAHRLCQKWAEGHLNCFQALFLFEFRQLNLITRFLTPSELLFDLYLSPESDHDTVFQYLEKNADQVLLIFDGLDEALQPMGPDGPGPVLTLFSHLCNGTLLPGCRVMATSRPGKLPACLPAEAAMVHMLGFDGPRVEEYVNHFFSAQPSREGALVELQTNGRLRSLCAVPALCQVACLCLHHLLPDHAPGQSVALLPNMTQLYMQMVLALSPPGHLPTSSLLDLGEVALRGLETGKVIFYAKDIAPPLIAFGATHSLLTSFCVCTGPGHQQTGYAFTHLSLQEFLAALHLMASPKVNKDTLTQYVTLHSRWVQRTKARLGLSDHLPTFLAGLASCTCRPFLSHLAQGNEDCVGAKQAAVVQVLKKLATRKLTGPKVVELCHCVDETQEPELASLTAQSLPYQLPFHNFPLTCTDLATLTNILEHREAPIHLDFDGCPLEPHCPEALVGCGQIENLSFKSRKCGDAFAEALSRSLPTMGRLQMLGLAGSKITARGISHLVKALPLCPQLKEVSFRDNQLSDQVVLNIVEVLPHLPRLRKLDLSSNSICVSTLLCLARVAVTCPTVRMLQAREADLIFLLSPPTETTAELQRAPDLQESDGQRKGAQSRSLTLRLQKCQLQVHDAEALIALLQEGPHLEEVDLSGNQLEDEGCRLMAEAASQLHIARKLDLSNNGLSVAGVHCVLRAVSACWTLAELHISLQHKTVIFMFAQEPEEQKGPQERAAFLDSLMLQMPSELPLSSRRMRLTHCGLQEKHLEQLCKALGGSCHLGHLHLDFSGNALGDEGAARLAQLLPGLGALQSLNLSENGLSLDAVLGLVRCFSTLQWLFRLDISFESQHILLRGDKTSRDMWATGSLPDFPAAAKFLGFRQRCIPRSLCLSECPLEPPSLTRLCATLKDCPGPLELQLSCEFLSDQSLETLLDCLPQLPQLSLLQLSQTGLSPKSPFLLANTLSLCPRVKKVDLRSLHHATLHFRSNEEEEGVCCGRFTGCSLSQEHVESLCWLLSKCKDLSQVDLSANLLGDSGLRCLLECLPQVPISGLLDLSHNSISQESALYLLETLPSCPRVREASVNLGSEQSFRIHFSREDQAGKTLRLSECSFRPEHVSRLATGLSKSLQLTELTLTQCCLGQKQLAILLSLVGRPAGLFSLRVQEPWADRARVLSLLEVCAQASGSVTEISISETQQQLCVQLEFPRQEENPEAVALRLAHCDLGAHHSLLVGQLMETCARLQQLSLSQVNLCEDDDASSLLLQSLLLSLSELKTFRLTSSCVSTEGLAHLASGLGHCHHLEELDLSNNQFDEEGTKALMRALEGKWMLKRLDLSHLLLNSSTLALLTHRLSQMTCLQSLRLNRNSIGDVGCCHLSEALRAATSLEELDLSHNQIGDAGVQHLATILPGLPELRKIDLSGNSISSAGGVQLAESLVLCRRLEELMLGCNALGDPTALGLAQELPQHLRVLHLPFSHLGPGGALSLAQALDGSPHLEEISLAENNLAGGVLRFCMELPLLRQIDLVSCKIDNQTAKLLTSSFTSCPALEVILLSWNLLGDEAAAELAQVLPQMGRLKRVDLEKNQITALGAWLLAEGLAQGSSIQVIRLWNNPIPCDMAQHLKSQEPRLDFAFFDNQPQAPWGT

SEQ ID NO: 57201 - protein, 1866 aa, Homo sapiens; identical to SEQ ID NO: 57200
  Payload ID: 11248
  Gene Symbol: NLRC5
  Gene Name: NLR family, CARD domain containing 5
  Uniprot ID: Q86WI3
  ENSP ID: ENSP00000389739

SEQ ID NO: 57202 - protein, 325 aa, Homo sapiens
  Payload ID: 11248
  Gene Symbol: NLRC5
  Gene Name: NLR family, CARD domain containing 5
  ENSP ID: ENSP00000437583
  MOD_RES (1)..(1): Any amino acid
XWLFRLDISFESQHILLRGDKTSRDMWATGSLPDFPAAAKFLGFRQRCIPRSLCLSECPLEPPSLTRLCATLKDCPGPLELQLSCEFLSDQSLETLLDCLPQLPQLSLLQLSQTGLSPKSPFLLANTLSLCPRVKKVDLRSLHHATLHFRSNEEEEGVCCGFTGCSLSQEHVESLCWLLSKCKDLSQVDLSANLLGDSGLRCLLECLPQVPISGLLDLSHNSISQESALYLLETLPSCPRVREASVNLGSEQSFRIHFSREDQAGKTLRLSECSFRPEHVSRLATGLSKSLQLTELTLTQCCLGQKQLAILLSLVGRPAGLFSLS

SEQ ID NO: 57203 - protein, 387 aa, Homo sapiens
  Payload ID: 11248
  Gene Symbol: NLRC5
  Gene Name: NLR family, CARD domain containing 5
  ENSP ID: ENSP00000438548
  MOD_RES (1)..(1): Any amino acid
XELPLSSRRMRLTHCGLQEKHLEQLCKALGGSCHLGHLHLDFSGNALGDEGAARLAQLLPGLGALQSLNLSENGLSLDAVLGLVRCFSTLQWLFRLDISFESQHILLRGDKTSRDMWATGSLPDFPAAAKFLGFRQRCIPRSLCLSECPLEPPSLTRLCATLKDCPGPLELQLSCEFLSDQSLETLLDCLPQLPQLSLLQLSQTGLSPKSPFLLANTLSLCPRVKKVDLRSLHHATLHFRSNEEEEGVCCGLSANLLGDSGLRCLLECLPQVPISGLLDLSHNSISQESALYLLETLPSCPRVREASVNLGSEQSFRIHFSREDQAGKTLRLSECSFRPEHVSRLATGLSKSLQLTELTLTQCCLGQKQLAILLSLVGRPAGLFSLS

SEQ ID NO: 57204 - protein, 74 aa, Homo sapiens
  Payload ID: 11248
  Gene Symbol: NLRC5
  Gene Name: NLR family, CARD domain containing 5
  ENSP ID: ENSP00000439464
MDPVGLQLGNKNLWSCLVRLLTKDPEWLNAKMKFFLPNTDLDSRNETLDPEQRVILQLNKLHVQGSDTWQSFIH

SEQ ID NO: 57205 - protein, 631 aa, Homo sapiens
  Payload ID: 11248
  Gene Symbol: NLRC5
  Gene Name: NLR family, CARD domain containing 5
  ENSP ID: ENSP00000440153
LTCTDLATLTNILEHREAPIHLDFDGCPLEPHCPEALVGCGQIENLSFKSRKCGDAFAEALSRSLPTMGRLQMLGLSSNSICVSTLLCLARVAVTCPTVRMLQAREADLIFLLSPPTETTAELQRAPDLQESDGQRKGAQSRSLTLRLQKCQLQVHDAEALIALLQEGPHLEEVDLSGNQLEDEGCRLMAEAASQLHIARKLDLSNNGLSVAGVHCVLRAVSACWTLAELHISLQHKTVIFMFAQEPEEQKGPQERAAFLDSLMLQMPSELPLSSRRMRLTHCGLQEKHLEQLCKALGGSCHLGHLHLDFSGNALGDEGAARLAQLLPGLGALQSLNLSENGLSLDAVLGLVRCFSTLQWLFRLDISFESQHILLRGDKTSSLSECPLEPPSLTRLCATLKDCPGPLELQLSCEFLSDQSLETLLDCLPQLPQLSLLQLSQTGLSPKSPFLLANTLSLCPRVKKVDLRSLHHATLHFRSNEEEEGVCCGRFTGCSLSQEHVESLCWLLSKCKDLSQVDLGSEQSFRIHFSREDQAGKTLRLSECSFRPEHVSRLATGLSKSLQLTELTLTQCCLGQKQLAILLSLVGRPAGLFSLRDSTRHTEKLSFPTLEACALGFKKKRKKERKKVSED

SEQ ID NO: 57206 - protein, 157 aa, Homo sapiens
  Payload ID: 11248
  Gene Symbol: NLRC5
  Gene Name: NLR family, CARD domain containing 5
  ENSP ID: ENSP00000440184
  MOD_RES (1)..(1): Any amino acid
XLSANLLGDSGLRCLLECLPQVPISGLLDLSHNSISQESALYLLETLPSCPRVREASVNLGSEQSFRIHFSREDQAGKTLRLSECSFRPEHVSRLATGLSKSLQLTELTLTQCCLGQKQLAILLSLVGRPAGLFSLRLHKAHRETVLPHTGGLCFGI

SEQ ID NO: 57207 - protein, 19 aa, Homo sapiens
  Payload ID: 11248
  Gene Symbol: NLRC5
  Gene Name: NLR family, CARD domain containing 5
  ENSP ID: ENSP00000441311
MDPVGLQLGNKNLWSCLVR

SEQ ID NO: 57208 - protein, 885 aa, Homo sapiens
  Payload ID: 11248
  Gene Symbol: NLRC5
  Gene Name: NLR family, CARD domain containing 5
  ENSP ID: ENSP00000441597
LTSFCVCTGPGHQQTGYAFTHLSLQEFLAALHLMASPKVNKDTLTQYVTLHSRWVQRTKARLGLSDHLPTFLAGLASCTCRPFLSHLAQGNEDCVGAKQAAVVQVLKKLATRKLTGPKVVELCHCVDETQEPELASLTAQSLPYQLPFHNFPLTCTDLATLTNILEHREAPIHLDFDGCPLEPHCPEALVGCGQIENLSFKSRKCGDAFAEALSRSLPTMGRLQMLGLAGSKITARGISHLVKALPLCPQLKEVSFRDNQLSDQVVLNIVEVLPHLPRLRKLDLSSNSICVSTLLCLARVAVTCPTVRMLQAREADLIFLLSPPTETTAELQRAPDLQESDGQRKGAQSRSLTLRLQKCQLQVHDAEALIALLQEGPHLEEVDLSGNQLEDEGCRLMAEAASQLHIARKLDLSNNGLSVAGVHCVLRAVSACWTLAELHISLQHKTVIFMFAQEPEEQKGPQERAAFLDSLMLQMPSELPLSSRRMRLTHCGLQEKHLEQLCKALGGSCHLGHLHLDFSGNALGDEGAARLAQLLPGLGALQSLNLSENGLSLDAVLGLVRCFSTLQWLFRLDISFESQHILLRGDKTSSLSECPLEPPSLTRLCATLKDCPGPLELQLSCEFLSDQSLETLLDCLPQLPQLSLLQLSQTGLSPKSPFLLANTLSLCPRVKKVDLRSLHHATLHFRSNEEEEGVCCGFTGCSLSQEHVESLCWLLSKCKDLSQVDLSANLLGDSGLRCLLECLPQVPISGLLDLSHNSISQESALYLLETLPSCPRVREASVNLGSEQSFRIHFSREDQAGKTLRLSECSFRPEHVSRLATGLSKSLQLTELTLTQCCLGQKQLAILLSLVGRPAGLFSLRDSTRHTEKLSFPTLEACALGFKKK

SEQ ID NO: 57209 - protein, 720 aa, Homo sapiens
  Payload ID: 11248
  Gene Symbol: NLRC5
  Gene Name: NLR family, CARD domain containing 5
  Uniprot ID: Q86WI3
  ENSP ID: ENSP00000441679
MDPVGLQLGNKNLWSCLVRLLTKDPEWLNAKMKFFLPNTDLDSRNETLDPEQRVILQLNKLHVQGSDTWQSFIHCVCMQLEVPLDLEVLLLSTFGYDDGFTSQLGAEGKSQPESQLHHGLKRPHQSCGSSPRRKQCKKQQLELAKKYLQLLRTSAQQRYRSQIPGSGQPHAFHQVYVPPILRRATASLDTPEGAIMGDVKVEDGADVSISDLFNTRVNKGPRVTVLLGKAGMGKTTLAHRLCQKWAEGHLNCFQALFLFEFRQLNLITRFLTPSELLFDLYLSPESDHDTVFQYLEKNADQVLLIFDGLDEALQPMGPDGPGPVLTLFSHLCNGTLLPGCRVMATSRPGKLPACLPAEAAMVHMLGFDGPRVEEYVNHFFSAQPSREGALVELQTNGRLRSLCAVPALCQVACLCLHHLLPDHAPGQSVALLPNMTQLYMQMVLALSPPGHLPTSSLLDLGEVALRGLETGKVIFYAKDIAPPLIAFGATHSLLTSFCVCTGPGHQQTGYAFTHLSLQEFLAALHLMASPKVNKDTLTQYVTLHSRWVQRTKARLGLSDHLPTFLAGLASCTCRPFLSHLAQGNEDCVGAKQAAVVQVLKKLATRKLTGPKVVELCHCVDETQEPELASLTAQSLPYQLPFHNFPLTCTDLATLTNILEHREAPIHLDFDGCPLEPHCPEALVGCGQIENLSFKSRKCGDAFAEALSRSLPTMGRLQMLG

SEQ ID NO: 57210 - protein, 1837 aa, Homo sapiens
  Payload ID: 11248
  Gene Symbol: NLRC5
  Gene Name: NLR family, CARD domain containing 5
  Uniprot ID: Q86WI3
  ENSP ID: ENSP00000441727
MDPVGLQLGNKNLWSCLVRLLTKDPEWLNAKMKFFLPNTDLDSRNETLDPEQRVILQLNKLHVQGSDTWQSFIHCVCMQLEVPLDLEVLLLSTFGYDDGFTSQLGAEGKSQPESQLHHGLKRPHQSCGSSPRRKQCKKQQLELAKKYLQLLRTSAQQRYRSQIPGSGQPHAFHQVYVPPILRRATASLDTPEGAIMGDVKVEDGADVSISDLFNTRVNKGPRVTVLLGKAGMGKTTLAHRLCQKWAEGHLNCFQALFLFEFRQLNLITRFLTPSELLFDLYLSPESDHDTVFQYLEKNADQVLLIFDGLDEALQPMGPDGPGPVLTLFSHLCNGTLLPGCRVMATSRPGKLPACLPAEAAMVHMLGFDGPRVEEYVNHFFSAQPSREGALVELQTNGRLRSLCAVPALCQVACLCLHHLLPDHAPGQSVALLPNMTQLYMQMVLALSPPGHLPTSSLLDLGEVALRGLETGKVIFYAKDIAPPLIAFGATHSLLTSFCVCTGPGHQQTGYAFTHLSLQEFLAALHLMASPKVNKDTLTQYVTLHSRWVQRTKARLGLSDHLPTFLAGLASCTCRPFLSHLAQGNEDCVGAKQAAVVQVLKKLATRKLTGPKVVELCHCVDETQEPELASLTAQSLPYQLPFHNFPLTCTDLATLTNILEHREAPIHLDFDGCPLEPHCPEALVGCGQIENLSFKSRKCGDAFAEALSRSLPTMGRLQMLGLAGSKITARGISHLVKALPLCPQLKEVSFRDNQLSDQVVLNIVEVLPHLPRLRKLDLSSNSICVSTLLCLARVAVTCPTVRMLQAREADLIFLLSPPTETTAELQRAPDLQESDGQRKGAQSRSLTLRLQKCQLQVHDAEALIALLQEGPHLEEVDLSGNQLEDEGCRLMAEAASQLHIARKLDLSNNGLSVAGVHCVLRAVSACWTLAELHISLQHKTVIFMFAQEPEEQKGPQERAAFLDSLMLQMPSELPLSSRRMRLTHCGLQEKHLEQLCKALGGSCHLGHLHLDFSGNALGDEGAARLAQLLPGLGALQSLNLSENGLSLDAVLGLVRCFSTLQWLFRLDISFESQHILLRGDKTSRDMWATGSLPDFPAAAKFLGFRQRCIPRSLCLSECPLEPPSLTRLCATLKDCPGPLELQLSCEFLSDQSLETLLDCLPQLPQLSLLQLSQTGLSPKSPFLLANTLSLCPRVKKVDLRSLHHATLHFRSNEEEEGVCCGLSANLLGDSGLRCLLECLPQVPISGLLDLSHNSISQESALYLLETLPSCPRVREASVNLGSEQSFRIHFSREDQAGKTLRLSECSFRPEHVSRLATGLSKSLQLTELTLTQCCLGQKQLAILLSLVGRPAGLFSLRVQEPWADRARVLSLLEVCAQASGSVTEISISETQQQLCVQLEFPRQEENPEAVALRLAHCDLGAHHSLLVGQLMETCARLQQLSLSQVNLCEDDDASSLLLQSLLLSLSELKTFRLTSSCVSTEGLAHLASGLGHCHHLEELDLSNNQFDEEGTKALMRALEGKWMLKRLDLSHLLLNSSTLALLTHRLSQMTCLQSLRLNRNSIGDVGCCHLSEALRAATSLEELDLSHNQIGDAGVQHLATILPGLPELRKIDLSGNSISSAGGVQLAESLVLCRRLEELMLGCNALGDPTALGLAQELPQHLRVLHLPFSHLGPGGALSLAQALDGSPHLEEISLAENNLAGGVLRFCMELPLLRQIDLVSCKIDNQTAKLLTSSFTSCPALEVILLSWNLLGDEAAAELAQVLPQMGRLKRVDLEKNQITALGAWLLAEGLAQGSSIQVIRLWNNPIPCDMAQHLKSQEPRLDFAFFDNQPQAPWGT

SEQ ID NO: 57211 - protein, 1180 aa, Homo sapiens
  Payload ID: 11248
  Gene Symbol: NLRC5
  Gene Name: NLR family, CARD domain containing 5
  ENSP ID: ENSP00000442906
  MOD_RES (1)..(1): Any amino acid
XHLNCFQALFLFEFRQLNLITRFLTPSELLFDLYLSPESDHDTVFQYLEKNADQVLLIFDGLDEALQPMGPDGPGPVLTLFSHLCNGTLLPGCRVMATSRPGKLPACLPAEAAMVHMLGFDGPRVEEYVNHFFSAQPSREGALVELQTNGRLRSLCAVPALCQVACLCLHHLLPDHAPGQSVALLPNMTQLYMQMVLALSPPGHLPTSSLLDLGEVALRGLETGKVIFYAKDIAPPLIAFGATHSLLTSFCVCTGPGHQQTGYAFTHLSLQEFLAALHLMASPKVNKDTLTQYVTLHSRWVQRTKARLGLSDHLPTFLAGLASCTCRPFLSHLAQGNEDCVGAKQAAVVQVLKKLATRKLTGPKVVELCHCVDETQEPELASLTAQSLPYQLPFHNFPLTCTDLATLTNILEHREAPIHLDFDGCPLEPHCPEALVGCGQIENLSFKSRKCGDAFAEALSRSLPTMGRLQMLGLAGSKITARGISHLVKALPLCPQLKEVSFRDNQLSDQVVLNIVEVLPHLPRLRKLDLSSNSICVSTLLCLARVAVTCPTVRMLQAREADLIFLLSPPTETTAELQRAPDLQESDGQRKGAQSRSLTLRLQKCQLQVHDAEALIALLQEGPHLEEVDLSGNQLEDEGCRLMAEAASQLHIARKLDLSNNGLSVAGVHCVLRAVSACWTLAELHISLQHKTVIFMFAQEPEEQKGPQERAAFLDSLMLQMPSELPLSSRRMRLTHCGLQEKHLEQLCKALGGSCHLGHLHLDFSGNALGDEGAARLAQLLPGLGALQSLNLSENGLSLDAVLGLVRCFSTLQWLFRLDISFESQHILLRGDKTSRDMWATGSLPDFPAAAKFLGFRQRCIPRSLCLSECPLEPPSLTRLCATLKDCPGPLELQLSCEFLSDQSLETLLDCLPQLPQLSLLQLSQTGLSPKSPFLLANTLSLCPRVKKVDLRSLHHATLHFRSNEEEEGVCCGFTGCSLSQEHVESLCWLLSKCKDLSQVDLSANLLGDSGLRCLLECLPQVPISGLLDLSHNSISQESALYLLETLPSCPRVREASVNLGSEQSFRIHFSREDQAGKTLRLSECSFRPEHVSRLATGLSKSLQLTELTLTQCCLGQKQLAILLSLVGRPAGLFSLRDSTRHTEKLSFPTLEACALGFKKKRKKERKKVSEDTELRTKIN

SEQ ID NO: 57212 - protein, 1057 aa, Homo sapiens
  Payload ID: 11248
  Gene Symbol: NLRC5
  Gene Name: NLR family, CARD domain containing 5
  ENSP ID: ENSP00000443825
  MOD_RES (1)..(1): Any amino acid
XSELLFDLYLSPESDHDTVFQYLEKNADQVLLIFDGLDEALQPMGPDGPGPVLTLFSHLCNGTLLPGCRVMATSRPGKLPACLPAEAAMVHMLGFDGPRVEEYVNHFFSAQPSREGALVELQTNGRLRSLCAVPALCQVACLCLHHLLPDHAPGQSVALLPNMTQLYMQMVLALSPPGHLPTSSLLDLGEVALRGLETGKVIFYAKDIAPPLIAFGATHSLLTSFCVCTGPGHQQTGYAFTHLSLQEFLAALHLMASPKVNKDTLTQYVTLHSRWVQRTKARLGLSDHLPTFLAGLASCTCRPFLSHLAQGNEDCVGAKQAAVVQVLKKLATRKLTGPKVVELCHCVDETQEPELASLTAQSLPYQLPFHNFPLTCTDLATLTNILEHREAPIHLDFDGCPLEPHCPEALVGCGQIENLSFKSRKCGDAFAEALSRSLPTMGRLQMLGLAGSKITARGISHLVKALPLCPQLKEVSFRDNQLSDQVVLNIVEVLPHLPRLRKLDLSSNSICVSTLLCLARVAVTCPTVRMLQAREADLIFLLSPPTETTAELQRAPDLQESDGQRKGAQSRSLTLRLQKCQLQVHDAEALIALLQEGPHLEEVDLSGNQLEDEGCRLMAEAASQLHIARKLDLSNNGLSVAGVHCVLRAVSACWTLAELHISLQHKTVIFMFAQEPEEQKGPQERAAFLDSLMLQMPSELPLSSRRMRLTHCGLQEKHLEQLCKALGGSCHLGHLHLDFSGNALGDEGAARLAQLLPGLGALQSLNLSENGLSLDAVLGLVRCFSTLQWLFRLDISFESQHILLRGDKTSRDMWATGSLPDFPAAAKFLGFRQRCIPRSLCLSECPLEPPSLTRLCATLKDCPGPLELQLSCEFLSDQSLETLLDCLPQLPQLSLLQLSQTGLSPKSPFLLANTLSLCPRVKKVDLRSLHHATLHFRSNEEEEGVCCGRFTGCSLSQEHVESLCWLLSKCKDLSQVDLSANLLGDSGLRCLLECLPQVPISGLLDLSHNSISQESALYLLETLPSCPRVREASVKCLGSWHVWAPCFPRPFSLQPGL

SEQ ID NO: 57213 - protein, 702 aa, Homo sapiens
  Payload ID: 11248
  Gene Symbol: NLRC5
  Gene Name: NLR family, CARD domain containing 5
  ENSP ID: ENSP00000444773
QKCQLQVHDAEALIALLQEGPHLEEVDLSGNQLEDEGCRLMAEAASQLHIARKLDLSNNGLSVAGVHCVLRAVSACWTLAELHISLQHKTVIFMFAQEPEEQKGPQERAAFLDSLMLQMPSELPLSSRRMRLTHCGLQEKHLEQLCKALGGSCHLGHLHLDFSGNALGDEGAARLAQLLPGLGALQSLNLSENGLSLDAVLGLVRCFSTLQWLFRLDISFESQHILLRGDKTSRDMWATGSLPDFPAAAKFLGFRQRCIPRSLCLSECPLEPPSLTRLCATLKDCPGPLELQLSCEFLSDQSLETLLDCLPQLPQLSLLQLSQTGLSPKSPFLLANTLSLCPRVKKVDLRSLHHATLHFRSNEEEEGVCCGRFTGCSLSQEHVESLCWLLSKCKDLSQVDLSANLLGDSGLRCLLECLPQVPISGLLDLSHNSISQESALYLLETLPSCPRVREASVNLGSEQSFRIHFSREDQAGKTLRLSECSFRPEHVSRLATGLSKSLQLTELTLTQCCLGQKQLAILLSLVGRPAGLFSLRVQEPWADRARVLSLLEVCAQASGSVTEISISETQQQLCVQLEFPRQEENPEAVALRLAHCDLGAHHSLLVGQLMETCARLQQLSLSQVNLCEDDDASSLLLQSLLLSLSELKTFRIQSSQDPGRLLPDLLPFDPHQADLQLCEHRGPRPPGIWSGPLPPLGGAGLV

SEQ ID NO: 57214 - protein, 110 aa, Homo sapiens
  Payload ID: 11248
  Gene Symbol: NLRC5
  Gene Name: NLR family, CARD domain containing 5
  ENSP ID: ENSP00000444960
  MOD_RES (1)..(1): Any amino acid
XASGLGHCHHLEELDLSNNQFDEEGTKALMRALEGKWMLKRLDLSHLLLNSSTLALLTHRLSQMTCLQSLSLTLSPRLECSGMISLHCNLCLLGSSDSGASAAQVAGITD

SEQ ID NO: 57215 - protein, 1375 aa, Homo sapiens
  Payload ID: 11249
  Gene Symbol: NLRP1
  Gene Name: NLR family, pyrin domain containing 1
  Uniprot ID: Q9C000
  ENSP ID: ENSP00000262467
MAGGAWGRLACYLEFLKKEELKEFQLLLANKAHSRSSSGETPAQPEKTSGMEVASYLVAQYGEQRAWDLALHTWEQMGLRSLCAQAQEGAGHSPSFPYSPSEPHLGSPSQPTSTAVLMPWIHELPAGCTQGSERRVLRQLPDTSGRRWREISASLLYQALPSSPDHESPSQESPNAPTSTAVLGSWGSPPQPSLAPREQEAPGTQWPLDETSGIYYTEIREREREKSEKGRPPWAAVVGTPPQAHTSLQPHHHPWEPSVRESLCSTWPWKNEDFNQKFTQLLLLQRPHPRSQDPLVKRSWPDYVEENRGHLIEIRDLFGPGLDTQEPRIVILQGAAGIGKSTLARQVKEAWGRGQLYGDRFQHVFYFSCRELAQSKVVSLAELIGKDGTATPAPIRQILSRPERLLFILDGVDEPGWVLQEPSSELCLHWSQPQPADALLGSLLGKTILPEASFLITARTTALQNLIPSLEQARWVEVLGFSESSRKEYFYRYFTDERQAIRAFRLVKSNKELWALCLVPWVSWLACTCLMQQMKRKEKLTLTSKTTTTLCLHYLAQALQAQPLGPQLRDLCSLAAEGIWQKKTLFSPDDLRKHGLDGAIISTFLKMGILQEHPIPLSYSFIHLCFQEFFAAMSYVLEDEKGRGKHSNCIIDLEKTLEAYGIHGLFGASTTRFLLGLLSDEGEREMENIFHCRLSQGRNLMQWVPSLQLLLQPHSLESLHCLYETRNKTFLTQVMAHFEEMGMCVETDMELLVCTFCIKFSRHVKKLQLIEGRQHRSTWSPTMVVLFRWVPVTDAYWQILFSVLKVTRNLKELDLSGNSLSHSAVKSLCKTLRRPRCLLETLRLAGCGLTAEDCKDLAFGLRANQTLTELDLSFNVLTDAGAKHLCQRLRQPSCKLQRLQLVSCGLTSDCCQDLASVLSASPSLKELDLQQNNLDDVGVRLLCEGLRHPACKLIRLGLDQTTLSDEMRQELRALEQEKPQLLIFSRRKPSVMTPTEGLDTGEMSNSTSSLKRQRLGSERAASHVAQANLKLLDVSKIFPIAEIAGKSHEESSPEVVPVELLCVPSPASQGDLHTKPLGTDDDFWGPTGPVATEVVDKEKNLYRVHFPVAGSYRWPNTGLCFVMREAVTVEIEFCVWDQFLGEINPQHSWMVAGPLLDIKAEPGAVEAVHLPHFVALQGGHVDTSLFQMAHFKEEGMLLEKPARVELHHIVLENPSFSPLGVLLKMIHNALRFIPVTSVVLLYHRVHPEEVTFHLYLIPSDCSIRKAIDDLEMKFQFVRIHKPPPLTPLYMGCRYTVSGSGSGMLEILPKELELCYRSPGEDQLFSEFYVGHLGSGIRLQVKDKKDETLVWEALVKPGRNTSQPWNLRCNRDARRY

SEQ ID NO: 57216 - protein, 1429 aa, Homo sapiens
  Payload ID: 11249
  Gene Symbol: NLRP1
  Gene Name: NLR family, pyrin domain containing 1
  Uniprot ID: Q9C000
  ENSP ID: ENSP00000269280
MAGGAWGRLACYLEFLKKEELKEFQLLLANKAHSRSSSGETPAQPEKTSGMEVASYLVAQYGEQRAWDLALHTWEQMGLRSLCAQAQEGAGHSPSFPYSPSEPHLGSPSQPTSTAVLMPWIHELPAGCTQGSERRVLRQLPDTSGRRWREISASLLYQALPSSPDHESPSQESPNAPTSTAVLGSWGSPPQPSLAPREQEAPGTQWPLDETSGIYYTEIREREREKSEKGRPPWAAVVGTPPQAHTSLQPHHHPWEPSVRESLCSTWPWKNEDFNQKFTQLLLLQRPHPRSQDPLVKRSWPDYVEENRGHLIEIRDLFGPGLDTQEPRIVILQGAAGIGKSTLARQVKEAWGRGQLYGDRFQHVFYFSCRELAQSKVVSLAELIGKDGTATPAPIRQILSRPERLLFILDGVDEPGWVLQEPSSELCLHWSQPQPADALLGSLLGKTILPEASFLITARTTALQNLIPSLEQARWVEVLGFSESSRKEYFYRYFTDERQAIRAFRLVKSNKELWALCLVPWVSWLACTCLMQQMKRKEKLTLTSKTTTTLCLHYLAQALQAQPLGPQLRDLCSLAAEGIWQKKTLFSPDDLRKHGLDGAIISTFLKMGILQEHPIPLSYSFIHLCFQEFFAAMSYVLEDEKGRGKHSNCIIDLEKTLEAYGIHGLFGASTTRFLLGLLSDEGEREMENIFHCRLSQGRNLMQWVPSLQLLLQPHSLESLHCLYETRNKTFLTQVMAHFEEMGMCVETDMELLVCTFCIKFSRHVKKLQLIEGRQHRSTWSPTMVVLFRWVPVTDAYWQILFSVLKVTRNLKELDLSGNSLSHSAVKSLCKTLRRPRCLLETLRLAGCGLTAEDCKDLAFGLRANQTLTELDLSFNVLTDAGAKHLCQRLRQPSCKLQRLQLVSCGLTSDCCQDLASVLSASPSLKELDLQQNNLDDVGVRLLCEGLRHPACKLIRLGLDQTTLSDEMRQELRALEQEKPQLLIFSRRKPSVMTPTEGLDTGEMSNSTSSLKRQRLGSERAASHVAQANLKLLDVSKIFPIAEIAEESSPEVVPVELLCVPSPASQGDLHTKPLGTDDDFWGPTGPVATEVVDKEKNLYRVHFPVAGSYRWPNTGLCFVMREAVTVEIEFCVWDQFLGEINPQHSWMVAGPLLDIKAEPGAVEAVHLPHFVALQGGHVDTSLFQMAHFKEEGMLLEKPARVELHHIVLENPSFSPLGVLLKMIHNALRFIPVTSVVLLYHRVHPEEVTFHLYLIPSDCSIRKELELCYRSPGEDQLFSEFYVGHLGSGIRLQVKDKKDETLVWEALVKPGDLMPATTLIPPARIAVPSPLDAPQLLHFVDQYREQLIARVTSVEVVLDKLHGQVLSQEQYERVLAENTRPSQMRKLFSLSQSWDRKCKDGLYQALKETHPHLIMELWEKGSKKGLLPLSS

SEQ ID NO: 57217 - protein, 1429 aa, Homo sapiens; identical to SEQ ID NO: 57216
  Payload ID: 11249
  Gene Symbol: NLRP1
  Gene Name: NLR family, pyrin domain containing 1
  Uniprot ID: Q9C000
  ENSP ID: ENSP00000324366

SEQ ID NO: 57218 - protein, 1443 aa, Homo sapiens
  Payload ID: 11249
  Gene Symbol: NLRP1
  Gene Name: NLR family, pyrin domain containing 1
  Uniprot ID: Q9C000
  ENSP ID: ENSP00000346390
MAGGAWGRLACYLEFLKKEELKEFQLLLANKAHSRSSSGETPAQPEKTSGMEVASYLVAQYGEQRAWDLALHTWEQMGLRSLCAQAQEGAGHSPSFPYSPSEPHLGSPSQPTSTAVLMPWIHELPAGCTQGSERRVLRQLPDTSGRRWREISASLLYQALPSSPDHESPSQESPNAPTSTAVLGSWGSPPQPSLAPREQEAPGTQWPLDETSGIYYTEIREREREKSEKGRPPWAAVVGTPPQAHTSLQPHHHPWEPSVRESLCSTWPWKNEDFNQKFTQLLLLQRPHPRSQDPLVKRSWPDYVEENRGHLIEIRDLFGPGLDTQEPRIVILQGAAGIGKSTLARQVKEAWGRGQLYGDRFQHVFYFSCRELAQSKVVSLAELIGKDGTATPAPIRQILSRPERLLFILDGVDEPGWVLQEPSSELCLHWSQPQPADALLGSLLGKTILPEASFLITARTTALQNLIPSLEQARWVEVLGFSESSRKEYFYRYFTDERQAIRAFRLVKSNKELWALCLVPWVSWLACTCLMQQMKRKEKLTLTSKTTTTLCLHYLAQALQAQPLGPQLRDLCSLAAEGIWQKKTLFSPDDLRKHGLDGAIISTFLKMGILQEHPIPLSYSFIHLCFQEFFAAMSYVLEDEKGRGKHSNCIIDLEKTLEAYGIHGLFGASTTRFLLGLLSDEGEREMENIFHCRLSQGRNLMQWVPSLQLLLQPHSLESLHCLYETRNKTFLTQVMAHFEEMGMCVETDMELLVCTFCIKFSRHVKKLQLIEGRQHRSTWSPTMVVLFRWVPVTDAYWQILFSVLKVTRNLKELDLSGNSLSHSAVKSLCKTLRRPRCLLETLRLAGCGLTAEDCKDLAFGLRANQTLTELDLSFNVLTDAGAKHLCQRLRQPSCKLQRLQLVSCGLTSDCCQDLASVLSASPSLKELDLQQNNLDDVGVRLLCEGLRHPACKLIRLGKPSVMTPTEGLDTGEMSNSTSSLKRQRLGSERAASHVAQANLKLLDVSKIFPIAEIAEESSPEVVPVELLCVPSPASQGDLHTKPLGTDDDFWGPTGPVATEVVDKEKNLYRVHFPVAGSYRWPNTGLCFVMREAVTVEIEFCVWDQFLGEINPQHSWMVAGPLLDIKAEPGAVEAVHLPHFVALQGGHVDTSLFQMAHFKEEGMLLEKPARVELHHIVLENPSFSPLGVLLKMIHNALRFIPVTSVVLLYHRVHPEEVTFHLYLIPSDCSIRKAIDDLEMKFQFVRIHKPPPLTPLYMGCRYTVSGSGSGMLEILPKELELCYRSPGEDQLFSEFYVGHLGSGIRLQVKDKKDETLVWEALVKPGDLMPATTLIPPARIAVPSPLDAPQLLHFVDQYREQLIARVTSVEVVLDKLHGQVLSQEQYERVLAENTRPSQMRKLFSLSQSWDRKCKDGLYQALKETHPHLIMELWEKGSKKGLLPLSS

SEQ ID NO: 57219 - protein, 1375 aa, Homo sapiens; identical to SEQ ID NO: 57215
  Payload ID: 11249
  Gene Symbol: NLRP1
  Gene Name: NLR family, pyrin domain containing 1
  Uniprot ID: Q9C000
  ENSP ID: ENSP00000442029

SEQ ID NO: 57220 - protein, 35 aa, Homo sapiens
  Payload ID: 11249
  Gene Symbol: NLRP1
  Gene Name: NLR family, pyrin domain containing 1
  ENSP ID: ENSP00000458303
MAGGAWGRLACYLEFLKKEELKEFQLLLANKAHSR

SEQ ID NO: 57221 - protein, 1051 aa, Homo sapiens
  Payload ID: 11249
  Gene Symbol: NLRP1
  Gene Name: NLR family, pyrin domain containing 1
  ENSP ID: ENSP00000459661
MAGGAWGRLACYLEFLKKEELKEFQLLLANKAHSRSSSGETPAQPEKTSGMEVASYLVAQYGEQRAWDLALHTWEQMGLRSLCAQAQEGAGHSPSFPYSPSEPHLGSPSQPTSTAVLMPWIHELPAGCTQGSERRVLRQLPDTSGRRWREISASLLYQALPSSPDHESPSQESPNAPTSTAVLGSWGSPPQPSLAPREQEAPGTQWPLDETSGIYYTEIREREREKSEKGRPPWAAVVGTPPQAHTSLQPHHHPWEPSVRESLCSTWPWKNEDFNQKFTQLLLLQRPHPRSQDPLVKRSWPDYVEENRGHLIEIRDLFGPGLDTQEPRIVILQGAAGIGKSTLARQVKEAWGRGQLYGDRFQHVFYFSCRELAQSKVVSLAELIGKDGTATPAPIRQILSRPERLLFILDGVDEPGWVLQEPSSELCLHWSQPQPADALLGSLLGKTILPEASFLITARTTALQNLIPSLEQARWVEVLGFSESSRKEYFYRYFTDERQAIRAFRLVKSNKELWALCLVPWVSWLACTCLMQQMKRKEKLTLTSKTTTTLCLHYLAQALQAQPLGPQLRDLCSLAAEGIWQKKTLFSPDDLRKHGLDGAIISTFLKMGILQEHPIPLSYSFIHLCFQEFFAAMSYVLEDEKGRGKHSNCIIDLEKTLEAYGIHGLFGASTTRFLLGLLSDEGEREMENIFHCRLSQGRNLMQWVPSLQLLLQPHSLESLHCLYETRNKTFLTQVMAHFEEMGMCVETDMELLVCTFCIKFSRHVKKLQLIEGRQHRSTWSPTMVVLFRWVPVTDAYWQILFSVLKVTRNLKELDLSGNSLSHSAVKSLCKTLRRPRCLLETLRLAGCGLTAEDCKDLAFGLRANQTLTELDLSFNVLTDAGAKHLCQRLRQPSCKLQRLQLVSCGLTSDCCQDLASVLSASPSLKELDLQQNNLDDVGVRLLCEGLRHPACKLIRLGLDQTTLSDEMRQELRALEQEKPQLLIFSRRKPSVMTPTEGLDTGEMSNSTSSLKRQRLGSERAASHVAQANLKLLDVSKIFPIAEIAEESSPEV

SEQ ID NO: 57222 - protein, 1399 aa, Homo sapiens
  Payload ID: 11249
  Gene Symbol: NLRP1
  Gene Name: NLR family, pyrin domain containing 1
  Uniprot ID: Q9C000
  ENSP ID: ENSP00000460216
MAGGAWGRLACYLEFLKKEELKEFQLLLANKAHSRSSSGETPAQPEKTSGMEVASYLVAQYGEQRAWDLALHTWEQMGLRSLCAQAQEGAGHSPSFPYSPSEPHLGSPSQPTSTAVLMPWIHELPAGCTQGSERRVLRQLPDTSGRRWREISASLLYQALPSSPDHESPSQESPNAPTSTAVLGSWGSPPQPSLAPREQEAPGTQWPLDETSGIYYTEIREREREKSEKGRPPWAAVVGTPPQAHTSLQPHHHPWEPSVRESLCSTWPWKNEDFNQKFTQLLLLQRPHPRSQDPLVKRSWPDYVEENRGHLIEIRDLFGPGLDTQEPRIVILQGAAGIGKSTLARQVKEAWGRGQLYGDRFQHVFYFSCRELAQSKVVSLAELIGKDGTATPAPIRQILSRPERLLFILDGVDEPGWVLQEPSSELCLHWSQPQPADALLGSLLGKTILPEASFLITARTTALQNLIPSLEQARWVEVLGFSESSRKEYFYRYFTDERQAIRAFRLVKSNKELWALCLVPWVSWLACTCLMQQMKRKEKLTLTSKTTTTLCLHYLAQALQAQPLGPQLRDLCSLAAEGIWQKKTLFSPDDLRKHGLDGAIISTFLKMGILQEHPIPLSYSFIHLCFQEFFAAMSYVLEDEKGRGKHSNCIIDLEKTLEAYGIHGLFGASTTRFLLGLLSDEGEREMENIFHCRLSQGRNLMQWVPSLQLLLQPHSLESLHCLYETRNKTFLTQVMAHFEEMGMCVETDMELLVCTFCIKFSRHVKKLQLIEGRQHRSTWSPTMVVLFRWVPVTDAYWQILFSVLKVTRNLKELDLSGNSLSHSAVKSLCKTLRRPRCLLETLRLAGCGLTAEDCKDLAFGLRANQTLTELDLSFNVLTDAGAKHLCQRLRQPSCKLQRLQLVSCGLTSDCCQDLASVLSASPSLKELDLQQNNLDDVGVRLLCEGLRHPACKLIRLGKPSVMTPTEGLDTGEMSNSTSSLKRQRLGSERAASHVAQANLKLLDVSKIFPIAEIAEESSPEVVPVELLCVPSPASQGDLHTKPLGTDDDFWGPTGPVATEVVDKEKNLYRVHFPVAGSYRWPNTGLCFVMREAVTVEIEFCVWDQFLGEINPQHSWMVAGPLLDIKAEPGAVEAVHLPHFVALQGGHVDTSLFQMAHFKEEGMLLEKPARVELHHIVLENPSFSPLGVLLKMIHNALRFIPVTSVVLLYHRVHPEEVTFHLYLIPSDCSIRKELELCYRSPGEDQLFSEFYVGHLGSGIRLQVKDKKDETLVWEALVKPGDLMPATTLIPPARIAVPSPLDAPQLLHFVDQYREQLIARVTSVEVVLDKLHGQVLSQEQYERVLAENTRPSQMRKLFSLSQSWDRKCKDGLYQALKETHPHLIMELWEKGSKKGLLPLSS

SEQ ID NO: 57223 - protein, 1473 aa, Homo sapiens
  Payload ID: 11249
  Gene Symbol: NLRP1
  Gene Name: NLR family, pyrin domain containing 1
  Uniprot ID: Q9C000
  ENSP ID: ENSP00000460475
MAGGAWGRLACYLEFLKKEELKEFQLLLANKAHSRSSSGETPAQPEKTSGMEVASYLVAQYGEQRAWDLALHTWEQMGLRSLCAQAQEGAGHSPSFPYSPSEPHLGSPSQPTSTAVLMPWIHELPAGCTQGSERRVLRQLPDTSGRRWREISASLLYQALPSSPDHESPSQESPNAPTSTAVLGSWGSPPQPSLAPREQEAPGTQWPLDETSGIYYTEIREREREKSEKGRPPWAAVVGTPPQAHTSLQPHHHPWEPSVRESLCSTWPWKNEDFNQKFTQLLLLQRPHPRSQDPLVKRSWPDYVEENRGHLIEIRDLFGPGLDTQEPRIVILQGAAGIGKSTLARQVKEAWGRGQLYGDRFQHVFYFSCRELAQSKVVSLAELIGKDGTATPAPIRQILSRPERLLFILDGVDEPGWVLQEPSSELCLHWSQPQPADALLGSLLGKTILPEASFLITARTTALQNLIPSLEQARWVEVLGFSESSRKEYFYRYFTDERQAIRAFRLVKSNKELWALCLVPWVSWLACTCLMQQMKRKEKLTLTSKTTTTLCLHYLAQALQAQPLGPQLRDLCSLAAEGIWQKKTLFSPDDLRKHGLDGAIISTFLKMGILQEHPIPLSYSFIHLCFQEFFAAMSYVLEDEKGRGKHSNCIIDLEKTLEAYGIHGLFGASTTRFLLGLLSDEGEREMENIFHCRLSQGRNLMQWVPSLQLLLQPHSLESLHCLYETRNKTFLTQVMAHFEEMGMCVETDMELLVCTFCIKFSRHVKKLQLIEGRQHRSTWSPTMVVLFRWVPVTDAYWQILFSVLKVTRNLKELDLSGNSLSHSAVKSLCKTLRRPRCLLETLRLAGCGLTAEDCKDLAFGLRANQTLTELDLSFNVLTDAGAKHLCQRLRQPSCKLQRLQLVSCGLTSDCCQDLASVLSASPSLKELDLQQNNLDDVGVRLLCEGLRHPACKLIRLGLDQTTLSDEMRQELRALEQEKPQLLIFSRRKPSVMTPTEGLDTGEMSNSTSSLKRQRLGSERAASHVAQANLKLLDVSKIFPIAEIAEESSPEVVPVELLCVPSPASQGDLHTKPLGTDDDFWGPTGPVATEVVDKEKNLYRVHFPVAGSYRWPNTGLCFVMREAVTVEIEFCVWDQFLGEINPQHSWMVAGPLLDIKAEPGAVEAVHLPHFVALQGGHVDTSLFQMAHFKEEGMLLEKPARVELHHIVLENPSFSPLGVLLKMIHNALRFIPVTSVVLLYHRVHPEEVTFHLYLIPSDCSIRKAIDDLEMKFQFVRIHKPPPLTPLYMGCRYTVSGSGSGMLEILPKELELCYRSPGEDQLFSEFYVGHLGSGIRLQVKDKKDETLVWEALVKPGDLMPATTLIPPARIAVPSPLDAPQLLHFVDQYREQLIARVTSVEVVLDKLHGQVLSQEQYERVLAENTRPSQMRKLFSLSQSWDRKCKDGLYQALKETHPHLIMELWEKGSKKGLLPLSS

SEQ ID NO: 57224 - protein, 1473 aa, Homo sapiens; identical to SEQ ID NO: 57223
  Payload ID: 11249
  Gene Symbol: NLRP1
  Gene Name: NLR family, pyrin domain containing 1
  Uniprot ID: Q9C000
  ENSP ID: ENSP00000478516

SEQ ID NO: 57225 - protein, 1375 aa, Homo sapiens; identical to SEQ ID NO: 57215
  Payload ID: 11249
  Gene Symbol: NLRP1
  Gene Name: NLR family, pyrin domain containing 1
  Uniprot ID: Q9C000
  ENSP ID: ENSP00000483359

SEQ ID NO: 57226 - protein, 1443 aa, Homo sapiens; identical to SEQ ID NO: 57218
  Payload ID: 11249
  Gene Symbol: NLRP1
  Gene Name: NLR family, pyrin domain containing 1
  Uniprot ID: Q9C000
  ENSP ID: ENSP00000484692

SEQ ID NO: 57227 - protein, 655 aa, Homo sapiens
  Payload ID: 11250
  Gene Symbol: NLRP10
  Gene Name: NLR family, pyrin domain containing 10
  Uniprot ID: Q86W26
  ENSP ID: ENSP00000327763
MAMAKARKPREALLWALSDLEENDFKKLKFYLRDMTLSEGQPPLARGELEGLIPVDLAELLISKYGEKEAVKVVLKGLKVMNLLELVDQLSHICLHDYREVYREHVRCLEEWQEAGVNGRYNQVLLVAKPSSESPESLACPFPEQELESVTVEALFDSGEKPSLAPSLVVLQGSAGTGKTTLARKMVLDWATGTLYPGRFDYVFYVSCKEVVLLLESKLEQLLFWCCGDNQAPVTEILRQPERLLFILDGFDELQRPFEEKLKKRGLSPKESLLHLLIRRHTLPTCSLLITTRPLALRNLEPLLKQARHVHILGFSEEERARYFSSYFTDEKQADRAFDIVQKNDILYKACQVPGICWVVCSWLQGQMERGKVVLETPRNSTDIFMAYVSTFLPPDDDGGCSELSRHRVLRSLCSLAAEGIQHQRFLFEEAELRKHNLDGPRLAAFLSSNDYQLGLAIKKFYSFRHISFQDFFHAMSYLVKEDQSRLGKESRREVQRLLEVKEQEGNDEMTLTMQFLLDISKKDSFSNLELKFCFRISPCLAQDLKHFKEQMESMKHNRTWDLEFSLYEAKIKNLVKGIQMNNVSFKIKHSNEKKSQSQNLFSVKSSLSHGPKEEQKCPSVHGQKEGKDNIAGTQKEASTGKGRGTEETPKNTYI

SEQ ID NO: 57228 - protein, 65 aa, Homo sapiens
  Payload ID: 11250
  Gene Symbol: NLRP10
  Gene Name: NLR family, pyrin domain containing 10
  ENSP ID: ENSP00000436255
MAMAKARKPREALLWALSDLEENDFKKLKFYLRDMTLSEGQPPLARGELEGLIPVDLAELLISKY

SEQ ID NO: 57229 - protein, 655 aa, Homo sapiens; identical to SEQ ID NO: 57227
  Payload ID: 11250
  Gene Symbol: NLRP10
  Gene Name: NLR family, pyrin domain containing 10
  Uniprot ID: Q86W26
  ENSP ID: ENSP00000478480

SEQ ID NO: 57230 - protein, 65 aa, Homo sapiens; identical to SEQ ID NO: 57228
  Payload ID: 11250
  Gene Symbol: NLRP10
  Gene Name: NLR family, pyrin domain containing 10
  ENSP ID: ENSP00000485716

SEQ ID NO: 57231 - protein, 655 aa, Homo sapiens; identical to SEQ ID NO: 57227
  Payload ID: 11250
  Gene Symbol: NLRP10
  Gene Name: NLR family, pyrin domain containing 10
  Uniprot ID: Q86W26
  ENSP ID: ENSP00000486762

SEQ ID NO: 57232 - protein, 65 aa, Homo sapiens; identical to SEQ ID NO: 57228
  Payload ID: 11250
  Gene Symbol: NLRP10
  Gene Name: NLR family, pyrin domain containing 10
  ENSP ID: ENSP00000487371

SEQ ID NO: 57233 - protein, 1033 aa, Homo sapiens
  Payload ID: 11251
  Gene Symbol: NLRP11
  Gene Name: NLR family, pyrin domain containing 11
  Uniprot ID: P59045
  ENSP ID: ENSP00000466285
MAESDSTDFDLLWYLENLSDKEFQSFKKYLARKILDFKLPQFPLIQMTKEELANVLPISYEGQYIWNMLFSIFSMMRKEDLCRKIIGRRNRNQEACKAVMRRKFMLQWESHTFGKFHYKFFRDVSSDVFYILQLAYDSTSYYSANNLNVFLMGERASGKTIVINLAVLRWIKGEMWQNMISYVVHLTAHEINQMTNSSLAELIAKDWPDGQAPIADILSDPKKLLFILEDLDNIRFELNVNESALCSNSTQKVPIPVLLVSLLKRKMAPGCWFLISSRPTRGNNVKTFLKEVDCCTTLQLSNGKREIYFNSFFKDRQRASAALQLVHEDEILVGLCRVAILCWITCTVLKRQMDKGRDFQLCCQTPTDLHAHFLADALTSEAGLTANQYHLGLLKRLCLLAAGGLFLSTLNFSGEDLRCVGFTEADVSVLQAANILLPSNTHKDRYKFIHLNVQEFCTAIAFLMAVPNYLIPSGSREYKEKREQYSDFNQVFTFIFGLLNANRRKILETSFGYQLPMVDSFKWYSVGYMKHLDRDPEKLTHHMPLFYCLYENREEEFVKTIVDALMEVTVYLQSDKDMMVSLYCLDYCCHLRTLKLSVQRIFQNKEPLIRPTASQMKSLVYWREICSLFYTMESLRELHIFDNDLNGISERILSKALEHSSCKLRTLKLSYVSTASGFEDLLKALARNRSLTYLSINCTSISLNMFSLLHDILHEPTCQISHLSLMKCDLRASECEEIASLLISGGSLRKLTLSSNPLRSDGMNILCDALLHPNCTLISLVLVFCCLTENCCSALGRVLLFSPTLRQLDLCVNRLKNYGVLHVTFPLLFPTCQLEELHLSGCFFSSDICQYIAIVIATNEKLRSLEIGSNKIEDAGMQLLCGGLRHPNCMLVNIGLEECMLTSACCRSLASVLTTNKTLERLNLLQNHLGNDGVAKLLESLISPDCVLKVVGLPLTGLNTQTQQLLMTVKERKPSLIFLSETWSLKEGREIGVTPASQPGSIIPNSNLDYMFFKFPRMSAAMRTSNTASRQPL

SEQ ID NO: 57234 - protein, 654 aa, Homo sapiens
  Payload ID: 11251
  Gene Symbol: NLRP11
  Gene Name: NLR family, pyrin domain containing 11
  ENSP ID: ENSP00000466582
MRRKFMLQWESHTFGKFHYKFFRDVSSDVFYILQLAYDSTSYYSANNLNVFLMGERASGKTIVINLAVLRWIKGEMWQNMISYVVHLTAHEINQMTNSSLAELIAKDWPDGQAPIADILSDPKKLLFILEDLDNIRFELNVNESALCSNSTQKVPIPVLLVSLLKRKMAPGCWFLISSRPTRGNNVKTFLKEVDCCTTLQLSNGKREIYFNSFFKDRQRASAALQLVHEDEILVGLCRVAILCWITCTVLKRQMDKGRDFQLCCQTPTDLHAHFLADALTSEAGLTANQYHLGLLKRLCLLAAGGLFLSTLNFSGEDLRCVGFTEADVSVLQAANILLPSNTHKDRYKFIHLNVQEFCTAIAFLMAVPNYLIPSGSREYKEKREQYSDFNQVFTFIFGLLNANRRKILETSFGYQLPMVDSFKWYSVGYMKHLDRDPEKLTHHMPLFYCLYENREEEFVKTIVDALMEVTVYLQSDKDMMVSLYCLDYCCHLRTLKLSVQRIFQNKEPLIRPTASQMKSLVYWREICSLFYTMESLRELHIFDNDLNGISERILSKALEHSSCKLRTLKLSYVSTASGFEDLLKALARNRSLTYLSINCTSISLNMFSLLHDILHEPTCQISHLRIHRPTRRLTPGIPTLWEAEAGRSPELDEM

SEQ ID NO: 57235 - protein, 751 aa, Homo sapiens
  Payload ID: 11251
  Gene Symbol: NLRP11
  Gene Name: NLR family, pyrin domain containing 11
  ENSP ID: ENSP00000467988
MAESDSTDFDLLWYLENLSDKEFQSFKKYLARKILDFKLPQFPLIQMTKEELANVLPISYEGQYIWNMLFSIFSMMRKEDLCRKIIGRRNRNQEACKAVMRRKFMLQWESHTFGKFHYKFFRDVSSDVFYILQLAYDSTSYYSANNLNVFLMGERASGKTIVINLAVLRWIKGEMWQNMISYVVHLTAHEINQMTNSSLAELIAKDWPDGQAPIADILSDPKKLLFILEDLDNIRFELNVNESALCSNSTQKVPIPVLLVSLLKRKMAPGCWFLISSRPTRGNNVKTFLKEVDCCTTLQLSNGKREIYFNSFFKDRQRASAALQLVHEDEILVGLCRVAILCWITCTVLKRQMDKGRDFQLCCQTPTDLHAHFLADALTSEAGLTANQYHLGLLKRLCLLAAGGLFLSTLNFSGEDLRCVGFTEADVSVLQAANILLPSNTHKDRYKFIHLNVQEFCTAIAFLMAVPNYLIPSGSREYKEKREQYSDFNQVFTFIFGLLNANRRKILETSFGYQLPMVDSFKWYSVGYMKHLDRDPEKLTHHMPLFYCLYENREEEFVKTIVDALMEVTVYLQSDKDMMVSLYCLDYCCHLRTLKLSVQRIFQNKEPLIRPTASQMKSLVYWREICSLFYTMESLRELHIFDNDLNGISERILSKALEHSSCKLRTLKLSYVSTASGFEDLLKALARNRSLTYLSINCTSISLNMFSLLHDILHEPTCQISHLRWSFALVAQARVQWHSLSSPQPLTSRFK

SEQ ID NO: 57236 - protein, 979 aa, Homo sapiens
  Payload ID: 11251
  Gene Symbol: NLRP11
  Gene Name: NLR family, pyrin domain containing 11
  Uniprot ID: P59045
  ENSP ID: ENSP00000468082
MAESDSTDFDLLWYLENLSDKEFQSFKKYLARKILDFKLPQFPLIQMTKEELANVLPISYEGQYIWNMLFSIFSMMRKEDLCRKIIGRRNRNQEACKAVMRRKFMLQWESHTFGKFHYKFFRDVSSDVFYILQLAYDSTSYYSANNLNVFLMGERASGKTIVINLAVLRWIKGEMWQNMISYVVHLTAHEINQMTNSSLAELIAKDWPDGQAPIADILSDPKKLLFILEDLDNIRFELNVNESALCSNSTQKVPIPVLLVSLLKRKMAPGCWFLISSRPTRGNNVKTFLKEVDCCTTLQLSNGKREIYFNSFFKDRQRASAALQLVHEDEILVGLCRVAILCWITCTVLKRQMDKGRDFQLCCQTPTDLHAHFLADALTSEAGLTANQYHLGLLKRLCLLAAGGLFLSTLNFSGEDLRCVGFTEADVSVLQAANILLPSNTHKDRYKFIHLNVQEFCTAIAFLMAVPNYLIPSGSREYKEKREQYSDFNQVFTFIFGLLNANRRKILETSFGYQLPMVDSFKWYSVGYMKHLDRDPEKLTHHMPLFYCLYENREEEFVKTIVDALMEVTVYLQSDKDMMVSLYCLDYCCHLRTLKLSVQRIFQNKEPLIRPTARLSYVSTASGFEDLLKALARNRSLTYLSINCTSISLNMFSLLHDILHEPTCQISHLSLMKCDLRASECEEIASLLISGGSLRKLTLSSNPLRSDGMNILCDALLHPNCTLISLVLVFCCLTENCCSALGRVLLFSPTLRQLDLCVNRLKNYGVLHVTFPLLFPTCQLEELHLSGCFFSSDICQYIAIVIATNEKLRSLEIGSNKIEDAGMQLLCGGLRHPNCMLVNIGLEECMLTSACCRSLASVLTTNKTLERLNLLQNHLGNDGVAKLLESLISPDCVLKVVGLPLTGLNTQTQQLLMTVKERKPSLIFLSETWSLKEGREIGVTPASQPGSIIPNSNLDYMFFKFPRMSAAMRTSNTASRQPL

SEQ ID NO: 57237 - protein, 934 aa, Homo sapiens
  Payload ID: 11251
  Gene Symbol: NLRP11
  Gene Name: NLR family, pyrin domain containing 11
  Uniprot ID: P59045
  ENSP ID: ENSP00000468196
MRRKFMLQWESHTFGKFHYKFFRDVSSDVFYILQLAYDSTSYYSANNLNVFLMGERASGKTIVINLAVLRWIKGEMWQNMISYVVHLTAHEINQMTNSSLAELIAKDWPDGQAPIADILSDPKKLLFILEDLDNIRFELNVNESALCSNSTQKVPIPVLLVSLLKRKMAPGCWFLISSRPTRGNNVKTFLKEVDCCTTLQLSNGKREIYFNSFFKDRQRASAALQLVHEDEILVGLCRVAILCWITCTVLKRQMDKGRDFQLCCQTPTDLHAHFLADALTSEAGLTANQYHLGLLKRLCLLAAGGLFLSTLNFSGEDLRCVGFTEADVSVLQAANILLPSNTHKDRYKFIHLNVQEFCTAIAFLMAVPNYLIPSGSREYKEKREQYSDFNQVFTFIFGLLNANRRKILETSFGYQLPMVDSFKWYSVGYMKHLDRDPEKLTHHMPLFYCLYENREEEFVKTIVDALMEVTVYLQSDKDMMVSLYCLDYCCHLRTLKLSVQRIFQNKEPLIRPTASQMKSLVYWREICSLFYTMESLRELHIFDNDLNGISERILSKALEHSSCKLRTLKLSYVSTASGFEDLLKALARNRSLTYLSINCTSISLNMFSLLHDILHEPTCQISHLSLMKCDLRASECEEIASLLISGGSLRKLTLSSNPLRSDGMNILCDALLHPNCTLISLVLVFCCLTENCCSALGRVLLFSPTLRQLDLCVNRLKNYGVLHVTFPLLFPTCQLEELHLSGCFFSSDICQYIAIVIATNEKLRSLEIGSNKIEDAGMQLLCGGLRHPNCMLVNIGLEECMLTSACCRSLASVLTTNKTLERLNLLQNHLGNDGVAKLLESLISPDCVLKVVGLPLTGLNTQTQQLLMTVKERKPSLIFLSETWSLKEGREIGVTPASQPGSIIPNSNLDYMFFKFPRMSAAMRTSNTASRQPL

SEQ ID NO: 57238 - protein, 25 aa, Homo sapiens
  Payload ID: 11251
  Gene Symbol: NLRP11
  Gene Name: NLR family, pyrin domain containing 11
  ENSP ID: ENSP00000468696
MRRKFMLQWESHTFGKFHYKFFRDV

SEQ ID NO: 57239 - protein, 1061 aa, Homo sapiens
  Payload ID: 11252
  Gene Symbol: NLRP12
  Gene Name: NLR family, pyrin domain containing 12
  Uniprot ID: P59046
  ENSP ID: ENSP00000319377
MLRTAGRDGLCRLSTYLEELEAVELKKFKLYLGTATELGEGKIPWGSMEKAGPLEMAQLLITHFGPEEAWRLALSTFERINRKDLWERGQREDLVRDTPPGGPSSLGNQSTCLLEVSLVTPRKDPQETYRDYVRRKFRLMEDRNARLGECVNLSHRYTRLLLVKEHSNPMQVQQQLLDTGRGHARTVGHQASPIKIETLFEPDEERPEPPRTVVMQGAAGIGKSMLAHKVMLDWADGKLFQGRFDYLFYINCREMNQSATECSMQDLIFSCWPEPSAPLQELIRVPERLLFIIDGFDELKPSFHDPQGPWCLCWEEKRPTELLLNSLIRKKLLPELSLLITTRPTALEKLHRLLEHPRHVEILGFSEAERKEYFYKYFHNAEQAGQVFNYVRDNEPLFTMCFVPLVCWVVCTCLQQQLEGGGLLRQTSRTTTAVYMLYLLSLMQPKPGAPRLQPPPNQRGLCSLAADGLWNQKILFEEQDLRKHGLDGEDVSAFLNMNIFQKDINCERYYSFIHLSFQEFFAAMYYILDEGEGGAGPDQDVTRLLTEYAFSERSFLALTSRFLFGLLNEETRSHLEKSLCWKVSPHIKMDLLQWIQSKAQSDGSTLQQGSLEFFSCLYEIQEEEFIQQALSHFQVIVVSNIASKMEHMVSSFCLKRCRSAQVLHLYGATYSADGEDRARCSAGAHTLLVQLPERTVLLDAYSEHLAAALCTNPNLIELSLYRNALGSRGVKLLCQGLRHPNCKLQNLRLKRCRISSSACEDLSAALIANKNLTRMDLSGNGVGFPGMMLLCEGLRHPQCRLQMIQLRKCQLESGACQEMASVLGTNPHLVELDLTGNALEDLGLRLLCQGLRHPVCRLRTLWLKICRLTAAACDELASTLSVNQSLRELDLSLNELGDLGVLLLCEGLRHPTCKLQTLRLGICRLGSAACEGLSVVLQANHNLRELDLSFNDLGDWGLWLLAEGLQHPACRLQKLWLDSCGLTAKACENLYFTLGINQTLTDLYLTNNALGDTGVRLLCKRLSHPGCKLRVLWLFGMDLNKMTHSRLAALRVTKPYLDIGC

SEQ ID NO: 57240 - protein, 1006 aa, Homo sapiens
  Payload ID: 11252
  Gene Symbol: NLRP12
  Gene Name: NLR family, pyrin domain containing 12
  ENSP ID: ENSP00000341428
MLRTAGRDGLCRLSTYLEELEAVELKKFKLYLGTATELGEGKIPWGSMEKAGPLEMAQLLITHFGPEEAWRLALSTFERINRKDLWERGQREDLVRDTPPGGPSSLGNQSTCLLEVSLVTPRKDPQETYRDYVRRKFRLMEDRNARLGECVNLSHRYTRLLLVKEHSNPMQVQQQLLDTGRGHARTVGHQASPIKIETLFEPDEERPEPPRTVVMQGAAGIGKSMLAHKVMLDWADGKLFQGRFDYLFYINCREMNQSATECSMQDLIFSCWPEPSAPLQELIRVPERLLFIIDGFDELKPSFHDPQGPWCLCWEEKRPTELLLNSLIRKKLLPELSLLITTRPTALEKLHRLLEHPRHVEILGFSEAERKEYFYKYFHNAEQAGQVFNYVRDNEPLFTMCFVPLVCWVVCTCLQQQLEGGGLLRQTSRTTTAVYMLYLLSLMQPKPGAPRLQPPPNQRGLCSLAADGLWNQKILFEEQDLRKHGLDGEDVSAFLNMNIFQKDINCERYYSFIHLSFQEFFAAMYYILDEGEGGAGPDQDVTRLLTEYAFSERSFLALTSRFLFGLLNEETRSHLEKSLCWKVSPHIKMDLLQWIQSKAQSDGSTLQQGSLEFFSCLYEIQEEEFIQQALSHFQVIVVSNIASKMEHMVSSFCLKRCRSAQVLHLYGATYSADGEDRARCSAGAHTLLVQLRPERTVLLDAYSEHLAAALCTNPNLIELSLYRNALGSRGVKLLCQGLRHPNCKLQNLRLKRCRISSSACEDLSAALIANKNLTRMDLSGNGVGFPGMMLLCEGLRHPQCRLQMIQLRKCQLESGACQEMASVLGTNPHLVELDLTGNALEDLGLRLLCQGLRHPVCRLRTLWLKICRLTAAACDELASTLSVNQSLRELDLSLNELGDLGVLLLCEGLRHPTCKLQTLRLGICRLGSAACEGLSVVLQANHNLRELDLSFNDLGDWGLWLLAEGLQHPACRLQKLWWLFGMDLNKMTHSRLAALRVTKPYLDIGC

SEQ ID NO: 57241 - protein, 892 aa, Homo sapiens
  Payload ID: 11252
  Gene Symbol: NLRP12
  Gene Name: NLR family, pyrin domain containing 12
  ENSP ID: ENSP00000375652
MLRTAGRDGLCRLSTYLEELEAVELKKFKLYLGTATELGEGKIPWGSMEKAGPLEMAQLLITHFGPEEAWRLALSTFERINRKDLWERGQREDLVRDTPPGGPSSLGNQSTCLLEVSLVTPRKDPQETYRDYVRRKFRLMEDRNARLGECVNLSHRYTRLLLVKEHSNPMQVQQQLLDTGRGHARTVGHQASPIKIETLFEPDEERPEPPRTVVMQGAAGIGKSMLAHKVMLDWADGKLFQGRFDYLFYINCREMNQSATECSMQDLIFSCWPEPSAPLQELIRVPERLLFIIDGFDELKPSFHDPQGPWCLCWEEKRPTELLLNSLIRKKLLPELSLLITTRPTALEKLHRLLEHPRHVEILGFSEAERKEYFYKYFHNAEQAGQVFNYVRDNEPLFTMCFVPLVCWVVCTCLQQQLEGGGLLRQTSRTTTAVYMLYLLSLMQPKPGAPRLQPPPNQRGLCSLAADGLWNQKILFEEQDLRKHGLDGEDVSAFLNMNIFQKDINCERYYSFIHLSFQEFFAAMYYILDEGEGGAGPDQDVTRLLTEYAFSERSFLALTSRFLFGLLNEETRSHLEKSLCWKVSPHIKMDLLQWIQSKAQSDGSTLQQGSLEFFSCLYEIQEEEFIQQALSHFQVIVVSNIASKMEHMVSSFCLKRCRSAQVLHLYGATYSADGEDRARCSAGAHTLLVQLRPERTVLLDAYSEHLAAALCTNPNLIELSLYRNALGSRGVKLLCQGLRHPNCKLQNLRLKRCRISSSACEDLSAALIANKNLTRMDLSGNGVGFPGMMLLCEGLRHPQCRLQMIQLRKCQLESGACQEMASVLGTNPHLVELDLTGNALEDLGLRLLCQGLRHPVCRLRTLWWLFGMDLNKMTHSRLAALRVTKPYLDIGC

SEQ ID NO: 57242 - protein, 1062 aa, Homo sapiens
  Payload ID: 11252
  Gene Symbol: NLRP12
  Gene Name: NLR family, pyrin domain containing 12
  Uniprot ID: P59046
  ENSP ID: ENSP00000375653
MLRTAGRDGLCRLSTYLEELEAVELKKFKLYLGTATELGEGKIPWGSMEKAGPLEMAQLLITHFGPEEAWRLALSTFERINRKDLWERGQREDLVRDTPPGGPSSLGNQSTCLLEVSLVTPRKDPQETYRDYVRRKFRLMEDRNARLGECVNLSHRYTRLLLVKEHSNPMQVQQQLLDTGRGHARTVGHQASPIKIETLFEPDEERPEPPRTVVMQGAAGIGKSMLAHKVMLDWADGKLFQGRFDYLFYINCREMNQSATECSMQDLIFSCWPEPSAPLQELIRVPERLLFIIDGFDELKPSFHDPQGPWCLCWEEKRPTELLLNSLIRKKLLPELSLLITTRPTALEKLHRLLEHPRHVEILGFSEAERKEYFYKYFHNAEQAGQVFNYVRDNEPLFTMCFVPLVCWVVCTCLQQQLEGGGLLRQTSRTTTAVYMLYLLSLMQPKPGAPRLQPPPNQRGLCSLAADGLWNQKILFEEQDLRKHGLDGEDVSAFLNMNIFQKDINCERYYSFIHLSFQEFFAAMYYILDEGEGGAGPDQDVTRLLTEYAFSERSFLALTSRFLFGLLNEETRSHLEKSLCWKVSPHIKMDLLQWIQSKAQSDGSTLQQGSLEFFSCLYEIQEEEFIQQALSHFQVIVVSNIASKMEHMVSSFCLKRCRSAQVLHLYGATYSADGEDRARCSAGAHTLLVQLRPERTVLLDAYSEHLAAALCTNPNLIELSLYRNALGSRGVKLLCQGLRHPNCKLQNLRLKRCRISSSACEDLSAALIANKNLTRMDLSGNGVGFPGMMLLCEGLRHPQCRLQMIQLRKCQLESGACQEMASVLGTNPHLVELDLTGNALEDLGLRLLCQGLRHPVCRLRTLWLKICRLTAAACDELASTLSVNQSLRELDLSLNELGDLGVLLLCEGLRHPTCKLQTLRLGICRLGSAACEGLSVVLQANHNLRELDLSFNDLGDWGLWLLAEGLQHPACRLQKLWLDSCGLTAKACENLYFTLGINQTLTDLYLTNNALGDTGVRLLCKRLSHPGCKLRVLWLFGMDLNKMTHSRLAALRVTKPYLDIGC

SEQ ID NO: 57243 - protein, 1004 aa, Homo sapiens
  Payload ID: 11252
  Gene Symbol: NLRP12
  Gene Name: NLR family, pyrin domain containing 12
  Uniprot ID: P59046
  ENSP ID: ENSP00000375655
MLRTAGRDGLCRLSTYLEELEAVELKKFKLYLGTATELGEGKIPWGSMEKAGPLEMAQLLITHFGPEEAWRLALSTFERINRKDLWERGQREDLVRDTPPGGPSSLGNQSTCLLEVSLVTPRKDPQETYRDYVRRKFRLMEDRNARLGECVNLSHRYTRLLLVKEHSNPMQVQQQLLDTGRGHARTVGHQASPIKIETLFEPDEERPEPPRTVVMQGAAGIGKSMLAHKVMLDWADGKLFQGRFDYLFYINCREMNQSATECSMQDLIFSCWPEPSAPLQELIRVPERLLFIIDGFDELKPSFHDPQGPWCLCWEEKRPTELLLNSLIRKKLLPELSLLITTRPTALEKLHRLLEHPRHVEILGFSEAERKEYFYKYFHNAEQAGQVFNYVRDNEPLFTMCFVPLVCWVVCTCLQQQLEGGGLLRQTSRTTTAVYMLYLLSLMQPKPGAPRLQPPPNQRGLCSLAADGLWNQKILFEEQDLRKHGLDGEDVSAFLNMNIFQKDINCERYYSFIHLSFQEFFAAMYYILDEGEGGAGPDQDVTRLLTEYAFSERSFLALTSRFLFGLLNEETRSHLEKSLCWKVSPHIKMDLLQWIQSKAQSDGSTLQQGSLEFFSCLYEIQEEEFIQQALSHFQVIVVSNIASKMEHMVSSFCLKRCRSAQVLHLYGATYSADGEDRARCSAGAHTLLVQLPERTVLLDAYSEHLAAALCTNPNLIELSLYRNALGSRGVKLLCQGLRHPNCKLQNLRLKRCRISSSACEDLSAALIANKNLTRMDLSGNGVGFPGMMLLCEGLRHPQCRLQMIQLRKCQLESGACQEMASVLGTNPHLVELDLTGNALEDLGLRLLCQGLRHPVCRLRTLWLKICRLTAAACDELASTLSVNQSLRELDLSLNELGDLGVLLLCEGLRHPTCKLQTLRLDSCGLTAKACENLYFTLGINQTLTDLYLTNNALGDTGVRLLCKRLSHPGCKLRVLWLFGMDLNKMTHSRLAALRVTKPYLDIGC

SEQ ID NO: 57244 - protein, 1043 aa, Homo sapiens
  Payload ID: 11253
  Gene Symbol: NLRP13
  Gene Name: NLR family, pyrin domain containing 13
  Uniprot ID: Q86W25
  ENSP ID: ENSP00000343891
MNFSVITCPNGGTNQGLLPYLMALDQYQLEEFKLCLEPQQLMDFWSAPQGHFPRIPWANLRAADPLNLSFLLDEHFPKGQAWKVVLGIFQTMNLTSLCEKVRAEMKENVQTQELQDPTQEDLEMLEAAAGNMQTQGCQDPNQEELDELEEETGNVQAQGCQDPNQEEPEMLEEADHRRKYRENMKAELLETWDNISWPKDHVYIRNTSKDEHEELQRLLDPNRTRAQAQTIVLVGRAGVGKTTLAMQAMLHWANGVLFQQRFSYVFYLSCHKIRYMKETTFAELISLDWPDFDAPIEEFMSQPEKLLFIIDGFEEIIISESRSESLDDGSPCTDWYQELPVTKILHSLLKKELVPLATLLITIKTWFVRDLKASLVNPCFVQITGFTGDDLRVYFMRHFDDSSEVEKILQQLRKNETLFHSCSAPMVCWTVCSCLKQPKVRYYDLQSITQTTTSLYAYFFSNLFSTAEVDLADDSWPGQWRALCSLAIEGLWSMNFTFNKEDTEIEGLEVPFIDSLYEFNILQKINDCGGCTTFTHLSFQEFFAAMSFVLEEPREFPPHSTKPQEMKMLLQHVLLDKEAYWTPVVLFFFGLLNKNIARELEDTLHCKISPRVMEELLKWGEELGKAESASLQFHILRLFHCLHESQEEDFTKKMLGRIFEVDLNILEDEELQASSFCLKHCKRLNKLRLSVSSHILERDLEILETSKFDSRMHAWNSICSTLVTNENLHELDLSNSKLHASSVKGLCLALKNPRCKVQKLTCKSVTPEWVLQDLIIALQGNSKLTHLNFSSNKLGMTVPLILKALRHSACNLKYLCLEKCNLSAASCQDLALFLTSIQHVTRLCLGFNRLQDDGIKLLCAALTHPKCALERLELWFCQLAAPACKHLSDALLQNRSLTHLNLSKNSLRDEGVKFLCEALGRPDGNLQSLNLSGCSFTREGCGELANALSHNHNVKILDLGENDLQDDGVKLLCEALKPHRALHTLGLAKCNLTTACCQHLFSVLSSSKSLVNLNLLGNELDTDGVKMLCKALKKSTCRLQKLG

SEQ ID NO: 57245 - protein, 1036 aa, Homo sapiens
  Payload ID: 11253
  Gene Symbol: NLRP13
  Gene Name: NLR family, pyrin domain containing 13
  ENSP ID: ENSP00000467899
MNFSVITCPNGGTNQGLLPYLMALDQYQLEEFKLCLEPQQLMDFWSAPQGHFPRIPWANLRAADPLNLSFLLDEHFPKGQAWKVVLGIFQTMNLTSLCEKVRAEMKENVQTQELQDPTQEDLEMLEAAAGNMQTQGCQDPNQEELDELEEETGNVQAQGCQDPNQEEPEMLEEADHRRKYRENMKAELLETWDNISWPKDHVYIRNTSKDEHEELQRLLDPNRTRAQAQTIVLVGRAGVGKTTLAMQAMLHWANGVLFQQRFSYVFYLSCHKIRYMKETTFAELISLDWPDFDAPIEEFMSQPEKLLFIIDGFEEIIISESRSESLDDGSPCTDWYQELPVTKILHSLLKKELVPLATLLITIKTWFVRDLKASLVNPCFVQITGFTGDDLRVYFMRHFDDSSEVEKILQQLRKNETLFHSCSAPMVCWTVCSCLKQPKVRYYDLQSITQTTTSLYAYFFSNLFSTAEVDLADDSWPGQWRALCSLAIEGLWSMNFTFNKEDTEIEGLEVPFIDSLYEFNILQKINDCGGCTTFTHLSFQEFFAAMSFVLEEPREFPPHSTKPQEMKMLLQHVLLDKEAYWTPVVLFFFGLLNKNIARELEDTLHCKISPRVMEELLKWGEELGKAESASLQFHILRLFHCLHESQEEDFTKKMLGRIFEVDLNILEDEELQASSFCLKHCKRLNKLRLSVSSHILERDLEILETSKFDSRMHAWNSICSTLVTNENLHELDLSNSKLHASSVKGLCLALKNPRCKVQKLTCKSVTPEWVLQDLIIALQGNSKLTHLNFSSNKLGMTVPLILKALRHSACNLKYLCLEKCNLSAASCQDLALFLTSIQHVTRLCLGFNRLQDDGIKLLCAALTHPKCALERLELWFCQLAAPACKHLSDALLQNRSLTHLNLSKNSLRDEGVKFLCEALGRPDGNLQSLNLSGCSFTREGCGELANALSHNHNVKILDLGENDLQDDGVKLLCEALKPHRALHTLGLAKCNLTTACCQHLFSVLSSSKSLVNLNLLGNELDTDGVKMLCFKKTCTM

SEQ ID NO: 57246 - protein, 1093 aa, Homo sapiens
  Payload ID: 11254
  Gene Symbol: NLRP14
  Gene Name: NLR family, pyrin domain containing 14
  Uniprot ID: Q86W24
  ENSP ID: ENSP00000299481
MADSSSSSFFPDFGLLLYLEELNKEELNTFKLFLKETMEPEHGLTPWNEVKKARREDLANLMKKYYPGEKAWSVSLKIFGKMNLKDLCERAKEEINWSAQTIGPDDAKAGETQEDQEAVLGDGTEYRNRIKEKFCITWDKKSLAGKPEDFHHGIAEKDRKLLEHLFDVDVKTGAQPQIVVLQGAAGVGKTTLVRKAMLDWAEGSLYQQRFKYVFYLNGREINQLKERSFAQLISKDWPSTEGPIEEIMYQPSSLLFIIDSFDELNFAFEEPEFALCEDWTQEHPVSFLMSSLLRKVMLPEASLLVTTRLTTSKRLKQLLKNHHYVELLGMSEDAREEYIYQFFEDKRWAMKVFSSLKSNEMLFSMCQVPLVCWAACTCLKQQMEKGGDVTLTCQTTTALFTCYISSLFTPVDGGSPSLPNQAQLRRLCQVAAKGIWTMTYVFYRENLRRLGLTQSDVSSFMDSNIIQKDAEYENCYVFTHLHVQEFFAAMFYMLKGSWEAGNPSCQPFEDLKSLLQSTSYKDPHLTQMKCFLFGLLNEDRVKQLERTFNCKMSLKIKSKLLQCMEVLGNSDYSPSQLGFLELFHCLYETQDKAFISQAMRCFPKVAINICEKIHLLVSSFCLKHCRCLRTIRLSVTVVFEKKILKTSLPTNTWDGDRITHCWQDLCSVLHTNEHLRELDLYHSNLDKSAMNILHHELRHPNCKLQKLLLKFITFPDGCQDISTSLIHNKNLMHLDLKGSDIGDNGVKSLCEALKHPECKLQTLRLESCNLTVFCCLNISNALIRSQSLIFLNLSTNNLLDDGVQLLCEALRHPKCYLERLSLESCGLTEAGCEYLSLALISNKRLTHLCLADNVLGDGGVKLMSDALQHAQCTLKSLVLRRCHFTSLSSEYLSTSLLHNKSLTHLDLGSNWLQDNGVKLLCDVFRHPSCNLQDLELMGCVLTNACCLDLASVILNNPNLRSLDLGNNDLQDDGVKILCDALRYPNCNIQRLGLEYCGLTSLCCQDLSSALICNKRLIKMNLTQNTLGYEGIVKLYKVLKSPKCKLQVLGLCKEAFDEEAQKLLEAVGVSNPHLIIKPDCNYHNEEDVSWWWCF

SEQ ID NO: 57247 - protein, 1059 aa, Homo sapiens
  Payload ID: 11255
  Gene Symbol: NLRP2
  Gene Name: NLR family, pyrin domain containing 2
  ENSP ID: ENSP00000263437
MVSSAQMGFNLQALLEQLSQDELSKFKYLITTFSLAHELQKIPHKEVDKADGKQLVEILTTHCDSYWVEMASLQVFEKMHRMDLSERAKDEVREAALKSFNKRKPLSLGITRKERPPLDVDEMLERFKTEAQETKGNVICLGKEVFKGKKPDKDNRCRYILKTKFREMWKSWPGDSKEVQVMAERYKMLIPFSNPRVLPGPFSYTVVLYGPAGLGKTTLAQKLMLDWAEDNLIHKFKYAFYLSCRELSRLGPCSFAELVFRDWPELQDDIPHILAQARKILFVIDGFDELGAAPGALIEDICGDWEKKKPVPVLLGSLLNRVMLPKAALLVTTRPRALRDLRILAEEPIYIRVEGFLEEDRRAYFLRHFGDEDQAMRAFELMRSNAALFQLGSAPAVCWIVCTTLKLQMEKGEDPVPTCLTRTGLFLRFLCSRFPQGAQLRGALRTLSLLAAQGLWAQTSVLHREDLERLGVQESDLRLFLDGDILRQDRVSKGCYSFIHLSFQQFLTALFYTLEKEEEEDRDGHTWDIGDVQKLLSGVERLRNPDLIQAGYYSFGLANEKRAKELEATFGCRMSPDIKQELLRCDISCKGGHSTVTDLQELLGCLYESQEEELVKEVMAQFKEISLHLNAVDVVPSSFCVKHCRNLQKMSLQVIKENLPENVTASESDAEVERSQDDQHMLPFWTDLCSIFGSNKDLMGLAINDSFLSASLVRILCEQIASDTCHLQRVVFKNISPADAHRNLCLALRGHKTVTYLTLQGNDQDDMFPALCEVLRHPECNLRYLGLVSCSATTQQWADLSLALEVNQSLTCVNLSDNELLDEGAKLLYTTLRHPKCFLQRLSLENCHLTEANCKDLAAVLVVSRELTHLCLAKNPIGNTGVKFLCEGLRYPECKLQTLVLWNCDITSDGCCDLTKLLQEKSSLLCLDLGLNHIGVKGMKFLCEALRKPLCNLRCLWLWGCSIPPFSCEDLCSALSCNQSLVTLDLGQNPLGSSGVKMLFETLTCSSGTLRTLRLKIDDFNDELNKLLEEIEEKNPQLIIDTEKHHPWAERPSSHDFMI

SEQ ID NO: 57248 - protein, 1040 aa, Homo sapiens
  Payload ID: 11255
  Gene Symbol: NLRP2
  Gene Name: NLR family, pyrin domain containing 2
  Uniprot ID: Q9NX02
  ENSP ID: ENSP00000344074
MVSSAQMGFNLQALLEQLSQDELSKFKYLITTFSLAHELQKIPHKEVDKADGKQLVEILTTHCDSYWVEMASLQVFEKMHRMDLSERAKDEVREAALKSFNKRKPLSLGITRKERPPLDVDEMLERFKTEAQDKDNRCRYILKTKFREMWKSWPGDSKEVQVMAERYKMLIPFSNPRVLPGPFSYTVVLYGPAGLGKTTLAQKLMLDWAEDNLIHKFKYAFYLSCRELSRLGPCSFAELVFRDWPELQDDIPHILAQARKILFVIDGFDELGAAPGALIEDICGDWEKKKPVPVLLGSLLNRVMLPKAALLVTTRPRALRDLRILAEEPIYIRVEGFLEEDRRAYFLRHFGDEDQAMRAFELMRSNAALFQLGSAPAVCWIVCTTLKLQMEKGEDPVPTCLTRTGLFLRFLCSRFPQGAQLRGALRTLSLLAAQGLWAQTSVLHREDLERLGVQESDLRLFLDGDILRQDRVSKGCYSFIHLSFQQFLTALFYTLEKEEEEDRDGHTWDIGDVQKLLSGVERLRNPDLIQAGYYSFGLANEKRAKELEATFGCRMSPDIKQELLRCDISCKGGHSTVTDLQELLGCLYESQEEELVKEVMAQFKEISLHLNAVDVVPSSFCVKHCRNLQKMSLQVIKENLPENVTASESDAEVERSQDDQHMLPFWTDLCSIFGSNKDLMGLAINDSFLSASLVRILCEQIASDTCHLQRVVFKNISPADAHRNLCLALRGHKTVTYLTLQGNDQDDMFPALCEVLRHPECNLRYLGLVSCSATTQQWADLSLALEVNQSLTCVNLSDNELLDEGAKLLYTTLRHPKCFLQRLSLENCHLTEANCKDLAAVLVVSRELTHLCLAKNPIGNTGVKFLCEGLRYPECKLQTLVLWNCDITSDGCCDLTKLLQEKSSLLCLDLGLNHIGVKGMKFLCEALRKPLCNLRCLWLWGCSIPPFSCEDLCSALSCNQSLVTLDLGQNPLGSSGVKMLFETLTCSSGTLRTLRLKIDDFNDELNKLLEEIEEKNPQLIIDTEKHHPWAERPSSHDFMI

SEQ ID NO: 57249 - protein, 1038 aa, Homo sapiens
  Payload ID: 11255
  Gene Symbol: NLRP2
  Gene Name: NLR family, pyrin domain containing 2
  Uniprot ID: Q9NX02
  ENSP ID: ENSP00000375601
MVSSAQMGFNLQALLEQLSQDELSKFKYLITTFSLAHELQKIPHKEVDKADGKQLVEILTTHCDSYWVEMASLQVFEKMHRMDLSERAKDEVREAALKSFNKRKPLSLAFTETKGNVICLGKEVFKGKKPDKDNRCRYILKTKFREMWKSWPGDSKEVQVMAERYKMLIPFSNPRVLPGPFSYTVVLYGPAGLGKTTLAQKLMLDWAEDNLIHKFKYAFYLSCRELSRLGPCSFAELVFRDWPELQDDIPHILAQARKILFVIDGFDELGAAPGALIEDICGDWEKKKPVPVLLGSLLNRVMLPKAALLVTTRPRALRDLRILAEEPIYIRVEGFLEEDRRAYFLRHFGDEDQAMRAFELMRSNAALFQLGSAPAVCWIVCTTLKLQMEKGEDPVPTCLTRTGLFLRFLCSRFPQGAQLRGALRTLSLLAAQGLWAQTSVLHREDLERLGVQESDLRLFLDGDILRQDRVSKGCYSFIHLSFQQFLTALFYTLEKEEEEDRDGHTWDIGDVQKLLSGVERLRNPDLIQAGYYSFGLANEKRAKELEATFGCRMSPDIKQELLRCDISCKGGHSTVTDLQELLGCLYESQEEELVKEVMAQFKEISLHLNAVDVVPSSFCVKHCRNLQKMSLQVIKENLPENVTASESDAEVERSQDDQHMLPFWTDLCSIFGSNKDLMGLAINDSFLSASLVRILCEQIASDTCHLQRVVFKNISPADAHRNLCLALRGHKTVTYLTLQGNDQDDMFPALCEVLRHPECNLRYLGLVSCSATTQQWADLSLALEVNQSLTCVNLSDNELLDEGAKLLYTTLRHPKCFLQRLSLENCHLTEANCKDLAAVLVVSRELTHLCLAKNPIGNTGVKFLCEGLRYPECKLQTLVLWNCDITSDGCCDLTKLLQEKSSLLCLDLGLNHIGVKGMKFLCEALRKPLCNLRCLWLWGCSIPPFSCEDLCSALSCNQSLVTLDLGQNPLGSSGVKMLFETLTCSSGTLRTLRLKIDDFNDELNKLLEEIEEKNPQLIIDTEKHHPWAERPSSHDFMI

SEQ ID NO: 57250 - protein, 1039 aa, Homo sapiens
  Payload ID: 11255
  Gene Symbol: NLRP2
  Gene Name: NLR family, pyrin domain containing 2
  Uniprot ID: Q9NX02
  ENSP ID: ENSP00000402474
MVSSAQMGFNLQALLEQLSQDELSKFKYLITTFSLAHELQKIPHKEMASLQVFEKMHRMDLSERAKDEVREAALKSFNKRKPLSLGITRKERPPLDVDEMLERFKTEAQAFTETKGNVICLGKEVFKGKKPDKDNRCRYILKTKFREMWKSWPGDSKEVQVMAERYKMLIPFSNPRVLPGPFSYTVVLYGPAGLGKTTLAQKLMLDWAEDNLIHKFKYAFYLSCRELSRLGPCSFAELVFRDWPELQDDIPHILAQARKILFVIDGFDELGAAPGALIEDICGDWEKKKPVPVLLGSLLNRVMLPKAALLVTTRPRALRDLRILAEEPIYIRVEGFLEEDRRAYFLRHFGDEDQAMRAFELMRSNAALFQLGSAPAVCWIVCTTLKLQMEKGEDPVPTCLTRTGLFLRFLCSRFPQGAQLRGALRTLSLLAAQGLWAQTSVLHREDLERLGVQESDLRLFLDGDILRQDRVSKGCYSFIHLSFQQFLTALFYTLEKEEEEDRDGHTWDIGDVQKLLSGVERLRNPDLIQAGYYSFGLANEKRAKELEATFGCRMSPDIKQELLRCDISCKGGHSTVTDLQELLGCLYESQEEELVKEVMAQFKEISLHLNAVDVVPSSFCVKHCRNLQKMSLQVIKENLPENVTASESDAEVERSQDDQHMLPFWTDLCSIFGSNKDLMGLAINDSFLSASLVRILCEQIASDTCHLQRVVFKNISPADAHRNLCLALRGHKTVTYLTLQGNDQDDMFPALCEVLRHPECNLRYLGLVSCSATTQQWADLSLALEVNQSLTCVNLSDNELLDEGAKLLYTTLRHPKCFLQRLSLENCHLTEANCKDLAAVLVVSRELTHLCLAKNPIGNTGVKFLCEGLRYPECKLQTLVLWNCDITSDGCCDLTKLLQEKSSLLCLDLGLNHIGVKGMKFLCEALRKPLCNLRCLWLWGCSIPPFSCEDLCSALSCNQSLVTLDLGQNPLGSSGVKMLFETLTCSSGTLRTLRLKIDDFNDELNKLLEEIEEKNPQLIIDTEKHHPWAERPSSHDFMI

SEQ ID NO: 57251 - protein, 1062 aa, Homo sapiens
  Payload ID: 11255
  Gene Symbol: NLRP2
  Gene Name: NLR family, pyrin domain containing 2
  Uniprot ID: Q9NX02
  ENSP ID: ENSP00000409370
MVSSAQMGFNLQALLEQLSQDELSKFKYLITTFSLAHELQKIPHKEVDKADGKQLVEILTTHCDSYWVEMASLQVFEKMHRMDLSERAKDEVREAALKSFNKRKPLSLGITRKERPPLDVDEMLERFKTEAQAFTETKGNVICLGKEVFKGKKPDKDNRCRYILKTKFREMWKSWPGDSKEVQVMAERYKMLIPFSNPRVLPGPFSYTVVLYGPAGLGKTTLAQKLMLDWAEDNLIHKFKYAFYLSCRELSRLGPCSFAELVFRDWPELQDDIPHILAQARKILFVIDGFDELGAAPGALIEDICGDWEKKKPVPVLLGSLLNRVMLPKAALLVTTRPRALRDLRILAEEPIYIRVEGFLEEDRRAYFLRHFGDEDQAMRAFELMRSNAALFQLGSAPAVCWIVCTTLKLQMEKGEDPVPTCLTRTGLFLRFLCSRFPQGAQLRGALRTLSLLAAQGLWAQTSVLHREDLERLGVQESDLRLFLDGDILRQDRVSKGCYSFIHLSFQQFLTALFYTLEKEEEEDRDGHTWDIGDVQKLLSGVERLRNPDLIQAGYYSFGLANEKRAKELEATFGCRMSPDIKQELLRCDISCKGGHSTVTDLQELLGCLYESQEEELVKEVMAQFKEISLHLNAVDVVPSSFCVKHCRNLQKMSLQVIKENLPENVTASESDAEVERSQDDQHMLPFWTDLCSIFGSNKDLMGLAINDSFLSASLVRILCEQIASDTCHLQRVVFKNISPADAHRNLCLALRGHKTVTYLTLQGNDQDDMFPALCEVLRHPECNLRYLGLVSCSATTQQWADLSLALEVNQSLTCVNLSDNELLDEGAKLLYTTLRHPKCFLQRLSLENCHLTEANCKDLAAVLVVSRELTHLCLAKNPIGNTGVKFLCEGLRYPECKLQTLVLWNCDITSDGCCDLTKLLQEKSSLLCLDLGLNHIGVKGMKFLCEALRKPLCNLRCLWLWGCSIPPFSCEDLCSALSCNQSLVTLDLGQNPLGSSGVKMLFETLTCSSGTLRTLRLKIDDFNDELNKLLEEIEEKNPQLIIDTEKHHPWAERPSSHDFMI

SEQ ID NO: 57252 - protein, 1040 aa, Homo sapiens; identical to SEQ ID NO: 57248
  Payload ID: 11255
  Gene Symbol: NLRP2
  Gene Name: NLR family, pyrin domain containing 2
  Uniprot ID: Q9NX02
  ENSP ID: ENSP00000440601

SEQ ID NO: 57253 - protein, 165 aa, Homo sapiens
  Payload ID: 11255
  Gene Symbol: NLRP2
  Gene Name: NLR family, pyrin domain containing 2
  ENSP ID: ENSP00000441363
MLAIKRYKQPSAVAHACNPNTLGGREAALKSFNKRKPLSLGITRKERPPLDVDEMLERFKTEAQAFTETKGNVICLGKEVFKGKKPDKDNRCRYILKTKFREMWKSWPGDSKEVQVMAERYKMLIPFSNPRVLPGPFSYTVVLYGPAGLGKTTLAQKLMLDWAED

SEQ ID NO: 57254 - protein, 109 aa, Homo sapiens
  Payload ID: 11255
  Gene Symbol: NLRP2
  Gene Name: NLR family, pyrin domain containing 2
  ENSP ID: ENSP00000442351
MVSSAQMGFNLQALLEQLSQDELSKFKYLITTFSLAHELQKIPHKEVDKADGKQLVEILTTHCDSYWVEMASLQVFEKMHRMDLSERAKDEVREAALKSFNKRKPLSLG

SEQ ID NO: 57255 - protein, 154 aa, Homo sapiens
  Payload ID: 11255
  Gene Symbol: NLRP2
  Gene Name: NLR family, pyrin domain containing 2
  ENSP ID: ENSP00000443519
MVSSAQMGFNLQALLEQLSQDELSKFKYLITTFSLAHELQKIPHKEVDKADGKQLVEILTTHCDSYWVEMASLQVFEKMHRMDLSERAKDEVREAALKSFNKRKPLSLGITRKERPPLDVDEMLERFKTEAQAFTETKGNVICLGKEVFKGKKP

SEQ ID NO: 57256 - protein, 1062 aa, Homo sapiens; identical to SEQ ID NO: 57251
  Payload ID: 11255
  Gene Symbol: NLRP2
  Gene Name: NLR family, pyrin domain containing 2
  Uniprot ID: Q9NX02
  ENSP ID: ENSP00000445135

SEQ ID NO: 57257 - protein, 88 aa, Homo sapiens
  Payload ID: 11255
  Gene Symbol: NLRP2
  Gene Name: NLR family, pyrin domain containing 2
  ENSP ID: ENSP00000445846
GHKTVTYLTLQGNDQDDMFPALCEVLRHPECNLRYLGLVSCSATTQQWADLSLALEVNQSLTAAVLSIWGHRRAMVMPDLAVWNLSLM

SEQ ID NO: 57258 - protein, 124 aa, Homo sapiens
  Payload ID: 11255
  Gene Symbol: NLRP2
  Gene Name: NLR family, pyrin domain containing 2
  ENSP ID: ENSP00000465069
MVSSAQMGFNLQALLEQLSQDELSKFKYLITTFSLAHELQKIPHKEVDKADGKQLVEILTTHCDSYWVEMASLQVFEKMHRMDLSERAKDEVREAALKSFNKRKPLSLGITRKERPPLDVDEML

SEQ ID NO: 57259 - protein, 140 aa, Homo sapiens
  Payload ID: 11255
  Gene Symbol: NLRP2
  Gene Name: NLR family, pyrin domain containing 2
  ENSP ID: ENSP00000466260
MVSSAQMGFNLQALLEQLSQDELSKFKYLITTFSLAHELQKIPHKEVDKADGKQLVEILTTHCDSYWVEMASLQVFEKMHRMDLSERAKDEVREAALKSFNKRKPLSLGITRKERPPLDVDEMLERFKTEAQAFTETKGN

SEQ ID NO: 57260 - protein, 197 aa, Homo sapiens
  Payload ID: 11255
  Gene Symbol: NLRP2
  Gene Name: NLR family, pyrin domain containing 2
  ENSP ID: ENSP00000466537
  MOD_RES (1)..(1): Any amino acid
XSTVTDLQELLGCLYESQEEELVKEVMAQFKEISLHLNAVDVVPSSFCVKHCRNLQKMSLQVIKENLPENVTASESDAEVERSQDDQHMLPFWTDLCSIFGSNKDLMGLAINDSFLSASLVRILCEQIASDTCHLQRVVFKNISPADAHRNLCLALRGHKTVTYLTLQGNDQDDMFPALCEVLRHPECNLRYLGYIS

SEQ ID NO: 57261 - protein, 135 aa, Homo sapiens
  Payload ID: 11255
  Gene Symbol: NLRP2
  Gene Name: NLR family, pyrin domain containing 2
  ENSP ID: ENSP00000467349
MASLQVFEKMHRMDLSERAKDEVREAALKSFNKRKPLSLGITRKERPPLDVDEMLERFKTEAQAFTETKGNVICLGKEVFKGKKPDKDNRCRYILKTKFREMWKSWPGDSKEVQVMAERYKMLIPFSNPRVLPGP

SEQ ID NO: 57262 - protein, 9 aa, Homo sapiens
  Payload ID: 11255
  Gene Symbol: NLRP2
  Gene Name: NLR family, pyrin domain containing 2
  ENSP ID: ENSP00000469973
  MOD_RES (1)..(1): Any amino acid
XECNLRYLG

SEQ ID NO: 57263 - protein, 1040 aa, Homo sapiens; identical to SEQ ID NO: 57248
  Payload ID: 11255
  Gene Symbol: NLRP2
  Gene Name: NLR family, pyrin domain containing 2
  Uniprot ID: Q9NX02
  ENSP ID: ENSP00000477726

SEQ ID NO: 57264 - protein, 879 aa, Homo sapiens
  Payload ID: 11255
  Gene Symbol: NLRP2
  Gene Name: NLR family, pyrin domain containing 2
  ENSP ID: ENSP00000477745
MVSSAQMGFNLQALLEQLSQDELSKFKYLITTFSLAHELQKIPHKEVDKADGKQLVEILTTHCDSYWVEMASLQVFEKMHRMDLSERAKDEVREAALKSFNKRKPLSLAFTETKGNVICLGKEVFKGKKPDKDNRCRYILKTKFREMWKSWPGDSKEVQVMAERYKMLIPFSNPRVLPGPFSYTVVLYGPAGLGKTTLAQKLMLDWAEDNLIHKFKYAFYLSCRELSRLGPCSFAELVFRDWPELQDDIPHILAQARKILFVIDGFDELGAAPGALIEDICGDWEKKKPVPVLLGSLLNRVMLPKAALLVTTRPRALRDLRILAEEPIYIRVEGFLEEDRRAYFLRHFGDEDQAMRAFELMRSNAALFQLGSAPAVCWIVCTTLKLQMEKGEDPVPTCLTRTGLFLRFLCSRFPQGAQLRGALRTLSLLAAQGLWAQTSVLHREDLERLGVQESDLRLFLDGDILRQDRVSKGCYSFIHLSFQQFLTALFYTLEKEEEEDRDGHAWDIGDVQKLLSGVERLRNPDLIQAGYYSFGLANEKRAKELEATFGCRMSPDIKQELLRCDISCKGGHSTVTDLQELLGCLYESQEEELVKEVMAQFKEISLHLNAVDVVPSSFCVKHCRNLQKMSLQVIKENLPENVTASESDAEVERSQDDQHMLPFWTDLCSIFGSNKDLMGLAINDSFLSASLVRILCEQIASDTCHLQRVVFKNISPADAHRNLCLALRGHKTVTYLTLQGNDQDDMFPALCEVLRHPECNLRYLGLVSCSATTQQWADLSLALEVNQSLTCVNLSDNELLDEGAKLLYTTLRHPKCFLQRLSLENCHLTEANCKDLAAVLVVSRELTHLCLAKNPIGNTGVKFLCEGLRYPECKLQTLV

SEQ ID NO: 57265 - protein, 1040 aa, Homo sapiens
  Payload ID: 11255
  Gene Symbol: NLRP2
  Gene Name: NLR family, pyrin domain containing 2
  ENSP ID: ENSP00000478111
MVSSAQMGFNLQALLEQLSQDELSKFKYLITTFSLAHELQKIPHKEVDKADGKQLVEILTTHCDSYWVEMASLQVFEKMHRMDLSERAKDEVREAALKSFNKRKPLSLGITRKERPPLDVDEMLERFKTEAQDKDNRCRYILKTKFREMWKSWPGDSKEVQVMAERYKMLIPFSNPRVLPGPFSYTVVLYGPAGLGKTTLAQKLMLDWAEDNLIHKFKYAFYLSCRELSRLGPCSFAELVFRDWPELQDDIPHILAQARKILFVIDGFDELGAAPGALIEDICGDWEKKKPVPVLLGSLLNRVMLPKAALLVTTRPRALRDLRILAEEPIYIRVEGFLEEDRRAYFLRHFGDEDQAMRAFELMRSNAALFQLGSAPAVCWIVCTTLKLQMEKGEDPVPTCLTRTGLFLRFLCSRFPQGAQLRGALRTLSLLAAQGLWAQTSVLHREDLERLGVQESDLRLFLDGDILRQDRVSKGCYSFIHLSFQQFLTALFYTLEKEEEEDRDGHAWDIGDVQKLLSGVERLRNPDLIQAGYYSFGLANEKRAKELEATFGCRMSPDIKQELLRCDISCKGGHSTVTDLQELLGCLYESQEEELVKEVMAQFKEISLHLNAVDVVPSSFCVKHCRNLQKMSLQVIKENLPENVTASESDAEVERSQDDQHMLPFWTDLCSIFGSNKDLMGLAINDSFLSASLVRILCEQIASDTCHLQRVVFKNISPADAHRNLCLALRGHKTVTYLTLQGNDQDDMFPALCEVLRHPECNLRYLGLVSCSATTQQWADLSLALEVNQSLTCVNLSDNELLDEGAKLLYTTLRHPKCFLQRLSLENCHLTEANCKDLAAVLVVSRELTHLCLAKNPIGNTGVKFLCEGLRYPECKLQTLVLWNCDITSDGCCDLTKLLQEKSSLLCLDLGLNHIGVKGMKFLCEALRKPLCNLRCLWLWGCSIPPFSCEDLCSALSCNQSLVTLDLGQNPLGSSGVKMLFETLTCSSGTLRTLRLKIDDFNDELNKLLEEIEEKNPQLIIDTEKHHPWAERPSSHDFMI

SEQ ID NO: 57266 - protein, 1062 aa, Homo sapiens; identical to SEQ ID NO: 57251
  Payload ID: 11255
  Gene Symbol: NLRP2
  Gene Name: NLR family, pyrin domain containing 2
  Uniprot ID: Q9NX02
  ENSP ID: ENSP00000478265

SEQ ID NO: 57267 - protein, 1039 aa, Homo sapiens; identical to SEQ ID NO: 57250
  Payload ID: 11255
  Gene Symbol: NLRP2
  Gene Name: NLR family, pyrin domain containing 2
  Uniprot ID: Q9NX02
  ENSP ID: ENSP00000478318

SEQ ID NO: 57268 - protein, 1062 aa, Homo sapiens; identical to SEQ ID NO: 57251
  Payload ID: 11255
  Gene Symbol: NLRP2
  Gene Name: NLR family, pyrin domain containing 2
  ENSP ID: ENSP00000478450

SEQ ID NO: 57269 - protein, 154 aa, Homo sapiens; identical to SEQ ID NO: 57255
  Payload ID: 11255
  Gene Symbol: NLRP2
  Gene Name: NLR family, pyrin domain containing 2
  ENSP ID: ENSP00000478559

SEQ ID NO: 57270 - protein, 1062 aa, Homo sapiens; identical to SEQ ID NO: 57251
  Payload ID: 11255
  Gene Symbol: NLRP2
  Gene Name: NLR family, pyrin domain containing 2
  Uniprot ID: Q9NX02
  ENSP ID: ENSP00000478774

SEQ ID NO: 57271 - protein, 1040 aa, Homo sapiens; identical to SEQ ID NO: 57248
  Payload ID: 11255
  Gene Symbol: NLRP2
  Gene Name: NLR family, pyrin domain containing 2
  Uniprot ID: Q9NX02
  ENSP ID: ENSP00000478787

SEQ ID NO: 57272 - protein, 1062 aa, Homo sapiens; identical to SEQ ID NO: 57251
  Payload ID: 11255
  Gene Symbol: NLRP2
  Gene Name: NLR family, pyrin domain containing 2
  Uniprot ID: Q9NX02
  ENSP ID: ENSP00000478876

SEQ ID NO: 57273 - protein, 1062 aa, Homo sapiens; identical to SEQ ID NO: 57251
  Payload ID: 11255
  Gene Symbol: NLRP2
  Gene Name: NLR family, pyrin domain containing 2
  ENSP ID: ENSP00000479109

SEQ ID NO: 57274 - protein, 1039 aa, Homo sapiens
  Payload ID: 11255
  Gene Symbol: NLRP2
  Gene Name: NLR family, pyrin domain containing 2
  ENSP ID: ENSP00000479218
MVSSAQMGFNLQALLEQLSQDELSKFKYLITTFSLAHELQKIPHKEMASLQVFEKMHRMDLSERAKDEVREAALKSFNKRKPLSLGITRKERPPLDVDEMLERFKTEAQAFTETKGNVICLGKEVFKGKKPDKDNRCRYILKTKFREMWKSWPGDSKEVQVMAERYKMLIPFSNPRVLPGPFSYTVVLYGPAGLGKTTLAQKLMLDWAEDNLIHKFKYAFYLSCRELSRLGPCSFAELVFRDWPELQDDIPHILAQARKILFVIDGFDELGAAPGALIEDICGDWEKKKPVPVLLGSLLNRVMLPKAALLVTTRPRALRDLRILAEEPIYIRVEGFLEEDRRAYFLRHFGDEDQAMRAFELMRSNAALFQLGSAPAVCWIVCTTLKLQMEKGEDPVPTCLTRTGLFLRFLCSRFPQGAQLRGALRTLSLLAAQGLWAQTSVLHREDLERLGVQESDLRLFLDGDILRQDRVSKGCYSFIHLSFQQFLTALFYTLEKEEEEDRDGHAWDIGDVQKLLSGVERLRNPDLIQAGYYSFGLANEKRAKELEATFGCRMSPDIKQELLRCDISCKGGHSTVTDLQELLGCLYESQEEELVKEVMAQFKEISLHLNAVDVVPSSFCVKHCRNLQKMSLQVIKENLPENVTASESDAEVERSQDDQHMLPFWTDLCSIFGSNKDLMGLAINDSFLSASLVRILCEQIASDTCHLQRVVFKNISPADAHRNLCLALRGHKTVTYLTLQGNDQDDMFPALCEVLRHPECNLRYLGLVSCSATTQQWADLSLALEVNQSLTCVNLSDNELLDEGAKLLYTTLRHPKCFLQRLSLENCHLTEANCKDLAAVLVVSRELTHLCLAKNPIGNTGVKFLCEGLRYPECKLQTLVLWNCDITSDGCCDLTKLLQEKSSLLCLDLGLNHIGVKGMKFLCEALRKPLCNLRCLWLWGCSIPPFSCEDLCSALSCNQSLVTLDLGQNPLGSSGVKMLFETLTCSSGTLRTLRLKIDDFNDELNKLLEEIEEKNPQLIIDTEKHHPWAERPSSHDFMI

SEQ ID NO: 57275 - protein, 1062 aa, Homo sapiens; identical to SEQ ID NO: 57251
  Payload ID: 11255
  Gene Symbol: NLRP2
  Gene Name: NLR family, pyrin domain containing 2
  ENSP ID: ENSP00000479220

SEQ ID NO: 57276 - protein, 1062 aa, Homo sapiens; identical to SEQ ID NO: 57251
  Payload ID: 11255
  Gene Symbol: NLRP2
  Gene Name: NLR family, pyrin domain containing 2
  ENSP ID: ENSP00000479352

SEQ ID NO: 57277 - protein, 1059 aa, Homo sapiens; identical to SEQ ID NO: 57247
  Payload ID: 11255
  Gene Symbol: NLRP2
  Gene Name: NLR family, pyrin domain containing 2
  ENSP ID: ENSP00000479677

SEQ ID NO: 57278 - protein, 1062 aa, Homo sapiens; identical to SEQ ID NO: 57251
  Payload ID: 11255
  Gene Symbol: NLRP2
  Gene Name: NLR family, pyrin domain containing 2
  ENSP ID: ENSP00000479713

SEQ ID NO: 57279 - protein, 1062 aa, Homo sapiens; identical to SEQ ID NO: 57251
  Payload ID: 11255
  Gene Symbol: NLRP2
  Gene Name: NLR family, pyrin domain containing 2
  ENSP ID: ENSP00000479783

SEQ ID NO: 57280 - protein, 903 aa, Homo sapiens
  Payload ID: 11255
  Gene Symbol: NLRP2
  Gene Name: NLR family, pyrin domain containing 2
  ENSP ID: ENSP00000481095
MVSSAQMGFNLQALLEQLSQDELSKFKYLITTFSLAHELQKIPHKEVDKADGKQLVEILTTHCDSYWVEMASLQVFEKMHRMDLSERAKDEVREAALKSFNKRKPLSLGITRKERPPLDVDEMLERFKTEAQAFTETKGNVICLGKEVFKGKKPDKDNRCRYILKTKFREMWKSWPGDSKEVQVMAERYKMLIPFSNPRVLPGPFSYTVVLYGPAGLGKTTLAQKLMLDWAEDNLIHKFKYAFYLSCRELSRLGPCSFAELVFRDWPELQDDIPHILAQARKILFVIDGFDELGAAPGALIEDICGDWEKKKPVPVLLGSLLNRVMLPKAALLVTTRPRALRDLRILAEEPIYIRVEGFLEEDRRAYFLRHFGDEDQAMRAFELMRSNAALFQLGSAPAVCWIVCTTLKLQMEKGEDPVPTCLTRTGLFLRFLCSRFPQGAQLRGALRTLSLLAAQGLWAQTSVLHREDLERLGVQESDLRLFLDGDILRQDRVSKGCYSFIHLSFQQFLTALFYTLEKEEEEDRDGHAWDIGDVQKLLSGVERLRNPDLIQAGYYSFGLANEKRAKELEATFGCRMSPDIKQELLRCDISCKGGHSTVTDLQELLGCLYESQEEELVKEVMAQFKEISLHLNAVDVVPSSFCVKHCRNLQKMSLQVIKENLPENVTASESDAEVERSQDDQHMLPFWTDLCSIFGSNKDLMGLAINDSFLSASLVRILCEQIASDTCHLQRVVFKNISPADAHRNLCLALRGHKTVTYLTLQGNDQDDMFPALCEVLRHPECNLRYLGLVSCSATTQQWADLSLALEVNQSLTCVNLSDNELLDEGAKLLYTTLRHPKCFLQRLSLENCHLTEANCKDLAAVLVVSRELTHLCLAKNPIGNTGVKFLCEGLRYPECKLQTLV

SEQ ID NO: 57281 - protein, 165 aa, Homo sapiens; identical to SEQ ID NO: 57253
  Payload ID: 11255
  Gene Symbol: NLRP2
  Gene Name: NLR family, pyrin domain containing 2
  ENSP ID: ENSP00000481255

SEQ ID NO: 57282 - protein, 1040 aa, Homo sapiens; identical to SEQ ID NO: 57248
  Payload ID: 11255
  Gene Symbol: NLRP2
  Gene Name: NLR family, pyrin domain containing 2
  Uniprot ID: Q9NX02
  ENSP ID: ENSP00000481564

SEQ ID NO: 57283 - protein, 1062 aa, Homo sapiens; identical to SEQ ID NO: 57251
  Payload ID: 11255
  Gene Symbol: NLRP2
  Gene Name: NLR family, pyrin domain containing 2
  ENSP ID: ENSP00000481851

SEQ ID NO: 57284 - protein, 1040 aa, Homo sapiens; identical to SEQ ID NO: 57248
  Payload ID: 11255
  Gene Symbol: NLRP2
  Gene Name: NLR family, pyrin domain containing 2
  ENSP ID: ENSP00000481999

SEQ ID NO: 57285 - protein, 1040 aa, Homo sapiens; identical to SEQ ID NO: 57248
  Payload ID: 11255
  Gene Symbol: NLRP2
  Gene Name: NLR family, pyrin domain containing 2
  ENSP ID: ENSP00000482044

SEQ ID NO: 57286 - protein, 1039 aa, Homo sapiens; identical to SEQ ID NO: 57250
  Payload ID: 11255
  Gene Symbol: NLRP2
  Gene Name: NLR family, pyrin domain containing 2
  ENSP ID: ENSP00000482065

SEQ ID NO: 57287 - protein, 1062 aa, Homo sapiens; identical to SEQ ID NO: 57251
  Payload ID: 11255
  Gene Symbol: NLRP2
  Gene Name: NLR family, pyrin domain containing 2
  Uniprot ID: Q9NX02
  ENSP ID: ENSP00000482253

SEQ ID NO: 57288 - protein, 1039 aa, Homo sapiens; identical to SEQ ID NO: 57250
  Payload ID: 11255
  Gene Symbol: NLRP2
  Gene Name: NLR family, pyrin domain containing 2
  ENSP ID: ENSP00000482309

SEQ ID NO: 57289 - protein, 124 aa, Homo sapiens; identical to SEQ ID NO: 57258
  Payload ID: 11255
  Gene Symbol: NLRP2
  Gene Name: NLR family, pyrin domain containing 2
  ENSP ID: ENSP00000482327

SEQ ID NO: 57290 - protein, 1039 aa, Homo sapiens; identical to SEQ ID NO: 57250
  Payload ID: 11255
  Gene Symbol: NLRP2
  Gene Name: NLR family, pyrin domain containing 2
  ENSP ID: ENSP00000482355

SEQ ID NO: 57291 - protein, 1039 aa, Homo sapiens; identical to SEQ ID NO: 57250
  Payload ID: 11255
  Gene Symbol: NLRP2
  Gene Name: NLR family, pyrin domain containing 2
  ENSP ID: ENSP00000482465

SEQ ID NO: 57292 - protein, 1039 aa, Homo sapiens; identical to SEQ ID NO: 57250
  Payload ID: 11255
  Gene Symbol: NLRP2
  Gene Name: NLR family, pyrin domain containing 2
  Uniprot ID: Q9NX02
  ENSP ID: ENSP00000482628

SEQ ID NO: 57293 - protein, 1040 aa, Homo sapiens; identical to SEQ ID NO: 57248
  Payload ID: 11255
  Gene Symbol: NLRP2
  Gene Name: NLR family, pyrin domain containing 2
  ENSP ID: ENSP00000482727

SEQ ID NO: 57294 - protein, 881 aa, Homo sapiens
  Payload ID: 11255
  Gene Symbol: NLRP2
  Gene Name: NLR family, pyrin domain containing 2
  ENSP ID: ENSP00000482817
MVSSAQMGFNLQALLEQLSQDELSKFKYLITTFSLAHELQKIPHKEVDKADGKQLVEILTTHCDSYWVEMASLQVFEKMHRMDLSERAKDEVREAALKSFNKRKPLSLGITRKERPPLDVDEMLERFKTEAQDKDNRCRYILKTKFREMWKSWPGDSKEVQVMAERYKMLIPFSNPRVLPGPFSYTVVLYGPAGLGKTTLAQKLMLDWAEDNLIHKFKYAFYLSCRELSRLGPCSFAELVFRDWPELQDDIPHILAQARKILFVIDGFDELGAAPGALIEDICGDWEKKKPVPVLLGSLLNRVMLPKAALLVTTRPRALRDLRILAEEPIYIRVEGFLEEDRRAYFLRHFGDEDQAMRAFELMRSNAALFQLGSAPAVCWIVCTTLKLQMEKGEDPVPTCLTRTGLFLRFLCSRFPQGAQLRGALRTLSLLAAQGLWAQTSVLHREDLERLGVQESDLRLFLDGDILRQDRVSKGCYSFIHLSFQQFLTALFYTLEKEEEEDRDGHAWDIGDVQKLLSGVERLRNPDLIQAGYYSFGLANEKRAKELEATFGCRMSPDIKQELLRCDISCKGGHSTVTDLQELLGCLYESQEEELVKEVMAQFKEISLHLNAVDVVPSSFCVKHCRNLQKMSLQVIKENLPENVTASESDAEVERSQDDQHMLPFWTDLCSIFGSNKDLMGLAINDSFLSASLVRILCEQIASDTCHLQRVVFKNISPADAHRNLCLALRGHKTVTYLTLQGNDQDDMFPALCEVLRHPECNLRYLGLVSCSATTQQWADLSLALEVNQSLTCVNLSDNELLDEGAKLLYTTLRHPKCFLQRLSLENCHLTEANCKDLAAVLVVSRELTHLCLAKNPIGNTGVKFLCEGLRYPECKLQTLV

SEQ ID NO: 57295 - protein, 1062 aa, Homo sapiens; identical to SEQ ID NO: 57251
  Payload ID: 11255
  Gene Symbol: NLRP2
  Gene Name: NLR family, pyrin domain containing 2
  Uniprot ID: Q9NX02
  ENSP ID: ENSP00000482889

SEQ ID NO: 57296 - protein, 1062 aa, Homo sapiens; identical to SEQ ID NO: 57251
  Payload ID: 11255
  Gene Symbol: NLRP2
  Gene Name: NLR family, pyrin domain containing 2
  Uniprot ID: Q9NX02
  ENSP ID: ENSP00000483281

SEQ ID NO: 57297 - protein, 197 aa, Homo sapiens; identical to SEQ ID NO: 57260
  Payload ID: 11255
  Gene Symbol: NLRP2
  Gene Name: NLR family, pyrin domain containing 2
  ENSP ID: ENSP00000483306
  MOD_RES (1)..(1): Any amino acid

SEQ ID NO: 57298 - protein, 846 aa, Homo sapiens
  Payload ID: 11255
  Gene Symbol: NLRP2
  Gene Name: NLR family, pyrin domain containing 2
  ENSP ID: ENSP00000483318
MVSSAQMGFNLQALLEQLSQDELSKFKYLITTFSLAHELQKIPHKEVDKADGKQLVEILTTHCDSYWVEMASLQVFEKMHRMDLSERAKDEVREAALKSFNKRKPLSLGITRKERPPLDVDEMLERFKTEAQAFTETKGNVICLGKEVFKGKKPDKDNRCRYILKTKFREMWKSWPGDSKEVQVMAERYKMLIPFSNPRVLPGPFSYTVVLYGPAGLGKTTLAQKLMLDWAEDNLIHKFKYAFYLSCRELSRLGPCSFAELVFRDWPELQDDIPHILAQARKILFVIDGFDELGAAPGALIEDICGDWEKKKPVPVLLGSLLNRVMLPKAALLVTTRPRALRDLRILAEEPIYIRVEGFLEEDRRAYFLRHFGDEDQAMRAFELMRSNAALFQLGSAPAVCWIVCTTLKLQMEKGEDPVPTCLTRTGLFLRFLCSRFPQGAQLRGALRTLSLLAAQGLWAQTSVLHREDLERLGVQESDLRLFLDGDILRQDRVSKGCYSFIHLSFQQFLTALFYTLEKEEEEDRDGHAWDIGDVQKLLSGVERLRNPDLIQAGYYSFGLANEKRAKELEATFGCRMSPDIKQELLRCDISCKGGHSTVTDLQELLGCLYESQEEELVKEVMAQFKEISLHLNAVDVVPSSFCVKHCRNLQKMSLQVIKENLPENVTASESDAEVERSQDDQHMLPFWTDLCSIFGSNKDLMGLAINDSFLSASLVRILCEQIASDTCHLQRVVFKNISPADAHRNLCLALRGHKTVTYLTLQGNDQDDMFPALCEVLRHPECNLRYLGLVSCSATTQQWADLSLALEVNQSLTCVNLSDNELLDEGAKLLYTTLRHPKCFLQRLS

SEQ ID NO: 57299 - protein, 140 aa, Homo sapiens; identical to SEQ ID NO: 57259
  Payload ID: 11255
  Gene Symbol: NLRP2
  Gene Name: NLR family, pyrin domain containing 2
  ENSP ID: ENSP00000483361

SEQ ID NO: 57300 - protein, 1040 aa, Homo sapiens; identical to SEQ ID NO: 57248
  Payload ID: 11255
  Gene Symbol: NLRP2
  Gene Name: NLR family, pyrin domain containing 2
  ENSP ID: ENSP00000483389

SEQ ID NO: 57301 - protein, 1062 aa, Homo sapiens; identical to SEQ ID NO: 57251
  Payload ID: 11255
  Gene Symbol: NLRP2
  Gene Name: NLR family, pyrin domain containing 2
  ENSP ID: ENSP00000483528

SEQ ID NO: 57302 - protein, 109 aa, Homo sapiens; identical to SEQ ID NO: 57254
  Payload ID: 11255
  Gene Symbol: NLRP2
  Gene Name: NLR family, pyrin domain containing 2
  ENSP ID: ENSP00000483772

SEQ ID NO: 57303 - protein, 1040 aa, Homo sapiens; identical to SEQ ID NO: 57248
  Payload ID: 11255
  Gene Symbol: NLRP2
  Gene Name: NLR family, pyrin domain containing 2
  ENSP ID: ENSP00000483886

SEQ ID NO: 57304 - protein, 1062 aa, Homo sapiens; identical to SEQ ID NO: 57251
  Payload ID: 11255
  Gene Symbol: NLRP2
  Gene Name: NLR family, pyrin domain containing 2
  ENSP ID: ENSP00000483963

SEQ ID NO: 57305 - protein, 1062 aa, Homo sapiens
  Payload ID: 11255
  Gene Symbol: NLRP2
  Gene Name: NLR family, pyrin domain containing 2
  ENSP ID: ENSP00000484080
MVSSAQMGFNLQALLEQLSQDELSKFKYLITTFSLAHELQKIPHKEVDKADGKQLVEILTTHCDSYWVEMASLQVFEKMHRMDLSERAKDEVREAALKSFNKRKPLSLGITRKERPPLDVDEMLERFKTEAQAFTETKGNVICLGKEVFKGKKPDKDNRCRYILKTKFREMWKSWPGDSKEVQVMAERYKMLIPFSNPRVLPGPFSYTVVLYGPAGLGKTTLAQKLMLDWAEDNLIHKFKYAFYLSCRELSRLGPCSFAELVFRDWPELQDDIPHILAQARKILFVIDGFDELGAAPGALIEDICGDWEKKKPVPVLLGSLLNRVMLPKAALLVTTRPRALRDLRILAEEPIYIRVEGFLEEDRRAYFLRHFGDEDQAMRAFELMRSNAALFQLGSAPAVCWIVCTTLKLQMEKGEDPVPTCLTRTGLFLRFLCSRFPQGAQLRGALRTLSLLAAQGLWAQTSVLHREDLERLGVQESDLRLFLDGDILRQDRVSKGCYSFIHLSFQQFLTALFYTLEKEEEEDRDGHAWDIGDVQKLLSGVERLRNPDLIQAGYYSFGLANEKRAKELEATFGCRMSPDIKQELLRCDISCKGGHSTVTDLQELLGCLYESQEEELVKEVMAQFKEISLHLNAVDVVPSSFCVKHCRNLQKMSLQVIKENLPENVTASESDAEVERSQDDQHMLPFWTDLCSIFGSNKDLMGLAINDSFLSASLVRILCEQIASDTCHLQRVVFKNISPADAHRNLCLALRGHKTVTYLTLQGNDQDDMFPALCEVLRHPECNLRYLGLVSCSATTQQWADLSLALEVNQSLTCVNLSDNELLDEGAKLLYTTLRHPKCFLQRLSLENCHLTEANCKDLAAVLVVSRELTHLCLAKNPIGNTGVKFLCEGLRYPECKLQTLVLWNCDITSDGCCDLTKLLQEKSSLLCLDLGLNHIGVKGMKFLCEALRKPLCNLRCLWLWGCSIPPFSCEDLCSALSCNQSLVTLDLGQNPLGSSGVKMLFETLTCSSGTLRTLRLKIDDFNDELNKLLEEIEEKNPQLIIDTEKHHPWAERPSSHDFMI

SEQ ID NO: 57306 - protein, 1039 aa, Homo sapiens; identical to SEQ ID NO: 57250
  Payload ID: 11255
  Gene Symbol: NLRP2
  Gene Name: NLR family, pyrin domain containing 2
  ENSP ID: ENSP00000484150

SEQ ID NO: 57307 - protein, 1040 aa, Homo sapiens; identical to SEQ ID NO: 57248
  Payload ID: 11255
  Gene Symbol: NLRP2
  Gene Name: NLR family, pyrin domain containing 2
  Uniprot ID: Q9NX02
  ENSP ID: ENSP00000484351

SEQ ID NO: 57308 - protein, 1062 aa, Homo sapiens; identical to SEQ ID NO: 57251
  Payload ID: 11255
  Gene Symbol: NLRP2
  Gene Name: NLR family, pyrin domain containing 2
  ENSP ID: ENSP00000484354

SEQ ID NO: 57309 - protein, 1038 aa, Homo sapiens; identical to SEQ ID NO: 57249
  Payload ID: 11255
  Gene Symbol: NLRP2
  Gene Name: NLR family, pyrin domain containing 2
  Uniprot ID: Q9NX02
  ENSP ID: ENSP00000484382

SEQ ID NO: 57310 - protein, 9 aa, Homo sapiens
  Payload ID: 11255
  Gene Symbol: NLRP2
  Gene Name: NLR family, pyrin domain containing 2
  ENSP ID: ENSP00000484627
  MOD_RES (1)..(1): Any amino acid
XECNLRYLG

SEQ ID NO: 57311 - protein, 1039 aa, Homo sapiens; identical to SEQ ID NO: 57250
  Payload ID: 11255
  Gene Symbol: NLRP2
  Gene Name: NLR family, pyrin domain containing 2
  Uniprot ID: Q9NX02
  ENSP ID: ENSP00000484759

SEQ ID NO: 57312 - protein, 135 aa, Homo sapiens; identical to SEQ ID NO: 57261
  Payload ID: 11255
  Gene Symbol: NLRP2
  Gene Name: NLR family, pyrin domain containing 2
  ENSP ID: ENSP00000484846

SEQ ID NO: 57313 - protein, 88 aa, Homo sapiens; identical to SEQ ID NO: 57257
  Payload ID: 11255
  Gene Symbol: NLRP2
  Gene Name: NLR family, pyrin domain containing 2
  ENSP ID: ENSP00000484848

SEQ ID NO: 57314 - protein, 45 aa, Homo sapiens
  Payload ID: 11256
  Gene Symbol: NLRP2P
  Gene Name: NLR family, pyrin domain containing 2 pseudogene
  Uniprot ID: P0DMW2
  ENSP ID: ENSP00000488995
MVSSAQLDFNLQALLGQLSQDDLCKFKSLIRTVSLGNELQKIPQT

SEQ ID NO: 57315 - protein, 922 aa, Homo sapiens
  Payload ID: 11257
  Gene Symbol: NLRP3
  Gene Name: NLR family, pyrin domain containing 3
  Uniprot ID: Q96P20
  ENSP ID: ENSP00000294752
MKMASTRCKLARYLEDLEDVDLKKFKMHLEDYPPQKGCIPLPRGQTEKADHVDLATLMIDFNGEEKAWAMAVWIFAAINRRDLYEKAKRDEPKWGSDNARVSNPTVICQEDSIEEEWMGLLEYLSRISICKMKKDYRKKYRKYVRSRFQCIEDRNARLGESVSLNKRYTRLRLIKEHRSQQEREQELLAIGKTKTCESPVSPIKMELLFDPDDEHSEPVHTVVFQGAAGIGKTILARKMMLDWASGTLYQDRFDYLFYIHCREVSLVTQRSLGDLIMSCCPDPNPPIHKIVRKPSRILFLMDGFDELQGAFDEHIGPLCTDWQKAERGDILLSSLIRKKLLPEASLLITTRPVALEKLQHLLDHPRHVEILGFSEAKRKEYFFKYFSDEAQARAAFSLIQENEVLFTMCFIPLVCWIVCTGLKQQMESGKSLAQTSKTTTAVYVFFLSSLLQPRGGSQEHGLCAHLWGLCSLAADGIWNQKILFEESDLRNHGLQKADVSAFLRMNLFQKEVDCEKFYSFIHMTFQEFFAAMYYLLEEEKEGRTNVPGSRLKLPSRDVTVLLENYGKFEKGYLIFVVRFLFGLVNQERTSYLEKKLSCKISQQIRLELLKWIEVKAKAKKLQIQPSQLELFYCLYEMQEEDFVQRAMDYFPKIEINLSTRMDHMVSSFCIENCHRVESLSLGFLHNMPKEEEEEEKEGRHLDMVQCVLPSSSHAACSHGLGRCGLSHECCFDISLVLSSNQKLVELDLSDNALGDFGIRLLCVGLKHLLCNLKKLWLVNSGLTSVCCSALSSVLSTNQNLTHLYLRGNTLGDKGIKLLCEGLLHPDCKLQVLELDNCNLTSHCCWDLSTLLTSSQSLRKLSLGNNDLGDLGVMMFCEVLKQQSCLLQNLGLSEMYFNYETKSALETLQEEKPELTVVFEPSW

SEQ ID NO: 57316 - protein, 1036 aa, Homo sapiens
  Payload ID: 11257
  Gene Symbol: NLRP3
  Gene Name: NLR family, pyrin domain containing 3
  Uniprot ID: Q96P20
  ENSP ID: ENSP00000337383
MKMASTRCKLARYLEDLEDVDLKKFKMHLEDYPPQKGCIPLPRGQTEKADHVDLATLMIDFNGEEKAWAMAVWIFAAINRRDLYEKAKRDEPKWGSDNARVSNPTVICQEDSIEEEWMGLLEYLSRISICKMKKDYRKKYRKYVRSRFQCIEDRNARLGESVSLNKRYTRLRLIKEHRSQQEREQELLAIGKTKTCESPVSPIKMELLFDPDDEHSEPVHTVVFQGAAGIGKTILARKMMLDWASGTLYQDRFDYLFYIHCREVSLVTQRSLGDLIMSCCPDPNPPIHKIVRKPSRILFLMDGFDELQGAFDEHIGPLCTDWQKAERGDILLSSLIRKKLLPEASLLITTRPVALEKLQHLLDHPRHVEILGFSEAKRKEYFFKYFSDEAQARAAFSLIQENEVLFTMCFIPLVCWIVCTGLKQQMESGKSLAQTSKTTTAVYVFFLSSLLQPRGGSQEHGLCAHLWGLCSLAADGIWNQKILFEESDLRNHGLQKADVSAFLRMNLFQKEVDCEKFYSFIHMTFQEFFAAMYYLLEEEKEGRTNVPGSRLKLPSRDVTVLLENYGKFEKGYLIFVVRFLFGLVNQERTSYLEKKLSCKISQQIRLELLKWIEVKAKAKKLQIQPSQLELFYCLYEMQEEDFVQRAMDYFPKIEINLSTRMDHMVSSFCIENCHRVESLSLGFLHNMPKEEEEEEKEGRHLDMVQCVLPSSSHAACSHGLVNSHLTSSFCRGLFSVLSTSQSLTELDLSDNSLGDPGMRVLCETLQHPGCNIRRLWLGRCGLSHECCFDISLVLSSNQKLVELDLSDNALGDFGIRLLCVGLKHLLCNLKKLWLVSCCLTSACCQDLASVLSTSHSLTRLYVGENALGDSGVAILCEKAKNPQCNLQKLGLVNSGLTSVCCSALSSVLSTNQNLTHLYLRGNTLGDKGIKLLCEGLLHPDCKLQVLELDNCNLTSHCCWDLSTLLTSSQSLRKLSLGNNDLGDLGVMMFCEVLKQQSCLLQNLGLSEMYFNYETKSALETLQEEKPELTVVFEPSW

SEQ ID NO: 57317 - protein, 979 aa, Homo sapiens
  Payload ID: 11257
  Gene Symbol: NLRP3
  Gene Name: NLR family, pyrin domain containing 3
  Uniprot ID: Q96P20
  ENSP ID: ENSP00000355452
MKMASTRCKLARYLEDLEDVDLKKFKMHLEDYPPQKGCIPLPRGQTEKADHVDLATLMIDFNGEEKAWAMAVWIFAAINRRDLYEKAKRDEPKWGSDNARVSNPTVICQEDSIEEEWMGLLEYLSRISICKMKKDYRKKYRKYVRSRFQCIEDRNARLGESVSLNKRYTRLRLIKEHRSQQEREQELLAIGKTKTCESPVSPIKMELLFDPDDEHSEPVHTVVFQGAAGIGKTILARKMMLDWASGTLYQDRFDYLFYIHCREVSLVTQRSLGDLIMSCCPDPNPPIHKIVRKPSRILFLMDGFDELQGAFDEHIGPLCTDWQKAERGDILLSSLIRKKLLPEASLLITTRPVALEKLQHLLDHPRHVEILGFSEAKRKEYFFKYFSDEAQARAAFSLIQENEVLFTMCFIPLVCWIVCTGLKQQMESGKSLAQTSKTTTAVYVFFLSSLLQPRGGSQEHGLCAHLWGLCSLAADGIWNQKILFEESDLRNHGLQKADVSAFLRMNLFQKEVDCEKFYSFIHMTFQEFFAAMYYLLEEEKEGRTNVPGSRLKLPSRDVTVLLENYGKFEKGYLIFVVRFLFGLVNQERTSYLEKKLSCKISQQIRLELLKWIEVKAKAKKLQIQPSQLELFYCLYEMQEEDFVQRAMDYFPKIEINLSTRMDHMVSSFCIENCHRVESLSLGFLHNMPKEEEEEEKEGRHLDMVQCVLPSSSHAACSHGLVNSHLTSSFCRGLFSVLSTSQSLTELDLSDNSLGDPGMRVLCETLQHPGCNIRRLWLGRCGLSHECCFDISLVLSSNQKLVELDLSDNALGDFGIRLLCVGLKHLLCNLKKLWLVNSGLTSVCCSALSSVLSTNQNLTHLYLRGNTLGDKGIKLLCEGLLHPDCKLQVLELDNCNLTSHCCWDLSTLLTSSQSLRKLSLGNNDLGDLGVMMFCEVLKQQSCLLQNLGLSEMYFNYETKSALETLQEEKPELTVVFEPSW

SEQ ID NO: 57318 - protein, 979 aa, Homo sapiens; identical to SEQ ID NO: 57317
  Payload ID: 11257
  Gene Symbol: NLRP3
  Gene Name: NLR family, pyrin domain containing 3
  Uniprot ID: Q96P20
  ENSP ID: ENSP00000355453

SEQ ID NO: 57319 - protein, 979 aa, Homo sapiens
  Payload ID: 11257
  Gene Symbol: NLRP3
  Gene Name: NLR family, pyrin domain containing 3
  Uniprot ID: Q96P20
  ENSP ID: ENSP00000375703
MKMASTRCKLARYLEDLEDVDLKKFKMHLEDYPPQKGCIPLPRGQTEKADHVDLATLMIDFNGEEKAWAMAVWIFAAINRRDLYEKAKRDEPKWGSDNARVSNPTVICQEDSIEEEWMGLLEYLSRISICKMKKDYRKKYRKYVRSRFQCIEDRNARLGESVSLNKRYTRLRLIKEHRSQQEREQELLAIGKTKTCESPVSPIKMELLFDPDDEHSEPVHTVVFQGAAGIGKTILARKMMLDWASGTLYQDRFDYLFYIHCREVSLVTQRSLGDLIMSCCPDPNPPIHKIVRKPSRILFLMDGFDELQGAFDEHIGPLCTDWQKAERGDILLSSLIRKKLLPEASLLITTRPVALEKLQHLLDHPRHVEILGFSEAKRKEYFFKYFSDEAQARAAFSLIQENEVLFTMCFIPLVCWIVCTGLKQQMESGKSLAQTSKTTTAVYVFFLSSLLQPRGGSQEHGLCAHLWGLCSLAADGIWNQKILFEESDLRNHGLQKADVSAFLRMNLFQKEVDCEKFYSFIHMTFQEFFAAMYYLLEEEKEGRTNVPGSRLKLPSRDVTVLLENYGKFEKGYLIFVVRFLFGLVNQERTSYLEKKLSCKISQQIRLELLKWIEVKAKAKKLQIQPSQLELFYCLYEMQEEDFVQRAMDYFPKIEINLSTRMDHMVSSFCIENCHRVESLSLGFLHNMPKEEEEEEKEGRHLDMVQCVLPSSSHAACSHGLGRCGLSHECCFDISLVLSSNQKLVELDLSDNALGDFGIRLLCVGLKHLLCNLKKLWLVSCCLTSACCQDLASVLSTSHSLTRLYVGENALGDSGVAILCEKAKNPQCNLQKLGLVNSGLTSVCCSALSSVLSTNQNLTHLYLRGNTLGDKGIKLLCEGLLHPDCKLQVLELDNCNLTSHCCWDLSTLLTSSQSLRKLSLGNNDLGDLGVMMFCEVLKQQSCLLQNLGLSEMYFNYETKSALETLQEEKPELTVVFEPSW

SEQ ID NO: 57320 - protein, 1036 aa, Homo sapiens; identical to SEQ ID NO: 57316
  Payload ID: 11257
  Gene Symbol: NLRP3
  Gene Name: NLR family, pyrin domain containing 3
  Uniprot ID: Q96P20
  ENSP ID: ENSP00000375704

SEQ ID NO: 57321 - protein, 994 aa, Homo sapiens
  Payload ID: 11258
  Gene Symbol: NLRP4
  Gene Name: NLR family, pyrin domain containing 4
  Uniprot ID: Q96MN2
  ENSP ID: ENSP00000301295
MAASFFSDFGLMWYLEELKKEEFRKFKEHLKQMTLQLELKQIPWTEVKKASREELANLLIKHYEEQQAWNITLRIFQKMDRKDLCMKVMRERTGYTKTYQAHAKQKFSRLWSSKSVTEIHLYFEEEVKQEECDHLDRLFAPKEAGKQPRTVIIQGPQGIGKTTLLMKLMMAWSDNKIFRDRFLYTFYFCCRELRELPPTSLADLISREWPDPAAPITEIVSQPERLLFVIDSFEELQGGLNEPDSDLCGDLMEKRPVQVLLSSLLRKKMLPEASLLIAIKPVCPKELRDQVTISEIYQPRGFNESDRLVYFCCFFKDPKRAMEAFNLVRESEQLFSICQIPLLCWILCTSLKQEMQKGKDLALTCQSTTSVYSSFVFNLFTPEGAEGPTPQTQHQLKALCSLAAEGMWTDTFEFCEDDLRRNGVVDADIPALLGTKILLKYGERESSYVFLHVCIQEFCAALFYLLKSHLDHPHPAVRCVQELLVANFEKARRAHWIFLGCFLTGLLNKKEQEKLDAFFGFQLSQEIKQQIHQCLKSLGERGNPQGQVDSLAIFYCLFEMQDPAFVKQAVNLLQEANFHIIDNVDLVVSAYCLKYCSSLRKLCFSVQNVFKKEDEHSSTSDYSLICWHHICSVLTTSGHLRELQVQDSTLSESTFVTWCNQLRHPSCRLQKLGINNVSFSGQSVLLFEVLFYQPDLKYLSFTLTKLSRDDIRSLCDALNYPAGNVKELALVNCHLSPIDCEVLAGLLTNNKKLTYLNVSCNQLDTGVPLLCEALCSPDTVLVYLMLAFCHLSEQCCEYISEMLLRNKSVRYLDLSANVLKDEGLKTLCEALKHPDCCLDSLCLVKCFITAAGCEDLASALISNQNLKILQIGCNEIGDVGVQLLCRALTHTDCRLEILGLEECGLTSTCCKDLASVLTCSKTLQQLNLTLNTLDHTGVVVLCEALRHPECALQVLGLRKTDFDEETQALLTAEEERNPNLTITDDCDTITRVEI

SEQ ID NO: 57322 - protein, 919 aa, Homo sapiens
  Payload ID: 11258
  Gene Symbol: NLRP4
  Gene Name: NLR family, pyrin domain containing 4
  Uniprot ID: Q96MN2
  ENSP ID: ENSP00000465463
MQECLTLWVFSPLALTDSGYTKTYQAHAKQKFSRLWSSKSVTEIHLYFEEEVKQEECDHLDRLFAPKEAGKQPRTVIIQGPQGIGKTTLLMKLMMAWSDNKIFRDRFLYTFYFCCRELRELPPTSLADLISREWPDPAAPITEIVSQPERLLFVIDSFEELQGGLNEPDSDLCGDLMEKRPVQVLLSSLLRKKMLPEASLLIAIKPVCPKELRDQVTISEIYQPRGFNESDRLVYFCCFFKDPKRAMEAFNLVRESEQLFSICQIPLLCWILCTSLKQEMQKGKDLALTCQSTTSVYSSFVFNLFTPEGAEGPTPQTQHQLKALCSLAAEGMWTDTFEFCEDDLRRNGVVDADIPALLGTKILLKYGERESSYVFLHVCIQEFCAALFYLLKSHLDHPHPAVRCVQELLVANFEKARRAHWIFLGCFLTGLLNKKEQEKLDAFFGFQLSQEIKQQIHQCLKSLGERGNPQGQVDSLAIFYCLFEMQDPAFVKQAVNLLQEANFHIIDNVDLVVSAYCLKYCSSLRKLCFSVQNVFKKEDEHSSTSDYSLICWHHICSVLTTSGHLRELQVQDSTLSESTFVTWCNQLRHPSCRLQKLGINNVSFSGQSVLLFEVLFYQPDLKYLSFTLTKLSRDDIRSLCDALNYPAGNVKELALVNCHLSPIDCEVLAGLLTNNKKLTYLNVSCNQLDTGVPLLCEALCSPDTVLVYLMLAFCHLSEQCCEYISEMLLRNKSVRYLDLSANVLKDEGLKTLCEALKHPDCCLDSLCLVKCFITAAGCEDLASALISNQNLKILQIGCNEIGDVGVQLLCRALTHTDCRLEILGLEECGLTSTCCKDLASVLTCSKTLQQLNLTLNTLDHTGVVVLCEALRHPECALQVLGLRKTDFDEETQALLTAEEERNPNLTITDDCDTITRVEI

SEQ ID NO: 57323 - protein, 155 aa, Homo sapiens
  Payload ID: 11258
  Gene Symbol: NLRP4
  Gene Name: NLR family, pyrin domain containing 4
  ENSP ID: ENSP00000468496
MAASFFSDFGLMWYLEELKKEEFRKFKEHLKQMTLQLELKQIPWTEVKKASREELANLLIKHYEEQQAWNITLRIFQKMDRKDLCMKVMRERTGYTKTYQAHAKQKFSRLWSSKSVTEIHLYFEEEVKQEECDHLDRLFAPKEAGKQPRTVIIQG

SEQ ID NO: 57324 - protein, 504 aa, Homo sapiens
  Payload ID: 11258
  Gene Symbol: NLRP4
  Gene Name: NLR family, pyrin domain containing 4
  ENSP ID: ENSP00000468754
  MOD_RES (1)..(1): Any amino acid
XKILLKYGERESSYVFLHVCIQEFCAALFYLLKSHLDHPHPAVRCVQELLVANFEKARRAHWIFLGCFLTGLLNKKEQEKLDAFFGFQLSQEIKQQIHQCLKSLGERGNPQGQVDSLAIFYCLFEMQDPAFVKQAVNLLQEANFHIIDNVDLVVSAYCLKYCSSLRKLCFSVQNVFKKEDEHSSTSDYSLICWHHICSVLTTSGHLRELQVQDSTLSESTFVTWCNQLRHPSCRLQKLGINNVSFSGQSVLLFEVLFYQPDLKYLSFTLTKLSRDDIRSLCDALNYPAGNVKELALAFCHLSEQCCEYISEMLLRNKSVRYLDLSANVLKDEGLKTLCEALKHPDCCLDSLCLVKCFITAAGCEDLASALISNQNLKILQIGCNEIGDVGVQLLCRALTHTDCRLEILGLEECGLTSTCCKDLASVLTCSKTLQQLNLTLNTLDHTGVVVLCEALRHPECALQVLGLRKTDFDEETQALLTAEEERNPNLTITDDCDTITRVEI

SEQ ID NO: 57325 - protein, 1200 aa, Homo sapiens
  Payload ID: 11259
  Gene Symbol: NLRP5
  Gene Name: NLR family, pyrin domain containing 5
  Uniprot ID: P59047
  ENSP ID: ENSP00000375063
MKVAGGLELGAAALLSASPRALVTLSTGPTCSILPKNPLFPQNLSSQPCIKMEGDKSLTFSSYGLQWCLYELDKEEFQTFKELLKKKSSESTTCSIPQFEIENANVECLALLLHEYYGASLAWATSISIFENMNLRTLSEKARDDMKRHSPEDPEATMTDQGPSKEKVPGISQAVQQDSATAAETKEQEISQAMEQEGATAAETEEQEISQAMEQEGATAAETEEQGHGGDTWDYKSHVMTKFAEEEDVRRSFENTAADWPEMQTLAGAFDSDRWGFRPRTVVLHGKSGIGKSALARRIVLCWAQGGLYQGMFSYVFFLPVREMQRKKESSVTEFISREWPDSQAPVTEIMSRPERLLFIIDGFDDLGSVLNNDTKLCKDWAEKQPPFTLIRSLLRKVLLPESFLIVTVRDVGTEKLKSEVVSPRYLLVRGISGEQRIHLLLERGIGEHQKTQGLRAIMNNRELLDQCQVPAVGSLICVALQLQDVVGESVAPFNQTLTGLHAAFVFHQLTPRGVVRRCLNLEERVVLKRFCRMAVEGVWNRKSVFDGDDLMVQGLGESELRALFHMNILLPDSHCEEYYTFFHLSLQDFCAALYYVLEGLEIEPALCPLYVEKTKRSMELKQAGFHIHSLWMKRFLFGLVSEDVRRPLEVLLGCPVPLGVKQKLLHWVSLLGQQPNATTPGDTLDAFHCLFETQDKEFVRLALNSFQEVWLPINQNLDLIASSFCLQHCPYLRKIRVDVKGIFPRDESAEACPVVPLWMRDKTLIEEQWEDFCSMLGTHPHLRQLDLGSSILTERAMKTLCAKLRHPTCKIQTLMFRNAQITPGVQHLWRIVMANRNLRSLNLGGTHLKEEDVRMACEALKHPKCLLESLRLDCCGLTHACYLKISQILTTSPSLKSLSLAGNKVTDQGVMPLSDALRVSQCALQKLILEDCGITATGCQSLASALVSNRSLTHLCLSNNSLGNEGVNLLCRSMRLPHCSLQRLMLNQCHLDTAGCGFLALALMGNSWLTHLSLSMNPVEDNGVKLLCEVMREPSCHLQDLELVKCHLTAACCESLSCVISRSRHLKSLDLTDNALGDGGVAALCEGLKQKNSVLARLGLKACGLTSDCCEALSLALSCNRHLTSLNLVQNNFSPKGMMKLCSAFACPTSNLQIIGLWKWQYPVQIRKLLEEVQLLKPRVVIDGSWHSFDEDDRYWWKN

SEQ ID NO: 57326 - protein, 178 aa, Homo sapiens
  Payload ID: 11259
  Gene Symbol: NLRP5
  Gene Name: NLR family, pyrin domain containing 5
  ENSP ID: ENSP00000471494
GPTCSILPKNPLFPQNLSSQPCIKMEGDKSLTFSSYGLQWCLYELDKEEFQTFKELLKKKSSESTTCSIPQFEIENANVECLALLLHEYYGASLAWATSISIFENMNLRTLSEKARDDMKRHSPEDPEATMTDQGPSKEKVPGISQAVQQDSATAAETKEQESFAVLLRLQCSGYPQA

SEQ ID NO: 57327 - protein, 1200 aa, Homo sapiens
  Payload ID: 11259
  Gene Symbol: NLRP5
  Gene Name: NLR family, pyrin domain containing 5
  ENSP ID: ENSP00000481137
MKVAGGLELGAAALLSASPRALVTLSTGPTCSILPKNPLFPQNLSSQPCIKMEGDKSLTFSSYGLQWCLYELDKEEFQTFKELLKKKSSESTTCSIPQFEIENANVECLALLLHEYYGASLAWATSISIFENMNLRTLSEKARDDMKRHSPEDPEATMTDQGPSKEKVPDISDSNNKHKYVGIHSSFAEISQAMEQEGATAAETEEQEISQAMEQEGATAAETEEQGHGGDTWDYKSHVMTKFAEEEDVRRSFENTAADWPEMQTLAGAFDSDRWGFRPRTVVLHGKSGIGKSALARRIVLCWAQGGLYQGMFSYVFFLPVREMQRKKESSVTEFISREWPDSQAPVTEIMSRPERLLFIIDGFDDLGSVLNNDTKLCKDWAEKQPPFTLIRSLLRKVLLPESFLIVTVRDVGTEKLKSEVVSPRYLLVRGISGEQRIHLLLERGIGEHQKTQGLRAIMNNRELLDQCQVPAVGSLICVALQLQDVVGESVAPFNQTLTGLHAAFVFHQLTPRGVVRRCLNLEERVVLKRFCRMAVEGVWNRKSVFDGDDLMVQGLGESELRALFHMNILLPDSHCEEYYTFFHLSLQDFCAALYYVLEGLEIEPALCPLYVEKTKRSMELKQAGFHIHSLWMKRFLFGLVSEDVRRPLEVLLGCPVPLGVKQKLLHWVSLLGQQPNATTPGDTLDAFHCLFETQDKEFVRLALNSFQEVWLPINQNLDLIASSFCLQHCPYLRKIRVDVKGIFPRDESAEACPVVPLWMRDKTLIEEQWEDFCSMLGTHPHLRQLDLGSSILTERAMKTLCAKLRHPTCKIQTLMFRNAQITPGVQHLWRIVMANRNLRSLNLGGTHLKEEDVRMACEALKHPKCLLESLRLDCCGLTHACYLKISQILTTSPSLKSLSLAGNKVTDQGVMPLSDALRVSQCALQKLILEDCGITATGCQSLASALVSNRSLTHLCLSNNSLGNEGVNLLCRSMRLPHCSLQRLMLNQCHLDTAGCGFLALALMGNSWLTHLSLSMNPVEDNGVKLLCEVMREPSCHLQDLELVKCHLTAACCESLSCVISRSRHLKSLDLTDNALGDGGVAALCEGLKQKNSVLARLGLKACGLTSDCCEALSLALSCNRHLTSLNLVQNNFSPKGMMKLCSAFACPTSNLQIIGLWKWQYPVQIRKLLEEVQLLKPRVVIDGSWHSFDEDDRYWWKN

SEQ ID NO: 57328 - protein, 892 aa, Homo sapiens
  Payload ID: 11260
  Gene Symbol: NLRP6
  Gene Name: NLR family, pyrin domain containing 6
  Uniprot ID: P59044
  ENSP ID: ENSP00000309767
MDQPEAPCSSTGPRLAVARELLLAALEELSQEQLKRFRHKLRDVGPDGRSIPWGRLERADAVDLAEQLAQFYGPEPALEVARKTLKRADARDVAAQLQERRLQRLGLGSGTLLSVSEYKKKYREHVLQLHARVKERNARSVKITKRFTKLLIAPESAAPEEAMGPAEEPEPGRARRSDTHTFNRLFRRDEEGRRPLTVVLQGPAGIGKTMAAKKILYDWAAGKLYQGQVDFAFFMPCGELLERPGTRSLADLILDQCPDRGAPVPQMLAQPQRLLFILDGADELPALGGPEAAPCTDPFEAASGARVLGGLLSKALLPTALLLVTTRAAAPGRLQGRLCSPQCAEVRGFSDKDKKKYFYKYFRDERRAERAYRFVKENETLFALCFVPFVCWIVCTVLRQQLELGRDLSRTSKTTTSVYLLFITSVLSSAPVADGPRLQGDLRNLCRLAREGVLGRRAQFAEKELEQLELRGSKVQTLFLSKKELPGVLETEVTYQFIDQSFQEFLAALSYLLEDGGVPRTAAGGVGTLLRGDAQPHSHLVLTTRFLFGLLSAERMRDIERHFGCMVSERVKQEALRWVQGQGQGCPGVAPEVTEGAKGLEDTEEPEEEEEGEEPNYPLELLYCLYETQEDAFVRQALCRFPELALQRVRFCRMDVAVLSYCVRCCPAGQALRLISCRLVAAQEKKKKSLGKRLQASLGGGSSSQGTTKQLPASLLHPLFQAMTDPLCHLSSLTLSHCKLPDAVCRDLSEALRAAPALTELGLLHNRLSEAGLRMLSEGLAWPQCRVQTVRVQLPDPQRGLQYLVGMLRQSPALTTLDLSGCQLPAPMVTYLCAVLQHQGCGLQTLSLASVELSEQSLQELQAVKRAKPDLVITHPALDGHPQPPKELISTF

SEQ ID NO: 57329 - protein, 891 aa, Homo sapiens
  Payload ID: 11260
  Gene Symbol: NLRP6
  Gene Name: NLR family, pyrin domain containing 6
  Uniprot ID: P59044
  ENSP ID: ENSP00000433617
MDQPEAPCSSTGPRLAVARELLLAALEELSQEQLKRFRHKLRDVGPDGRSIPWGRLERADAVDLAEQLAQFYGPEPALEVARKTLKRADARDVAAQLQERRLQRLGLGSGTLLSVSEYKKKYREHVLQLHARVKERNARSVKITKRFTKLLIAPESAAPEEAMGPAEEPEPGRARRSDTHTFNRLFRRDEEGRRPLTVVLQGPAGIGKTMAAKKILYDWAAGKLYQGQVDFAFFMPCGELLERPGTRSLADLILDQCPDRGAPVPQMLAQPQRLLFILDGADELPALGGPEAAPCTDPFEAASGARVLGGLLSKALLPTALLLVTTRAAAPGRLQGRLCSPQCAEVRGFSDKDKKKYFYKYFRDERRAERAYRFVKENETLFALCFVPFVCWIVCTVLRQQLELGRDLSRTSKTTTSVYLLFITSVLSSAPVADGPRLQGDLRNLCRLAREGVLGRRAQFAEKELEQLELRGSKVQTLFLSKKELPGVLETEVTYQFIDQSFQEFLAALSYLLEDGGVPRTAAGGVGTLLRGDAQPHSHLVLTTRFLFGLLSAERMRDIERHFGCMVSERVKQEALRWVQGQGQGCPGVAPEVTEGAKGLEDTEEPEEEEEGEEPNYPLELLYCLYETQEDAFVRQALCRFPELALQRVRFCRMDVAVLSYCVRCCPAGQALRLISCRLVAAQEKKKKSLGKRLQASLGGGSSQGTTKQLPASLLHPLFQAMTDPLCHLSSLTLSHCKLPDAVCRDLSEALRAAPALTELGLLHNRLSEAGLRMLSEGLAWPQCRVQTVRVQLPDPQRGLQYLVGMLRQSPALTTLDLSGCQLPAPMVTYLCAVLQHQGCGLQTLSLASVELSEQSLQELQAVKRAKPDLVITHPALDGHPQPPKELISTF

SEQ ID NO: 57330 - protein, 1009 aa, Homo sapiens
  Payload ID: 11261
  Gene Symbol: NLRP7
  Gene Name: NLR family, pyrin domain containing 7
  Uniprot ID: Q8WX94
  ENSP ID: ENSP00000329568
MTSPQLEWTLQTLLEQLNEDELKSFKSLLWAFPLEDVLQKTPWSEVEEADGKKLAEILVNTSSENWIRNATVNILEEMNLTELCKMAKAEMMEDGQVQEIDNPELGDAEEDSELAKPGEKEGWRNSMEKQSLVWKNTFWQGDIDNFHDDVTLRNQRFIPFLNPRTPRKLTPYTVVLHGPAGVGKTTLAKKCMLDWTDCNLSPTLRYAFYLSCKELSRMGPCSFAELISKDWPELQDDIPSILAQAQRILFVVDGLDELKVPPGALIQDICGDWEKKKPVPVLLGSLLKRKMLPRAALLVTTRPRALRDLQLLAQQPIYVRVEGFLEEDRRAYFLRHFGDEDQAMRAFELMRSNAALFQLGSAPAVCWIVCTTLKLQMEKGEDPVPTCLTRTGLFLRFLCSRFPQGAQLRGALRTLSLLAAQGLWAQMSVFHREDLERLGVQESDLRLFLDGDILRQDRVSKGCYSFIHLSFQQFLTALFYALEKEEGEDRDGHAWDIGDVQKLLSGEERLKNPDLIQVGHFLFGLANEKRAKELEATFGCRMSPDIKQELLQCKAHLHANKPLSVTDLKEVLGCLYESQEEELAKVVVAPFKEISIHLTNTSEVMHCSFSLKHCQDLQKLSLQVAKGVFLENYMDFELDIEFESSNSNLKFLEVKQSFLSDSSVRILCDHVTRSTCHLQKVEIKNVTPDTAYRDFCLAFIGKKTLTHLTLAGHIEWERTMMLMLCDLLRNHKCNLQYLRLGGHCATPEQWAEFFYVLKANQSLKHLRLSANVLLDEGAMLLYKTMTRPKHFLQMLSLENCRLTEASCKDLAAVLVVSKKLTHLCLAKNPIGDTGVKFLCEGLSYPDCKLQTLVLQQCSITKLGCRYLSEALQEACSLTNLDLSINQIARGLWILCQALENPNCNLKHLRLWSCSLMPFYCQHLGSALLSNQKLETLDLGQNHLWKSGIIKLFGVLRQRTGSLKILRLKTYETNLEIKKLLEEVKEKNPKLTIDCNASGATAPPCCDFFC

SEQ ID NO: 57331 - protein, 980 aa, Homo sapiens
  Payload ID: 11261
  Gene Symbol: NLRP7
  Gene Name: NLR family, pyrin domain containing 7
  Uniprot ID: Q8WX94
  ENSP ID: ENSP00000339491
MTSPQLEWTLQTLLEQLNEDELKSFKSLLWAFPLEDVLQKTPWSEVEEADGKKLAEILVNTSSENWIRNATVNILEEMNLTELCKMAKAEMMEDGQVQEIDNPELGDAEEDSELAKPGEKEGWRNSMEKQSLVWKNTFWQGDIDNFHDDVTLRNQRFIPFLNPRTPRKLTPYTVVLHGPAGVGKTTLAKKCMLDWTDCNLSPTLRYAFYLSCKELSRMGPCSFAELISKDWPELQDDIPSILAQAQRILFVVDGLDELKVPPGALIQDICGDWEKKKPVPVLLGSLLKRKMLPRAALLVTTRPRALRDLQLLAQQPIYVRVEGFLEEDRRAYFLRHFGDEDQAMRAFELMRSNAALFQLGSAPAVCWIVCTTLKLQMEKGEDPVPTCLTRTGLFLRFLCSRFPQGAQLRGALRTLSLLAAQGLWAQMSVFHREDLERLGVQESDLRLFLDGDILRQDRVSKGCYSFIHLSFQQFLTALFYALEKEEGEDRDGHAWDIGDVQKLLSGEERLKNPDLIQVGHFLFGLANEKRAKELEATFGCRMSPDIKQELLQCKAHLHANKPLSVTDLKEVLGCLYESQEEELAKVVVAPFKEISIHLTNTSEVMHCSFSLKHCQDLQKLSLQVAKGVFLENYMDFELDIEFERCTYLTIPNWARQDLRSLRLWTDFCSLFSSNSNLKFLEVKQSFLSDSSVRILCDHVTRSTCHLQKVEIKNVTPDTAYRDFCLAFIGKKTLTHLTLAGHIEWERTMMLMLCDLLRNHKCNLQYLRLGGHCATPEQWAEFFYVLKANQSLKHLRLSANVLLDEGAMLLYKTMTRPKHFLQMLSLENCRLTEASCKDLAAVLVVSKKLTHLCLAKNPIGDTGVKFLCEGLSYPDCKLQTLVLQQCSITKLGCRYLSEALQEACSLTNLDLSINQIARGLWILCQALENPNCNLKHLRLKTYETNLEIKKLLEEVKEKNPKLTIDCNASGATAPPCCDFFC

SEQ ID NO: 57332 - protein, 980 aa, Homo sapiens; identical to SEQ ID NO: 57331
  Payload ID: 11261
  Gene Symbol: NLRP7
  Gene Name: NLR family, pyrin domain containing 7
  Uniprot ID: Q8WX94
  ENSP ID: ENSP00000465520

SEQ ID NO: 57333 - protein, 1037 aa, Homo sapiens
  Payload ID: 11261
  Gene Symbol: NLRP7
  Gene Name: NLR family, pyrin domain containing 7
  Uniprot ID: Q8WX94
  ENSP ID: ENSP00000467123
MTSPQLEWTLQTLLEQLNEDELKSFKSLLWAFPLEDVLQKTPWSEVEEADGKKLAEILVNTSSENWIRNATVNILEEMNLTELCKMAKAEMMEDGQVQEIDNPELGDAEEDSELAKPGEKEGWRNSMEKQSLVWKNTFWQGDIDNFHDDVTLRNQRFIPFLNPRTPRKLTPYTVVLHGPAGVGKTTLAKKCMLDWTDCNLSPTLRYAFYLSCKELSRMGPCSFAELISKDWPELQDDIPSILAQAQRILFVVDGLDELKVPPGALIQDICGDWEKKKPVPVLLGSLLKRKMLPRAALLVTTRPRALRDLQLLAQQPIYVRVEGFLEEDRRAYFLRHFGDEDQAMRAFELMRSNAALFQLGSAPAVCWIVCTTLKLQMEKGEDPVPTCLTRTGLFLRFLCSRFPQGAQLRGALRTLSLLAAQGLWAQMSVFHREDLERLGVQESDLRLFLDGDILRQDRVSKGCYSFIHLSFQQFLTALFYALEKEEGEDRDGHAWDIGDVQKLLSGEERLKNPDLIQVGHFLFGLANEKRAKELEATFGCRMSPDIKQELLQCKAHLHANKPLSVTDLKEVLGCLYESQEEELAKVVVAPFKEISIHLTNTSEVMHCSFSLKHCQDLQKLSLQVAKGVFLENYMDFELDIEFERCTYLTIPNWARQDLRSLRLWTDFCSLFSSNSNLKFLEVKQSFLSDSSVRILCDHVTRSTCHLQKVEIKNVTPDTAYRDFCLAFIGKKTLTHLTLAGHIEWERTMMLMLCDLLRNHKCNLQYLRLGGHCATPEQWAEFFYVLKANQSLKHLRLSANVLLDEGAMLLYKTMTRPKHFLQMLSLENCRLTEASCKDLAAVLVVSKKLTHLCLAKNPIGDTGVKFLCEGLSYPDCKLQTLVLQQCSITKLGCRYLSEALQEACSLTNLDLSINQIARGLWILCQALENPNCNLKHLRLWSCSLMPFYCQHLGSALLSNQKLETLDLGQNHLWKSGIIKLFGVLRQRTGSLKILRLKTYETNLEIKKLLEEVKEKNPKLTIDCNASGATAPPCCDFFC

SEQ ID NO: 57334 - protein, 70 aa, Homo sapiens
  Payload ID: 11261
  Gene Symbol: NLRP7
  Gene Name: NLR family, pyrin domain containing 7
  ENSP ID: ENSP00000467234
MTSPQLEWTLQTLLEQLNEDELKSFKSLLWAFPLEDVLQKTPWSEVEEADGKKLAEILVNTSSENWIRNA

SEQ ID NO: 57335 - protein, 53 aa, Homo sapiens
  Payload ID: 11261
  Gene Symbol: NLRP7
  Gene Name: NLR family, pyrin domain containing 7
  ENSP ID: ENSP00000467589
MTSPQLEWTLQTLLEQLNEDELKSFKSLLWAFPLEDVLQKTPWSEVEEADGKK

SEQ ID NO: 57336 - protein, 96 aa, Homo sapiens
  Payload ID: 11261
  Gene Symbol: NLRP7
  Gene Name: NLR family, pyrin domain containing 7
  ENSP ID: ENSP00000468161
MTSPQLEWTLQTLLEQLNEDELKSFKSLLWAFPLEDVLQKTPWSEVEEADGKKLAEILVNTSSENWIRNATVNILEEMNLTELCKMAKAEMMEDGQ

SEQ ID NO: 57337 - protein, 963 aa, Homo sapiens
  Payload ID: 11261
  Gene Symbol: NLRP7
  Gene Name: NLR family, pyrin domain containing 7
  ENSP ID: ENSP00000468243
MTSPQLEWTLQTLLEQLNEDELKSFKSLLWAFPLEDVLQKTPWSEVEEADGKKLAEILVNTSSENWIRNATVNILEEMNLTELCKMAKAEMMEDGQVQEIDNPELGDAEEDSELAKPGEKEGWRNSMEKQSLVWKNTFWQGDIDNFHDDVTLRNQRFIPFLNPRTPRKLTPYTVVLHGPAGVGKTTLAKKCMLDWTDCNLSPTLRYAFYLSCKELSRMGPCSFAELISKDWPELQDDIPSILAQAQRILFVVDGLDELKVPPGALIQDICGDWEKKKPVPVLLGSLLKRKMLPRAALLVTTRPRALRDLQLLAQQPIYVRVEGFLEEDRRAYFLRHFGDEDQAMRAFELMRSNAALFQLGSAPAVCWIVCTTLKLQMEKGEDPVPTCLTRTGLFLRFLCSRFPQGAQLRGALRTLSLLAAQGLWAQMSVFHREDLERLGVQESDLRLFLDGDILRQDRVSKGCYSFIHLSFQQFLTALFYALEKEEGEDRDGHAWDIGDVQKLLSGEERLKNPDLIQVGHFLFGLANEKRAKELEATFGCRMSPDIKQELLQCKAHLHANKPLSVTDLKEVLGCLYESQEEELAKVVVAPFKEISIHLTNTSEVMHCSFSLKHCQDLQKLSLQVAKGVFLENYMDFELDIEFERCTYLTIPNWARQDLRSLRLWTDFCSLFSSNSNLKFLEVKQSFLSDSSVRILCDHVTRSTCHLQKVEIKNVTPDTAYRDFCLAFIGKKTLTHLTLAGHIEWERTMMLMLCDLLRNHKCNLQYLRLGGHCATPEQWAEFFYVLKANQSLKHLRLSANVLLDEGAMLLYKTMTRPKHFLQMLSLENCRLTEASCKDLAAVLVVSKKLTHLCLAKNPIGDTGVKFLCEGLSYPDCKLQTLVLQQCSITKLGCRYLSEALQEACSLTNLDLSINQIARGLWILCQALENPNCNLKHLRILDLLSSAIRSLKLWTWARIICGRVA

SEQ ID NO: 57338 - protein, 1037 aa, Homo sapiens; identical to SEQ ID NO: 57333
  Payload ID: 11261
  Gene Symbol: NLRP7
  Gene Name: NLR family, pyrin domain containing 7
  Uniprot ID: Q8WX94
  ENSP ID: ENSP00000468706

SEQ ID NO: 57339 - protein, 935 aa, Homo sapiens
  Payload ID: 11261
  Gene Symbol: NLRP7
  Gene Name: NLR family, pyrin domain containing 7
  ENSP ID: ENSP00000478429
MTSPQLEWTLQTLLEQLNEDELKSFKSLLWAFPLEDVLQKTPWSEVEEADGKKLAEILVNTSSENWIRNATVNILEEMNLTELCKMAKAEMMEDGQVQEIDNPELGDAEEDSELAKPGEKEGWRNSMEKQSLVWKNTFWQGDIDNFHDDVTLRNQRFIPFLNPRTPRKLTPYTVVLHGPAGVGKTTLAKKCMLDWTDCNLSPTLRYAFYLSCKELSRMGPCSFAELISKDWPELQDDIPSILAQAQRILFVVDGLDELKVPPGALIQDICGDWEKKKPVPVLLGSLLKRKMLPRAALLVTTRPRALRDLQLLAQQPIYVRVEGFLEEDRRAYFLRHFGDEDQAMRAFELMRSNAALFQLGSAPAVCWIVCTTLKLQMEKGEDPVPTCLTRTGLFLRFLCSRFPQGAQLRGALRTLSLLAAQGLWAQMSVFHREDLERLGVQESDLRLFLDGDILRQDRVSKGCYSFIHLSFQQFLTALFYTLEKEEGEDRDGHAWDIGDVQKLLSGEERLKNPDLIQVGHFLFGLANEKRAKELEATFGCRMSPDIKQELLQCKAHLHANKPLSVTDLKEVLGCLYESQEEELAKVVVAPFKEISIHLTNTSEVMHCSFSLKHCQDLQKLSLQVAKGVFLENYMDFELDIEFESSNSNLKFLEVKQSFLSDSSVRILCDHVTRSTCHLQKVEIKNVTPDTAYRDFCLAFIGKKTLTHLTLAGHIEWERTMMLMLCDLLRNHKCNLQYLRLGGHCATPEQWAEFFYVLKANQSLKHLRLSANVLLDEGAMLLYKTMTRPKHFLQMLSLENCRLTEASCKDLAAVLVVSKKLTHLCLAKNPIGDTGVKFLCEGLSYPDCKLQTLVLQQCSITKLGCRYLSEALQEACSLTNLDLSINQIARGLWILCQALENPNCNLKHLRILDLLSSAIRSLKLWTWARIICGRVA

SEQ ID NO: 57340 - protein, 157 aa, Homo sapiens
  Payload ID: 11261
  Gene Symbol: NLRP7
  Gene Name: NLR family, pyrin domain containing 7
  ENSP ID: ENSP00000478621
  MOD_RES (1)..(1): Any amino acid
XLQQCSITKLGCRYLSEALQEACSLTNLDLSINQIARGLWILCQALENPNCNLKHLRLWSCSLMPFYCQHLGSALLSNQKLETLDLGQNHLWKSGIIKLFGVLRQRTGSLKILRLKTYETNLEIKKLLEEVKEKNPKLTIDCNASGATAPPCCDFFC

SEQ ID NO: 57341 - protein, 980 aa, Homo sapiens; identical to SEQ ID NO: 57331
  Payload ID: 11261
  Gene Symbol: NLRP7
  Gene Name: NLR family, pyrin domain containing 7
  Uniprot ID: Q8WX94
  ENSP ID: ENSP00000478726

SEQ ID NO: 57342 - protein, 70 aa, Homo sapiens; identical to SEQ ID NO: 57334
  Payload ID: 11261
  Gene Symbol: NLRP7
  Gene Name: NLR family, pyrin domain containing 7
  ENSP ID: ENSP00000478753

SEQ ID NO: 57343 - protein, 980 aa, Homo sapiens
  Payload ID: 11261
  Gene Symbol: NLRP7
  Gene Name: NLR family, pyrin domain containing 7
  ENSP ID: ENSP00000478889
MTSPQLEWTLQTLLEQLNEDELKSFKSLLWAFPLEDVLQKTPWSEVEEADGKKLAEILVNTSSENWIRNATVNILEEMNLTELCKMAKAEMMEDGQVQEIDNPELGDAEEDSELAKPGEKEGWRNSMEKQSLVWKNTFWQGDIDNFHDDVTLRNQRFIPFLNPRTPRKLTPYTVVLHGPAGVGKTTLAKKCMLDWTDCNLSPTLRYAFYLSCKELSRMGPCSFAELISKDWPELQDDIPSILAQAQRILFVVDGLDELKVPPGALIQDICGDWEKKKPVPVLLGSLLKRKMLPRAALLVTTRPRALRDLQLLAQQPIYVRVEGFLEEDRRAYFLRHFGDEDQAMRAFELMRSNAALFQLGSAPAVCWIVCTTLKLQMEKGEDPVPTCLTRTGLFLRFLCSRFPQGAQLRGALRTLSLLAAQGLWAQMSVFHREDLERLGVQESDLRLFLDGDILRQDRVSKGCYSFIHLSFQQFLTALFYTLEKEEGEDRDGHAWDIGDVQKLLSGEERLKNPDLIQVGHFLFGLANEKRAKELEATFGCRMSPDIKQELLQCKAHLHANKPLSVTDLKEVLGCLYESQEEELAKVVVAPFKEISIHLTNTSEVMHCSFSLKHCQDLQKLSLQVAKGVFLENYMDFELDIEFERCTYLTIPNWARQDLRSLRLWTDFCSLFSSNSNLKFLEVKQSFLSDSSVRILCDHVTRSTCHLQKVEIKNVTPDTAYRDFCLAFIGKKTLTHLTLAGHIEWERTMMLMLCDLLRNHKCNLQYLRLGGHCATPEQWAEFFYVLKANQSLKHLRLSANVLLDEGAMLLYKTMTRPKHFLQMLSLENCRLTEASCKDLAAVLVVSKKLTHLCLAKNPIGDTGVKFLCEGLSYPDCKLQTLVLQQCSITKLGCRYLSEALQEACSLTNLDLSINQIARGLWILCQALENPNCNLKHLRLKTYETNLEIKKLLEEVKEKNPKLTIDCNASGATAPPCCDFFC

SEQ ID NO: 57344 - protein, 1009 aa, Homo sapiens; identical to SEQ ID NO: 57330
  Payload ID: 11261
  Gene Symbol: NLRP7
  Gene Name: NLR family, pyrin domain containing 7
  Uniprot ID: Q8WX94
  ENSP ID: ENSP00000478890

SEQ ID NO: 57345 - protein, 1037 aa, Homo sapiens; identical to SEQ ID NO: 57333
  Payload ID: 11261
  Gene Symbol: NLRP7
  Gene Name: NLR family, pyrin domain containing 7
  ENSP ID: ENSP00000479459

SEQ ID NO: 57346 - protein, 980 aa, Homo sapiens; identical to SEQ ID NO: 57331
  Payload ID: 11261
  Gene Symbol: NLRP7
  Gene Name: NLR family, pyrin domain containing 7
  Uniprot ID: Q8WX94
  ENSP ID: ENSP00000479541

SEQ ID NO: 57347 - protein, 96 aa, Homo sapiens; identical to SEQ ID NO: 57336
  Payload ID: 11261
  Gene Symbol: NLRP7
  Gene Name: NLR family, pyrin domain containing 7
  ENSP ID: ENSP00000479859

SEQ ID NO: 57348 - protein, 980 aa, Homo sapiens; identical to SEQ ID NO: 57331
  Payload ID: 11261
  Gene Symbol: NLRP7
  Gene Name: NLR family, pyrin domain containing 7
  ENSP ID: ENSP00000480034

SEQ ID NO: 57349 - protein, 1037 aa, Homo sapiens; identical to SEQ ID NO: 57333
  Payload ID: 11261
  Gene Symbol: NLRP7
  Gene Name: NLR family, pyrin domain containing 7
  ENSP ID: ENSP00000480226

SEQ ID NO: 57350 - protein, 980 aa, Homo sapiens; identical to SEQ ID NO: 57331
  Payload ID: 11261
  Gene Symbol: NLRP7
  Gene Name: NLR family, pyrin domain containing 7
  Uniprot ID: Q8WX94
  ENSP ID: ENSP00000480449

SEQ ID NO: 57351 - protein, 963 aa, Homo sapiens; identical to SEQ ID NO: 57337
  Payload ID: 11261
  Gene Symbol: NLRP7
  Gene Name: NLR family, pyrin domain containing 7
  ENSP ID: ENSP00000480879

SEQ ID NO: 57352 - protein, 980 aa, Homo sapiens; identical to SEQ ID NO: 57331
  Payload ID: 11261
  Gene Symbol: NLRP7
  Gene Name: NLR family, pyrin domain containing 7
  Uniprot ID: Q8WX94
  ENSP ID: ENSP00000481117

SEQ ID NO: 57353 - protein, 1037 aa, Homo sapiens; identical to SEQ ID NO: 57333
  Payload ID: 11261
  Gene Symbol: NLRP7
  Gene Name: NLR family, pyrin domain containing 7
  Uniprot ID: Q8WX94
  ENSP ID: ENSP00000481395

SEQ ID NO: 57354 - protein, 1037 aa, Homo sapiens; identical to SEQ ID NO: 57333
  Payload ID: 11261
  Gene Symbol: NLRP7
  Gene Name: NLR family, pyrin domain containing 7
  Uniprot ID: Q8WX94
  ENSP ID: ENSP00000481452

SEQ ID NO: 57355 - protein, 83 aa, Homo sapiens
  Payload ID: 11261
  Gene Symbol: NLRP7
  Gene Name: NLR family, pyrin domain containing 7
  ENSP ID: ENSP00000481468
  MOD_RES (1)..(1): Any amino acid
XLQQCSITKLGCRYLSEALQEACSLTNLDLSINQIARGLWILCQALENPNCNLKHLRILDLLSSAIRSLKLWTWARIICGRVA

SEQ ID NO: 57356 - protein, 952 aa, Homo sapiens
  Payload ID: 11261
  Gene Symbol: NLRP7
  Gene Name: NLR family, pyrin domain containing 7
  ENSP ID: ENSP00000481546
MTSPQLEWTLQTLLEQLNEDELKSFKSLLWAFPLEDVLQKTPWSEVEEADGKKLAEILVNTSSENWIRNATVNILEEMNLTELCKMAKAEMMEDGQVQEIDNPELGDAEEDSELAKPGEKEGWRNSMEKQSLVWKNTFWQGDIDNFHDDVTLRNQRFIPFLNPRTPRKLTPYTVVLHGPAGVGKTTLAKKCMLDWTDCNLSPTLRYAFYLSCKELSRMGPCSFAELISKDWPELQDDIPSILAQAQRILFVVDGLDELKVPPGALIQDICGDWEKKKPVPVLLGSLLKRKMLPRAALLVTTRPRALRDLQLLAQQPIYVRVEGFLEEDRRAYFLRHFGDEDQAMRAFELMRSNAALFQLGSAPAVCWIVCTTLKLQMEKGEDPVPTCLTRTGLFLRFLCSRFPQGAQLRGALRTLSLLAAQGLWAQMSVFHREDLERLGVQESDLRLFLDGDILRQDRVSKGCYSFIHLSFQQFLTALFYTLEKEEGEDRDGHAWDIGDVQKLLSGEERLKNPDLIQVGHFLFGLANEKRAKELEATFGCRMSPDIKQELLQCKAHLHANKPLSVTDLKEVLGCLYESQEEELAKVVVAPFKEISIHLTNTSEVMHCSFSLKHCQDLQKLSLQVAKGVFLENYMDFELDIEFESSNSNLKFLEVKQSFLSDSSVRILCDHVTRSTCHLQKVEIKNVTPDTAYRDFCLAFIGKKTLTHLTLAGHIEWERTMMLMLCDLLRNHKCNLQYLRLGGHCATPEQWAEFFYVLKANQSLKHLRLSANVLLDEGAMLLYKTMTRPKHFLQMLSLENCRLTEASCKDLAAVLVVSKKLTHLCLAKNPIGDTGVKFLCEGLSYPDCKLQTLVLQQCSITKLGCRYLSEALQEACSLTNLDLSINQIARGLWILCQALENPNCNLKHLRLKTYETNLEIKKLLEEVKEKNPKLTIDCNASGATAPPCCDFFC

SEQ ID NO: 57357 - protein, 1037 aa, Homo sapiens
  Payload ID: 11261
  Gene Symbol: NLRP7
  Gene Name: NLR family, pyrin domain containing 7
  ENSP ID: ENSP00000481565
MTSPQLEWTLQTLLEQLNEDELKSFKSLLWAFPLEDVLQKTPWSEVEEADGKKLAEILVNTSSENWIRNATVNILEEMNLTELCKMAKAEMMEDGQVQEIDNPELGDAEEDSELAKPGEKEGWRNSMEKQSLVWKNTFWQGDIDNFHDDVTLRNQRFIPFLNPRTPRKLTPYTVVLHGPAGVGKTTLAKKCMLDWTDCNLSPTLRYAFYLSCKELSRMGPCSFAELISKDWPELQDDIPSILAQAQRILFVVDGLDELKVPPGALIQDICGDWEKKKPVPVLLGSLLKRKMLPRAALLVTTRPRALRDLQLLAQQPIYVRVEGFLEEDRRAYFLRHFGDEDQAMRAFELMRSNAALFQLGSAPAVCWIVCTTLKLQMEKGEDPVPTCLTRTGLFLRFLCSRFPQGAQLRGALRTLSLLAAQGLWAQMSVFHREDLERLGVQESDLRLFLDGDILRQDRVSKGCYSFIHLSFQQFLTALFYTLEKEEGEDRDGHAWDIGDVQKLLSGEERLKNPDLIQVGHFLFGLANEKRAKELEATFGCRMSPDIKQELLQCKAHLHANKPLSVTDLKEVLGCLYESQEEELAKVVVAPFKEISIHLTNTSEVMHCSFSLKHCQDLQKLSLQVAKGVFLENYMDFELDIEFERCTYLTIPNWARQDLRSLRLWTDFCSLFSSNSNLKFLEVKQSFLSDSSVRILCDHVTRSTCHLQKVEIKNVTPDTAYRDFCLAFIGKKTLTHLTLAGHIEWERTMMLMLCDLLRNHKCNLQYLRLGGHCATPEQWAEFFYVLKANQSLKHLRLSANVLLDEGAMLLYKTMTRPKHFLQMLSLENCRLTEASCKDLAAVLVVSKKLTHLCLAKNPIGDTGVKFLCEGLSYPDCKLQTLVLQQCSITKLGCRYLSEALQEACSLTNLDLSINQIARGLWILCQALENPNCNLKHLRLWSCSLMPFYCQHLGSALLSNQKLETLDLGQNHLWKSGIIKLFGVLRQRTGSLKILRLKTYETNLEIKKLLEEVKEKNPKLTIDCNASGATAPPCCDFFC

SEQ ID NO: 57358 - protein, 980 aa, Homo sapiens; identical to SEQ ID NO: 57331
  Payload ID: 11261
  Gene Symbol: NLRP7
  Gene Name: NLR family, pyrin domain containing 7
  ENSP ID: ENSP00000481809

SEQ ID NO: 57359 - protein, 100 aa, Homo sapiens
  Payload ID: 11261
  Gene Symbol: NLRP7
  Gene Name: NLR family, pyrin domain containing 7
  ENSP ID: ENSP00000482017
  MOD_RES (1)..(1): Any amino acid
XLQQCSITKLGCRYLSEALQEACSLTNLDLSINQIARGLWILCQALENPNCNLKHLRLKTYETNLEIKKLLEEVKEKNPKLTIDCNASGATAPPCCDFFC

SEQ ID NO: 57360 - protein, 1037 aa, Homo sapiens; identical to SEQ ID NO: 57333
  Payload ID: 11261
  Gene Symbol: NLRP7
  Gene Name: NLR family, pyrin domain containing 7
  Uniprot ID: Q8WX94
  ENSP ID: ENSP00000482194

SEQ ID NO: 57361 - protein, 1037 aa, Homo sapiens; identical to SEQ ID NO: 57333
  Payload ID: 11261
  Gene Symbol: NLRP7
  Gene Name: NLR family, pyrin domain containing 7
  ENSP ID: ENSP00000482551

SEQ ID NO: 57362 - protein, 53 aa, Homo sapiens; identical to SEQ ID NO: 57335
  Payload ID: 11261
  Gene Symbol: NLRP7
  Gene Name: NLR family, pyrin domain containing 7
  ENSP ID: ENSP00000482561

SEQ ID NO: 57363 - protein, 1037 aa, Homo sapiens; identical to SEQ ID NO: 57333
  Payload ID: 11261
  Gene Symbol: NLRP7
  Gene Name: NLR family, pyrin domain containing 7
  Uniprot ID: Q8WX94
  ENSP ID: ENSP00000482887

SEQ ID NO: 57364 - protein, 980 aa, Homo sapiens; identical to SEQ ID NO: 57331
  Payload ID: 11261
  Gene Symbol: NLRP7
  Gene Name: NLR family, pyrin domain containing 7
  ENSP ID: ENSP00000483203

SEQ ID NO: 57365 - protein, 980 aa, Homo sapiens; identical to SEQ ID NO: 57331
  Payload ID: 11261
  Gene Symbol: NLRP7
  Gene Name: NLR family, pyrin domain containing 7
  Uniprot ID: Q8WX94
  ENSP ID: ENSP00000483353

SEQ ID NO: 57366 - protein, 1009 aa, Homo sapiens
  Payload ID: 11261
  Gene Symbol: NLRP7
  Gene Name: NLR family, pyrin domain containing 7
  ENSP ID: ENSP00000483638
MTSPQLEWTLQTLLEQLNEDELKSFKSLLWAFPLEDVLQKTPWSEVEEADGKKLAEILVNTSSENWIRNATVNILEEMNLTELCKMAKAEMMEDGQVQEIDNPELGDAEEDSELAKPGEKEGWRNSMEKQSLVWKNTFWQGDIDNFHDDVTLRNQRFIPFLNPRTPRKLTPYTVVLHGPAGVGKTTLAKKCMLDWTDCNLSPTLRYAFYLSCKELSRMGPCSFAELISKDWPELQDDIPSILAQAQRILFVVDGLDELKVPPGALIQDICGDWEKKKPVPVLLGSLLKRKMLPRAALLVTTRPRALRDLQLLAQQPIYVRVEGFLEEDRRAYFLRHFGDEDQAMRAFELMRSNAALFQLGSAPAVCWIVCTTLKLQMEKGEDPVPTCLTRTGLFLRFLCSRFPQGAQLRGALRTLSLLAAQGLWAQMSVFHREDLERLGVQESDLRLFLDGDILRQDRVSKGCYSFIHLSFQQFLTALFYTLEKEEGEDRDGHAWDIGDVQKLLSGEERLKNPDLIQVGHFLFGLANEKRAKELEATFGCRMSPDIKQELLQCKAHLHANKPLSVTDLKEVLGCLYESQEEELAKVVVAPFKEISIHLTNTSEVMHCSFSLKHCQDLQKLSLQVAKGVFLENYMDFELDIEFESSNSNLKFLEVKQSFLSDSSVRILCDHVTRSTCHLQKVEIKNVTPDTAYRDFCLAFIGKKTLTHLTLAGHIEWERTMMLMLCDLLRNHKCNLQYLRLGGHCATPEQWAEFFYVLKANQSLKHLRLSANVLLDEGAMLLYKTMTRPKHFLQMLSLENCRLTEASCKDLAAVLVVSKKLTHLCLAKNPIGDTGVKFLCEGLSYPDCKLQTLVLQQCSITKLGCRYLSEALQEACSLTNLDLSINQIARGLWILCQALENPNCNLKHLRLWSCSLMPFYCQHLGSALLSNQKLETLDLGQNHLWKSGIIKLFGVLRQRTGSLKILRLKTYETNLEIKKLLEEVKEKNPKLTIDCNASGATAPPCCDFFC

SEQ ID NO: 57367 - protein, 1037 aa, Homo sapiens; identical to SEQ ID NO: 57333
  Payload ID: 11261
  Gene Symbol: NLRP7
  Gene Name: NLR family, pyrin domain containing 7
  ENSP ID: ENSP00000484426

SEQ ID NO: 57368 - protein, 980 aa, Homo sapiens; identical to SEQ ID NO: 57331
  Payload ID: 11261
  Gene Symbol: NLRP7
  Gene Name: NLR family, pyrin domain containing 7
  ENSP ID: ENSP00000484444

SEQ ID NO: 57369 - protein, 1037 aa, Homo sapiens; identical to SEQ ID NO: 57333
  Payload ID: 11261
  Gene Symbol: NLRP7
  Gene Name: NLR family, pyrin domain containing 7
  Uniprot ID: Q8WX94
  ENSP ID: ENSP00000484808

SEQ ID NO: 57370 - protein, 1048 aa, Homo sapiens
  Payload ID: 11262
  Gene Symbol: NLRP8
  Gene Name: NLR family, pyrin domain containing 8
  Uniprot ID: Q86W28
  ENSP ID: ENSP00000291971
MSDVNPPSDTPIPFSSSSTHSSHIPPWTFSCYPGSPCENGVMLYMRNVSHEELQRFKQLLLTELSTGTMPITWDQVETASWAEVVHLLIERFPGRRAWDVTSNIFAIMNCDKMCVVVRREINAILPTLEPEDLNVGETQVNLEEGESGKIRRYKSNVMEKFFPIWDITTWPGNQRDFFYQGVHRHEEYLPCLLLPKRPQGRQPKTVAIQGAPGIGKTILAKKVMFEWARNKFYAHKRWCAFYFHCQEVNQTTDQSFSELIEQKWPGSQDLVSKIMSKPDQLLLLLDGFEELTSTLIDRLEDLSEDWRQKLPGSVLLSSLLSKTMLPEATLLIMIRFTSWQTCKPLLKCPSLVTLPGFNTMEKIKYFQMYFGHTEEGDQVLSFAMENTILFSMCRVPVVCWMVCSGLKQQMERGNNLTQSCPNATSVFVRYISSLFPTRAENFSRKIHQAQLEGLCHLAADSMWHRKWVLGKEDLEEAKLDQTGVTAFLGMSILRRIAGEEDHYVFTLVTFQEFFAALFYVLCFPQRLKNFHVLSHVNIQRLIASPRGSKSYLSHMGLFLFGFLNEACASAVEQSFQCKVSFGNKRKLLKVIPLLHKCDPPSPGSGVPQLFYCLHEIREEAFVSQALNDYHKVVLRIGNNKEVQVSAFCLKRCQYLHEVELTVTLNFMNVWKLSSSSHPGSEAPESNGLHRWWQDLCSVFATNDKLEVLTMTNSVLGPPFLKALAAALRHPQCKLQKLLLRRVNSTMLNQDLIGVLTGNQHLRYLEIQHVEVESKAVKLLCRVLRSPRCRLQCLRLEDCLATPRIWTDLGNNLQGNGHLKTLILRKNSLENCGAYYLSVAQLERLSIENCNLTQLTCESLASCLRQSKMLTHLSLAENALKDEGAKHIWNALPHLRCPLQRLVLRKCDLTFNCCQDMISALCKNKTLKSLDLSFNSLKDDGVILLCEALKNPDCTLQILELENCLFTSICCQAMASMLRKNQHLRHLDLSKNAIGVYGILTLCEAFSSQKKREEVIFCIPAWTRITSFSPTPHPPDFTGKSDCLSQINP

SEQ ID NO: 57371 - protein, 1029 aa, Homo sapiens
  Payload ID: 11262
  Gene Symbol: NLRP8
  Gene Name: NLR family, pyrin domain containing 8
  Uniprot ID: Q86W28
  ENSP ID: ENSP00000468121
MSDVNPPSDTPIPFSSSSTHSSHIPPWTFSCYPGSPCENGVMLYMRNVSHEELQRFKQLLLTELSTGTMPITWDQVETASWAEVVHLLIERFPGRRAWDVTSNIFAIMNCDKMCVVVRREINAILPTLEPEDLNVGETQVNLEEGESGKIRRYKSNVMEKFFPIWDITTWPGNQRDFFYQGVHRHEEYLPCLLLPKRPQGRQPKTVAIQGAPGIGKTILAKKVMFEWARNKFYAHKRWCAFYFHCQEVNQTTDQSFSELIEQKWPGSQDLVSKIMSKPDQLLLLLDGFEELTSTLIDRLEDLSEDWRQKLPGSVLLSSLLSKTMLPEATLLIMIRFTSWQTCKPLLKCPSLVTLPGFNTMEKIKYFQMYFGHTEEGDQVLSFAMENTILFSMCRVPVVCWMVCSGLKQQMERGNNLTQSCPNATSVFVRYISSLFPTRAENFSRKIHQAQLEGLCHLAADSMWHRKWVLGKEDLEEAKLDQTGVTAFLGMSILRRIAGEEDHYVFTLVTFQEFFAALFYVLCFPQRLKNFHVLSHVNIQRLIASPRGSKSYLSHMGLFLFGFLNEACASAVEQSFQCKVSFGNKRKLLKVIPLLHKCDPPSPGSGVPQLFYCLHEIREEAFVSQALNDYHKVVLRIGNNKEVQVSAFCLKRCQYLHEVELTVTLNFMNVWKLSSSSHPGSEAPESNGLHRWWQDLCSVFATNDKLEVLTMTNSVLGPPFLKALAAALRHPQCKLQKLLLRRVNSTMLNQDLIGVLTGNQHLRYLEIQHVEVESKAVKLLCRVLRSPRCRLQCLRLEDCLATPRIWTDLGNNLQGNGHLKTLILRKNSLENCGAYYLSVAQLERLSQSKMLTHLSLAENALKDEGAKHIWNALPHLRCPLQRLVLRKCDLTFNCCQDMISALCKNKTLKSLDLSFNSLKDDGVILLCEALKNPDCTLQILELENCLFTSICCQAMASMLRKNQHLRHLDLSKNAIGVYGILTLCEAFSSQKKREEVIFCIPAWTRITSFSPTPHPPDFTGKSDCLSQINP

SEQ ID NO: 57372 - protein, 991 aa, Homo sapiens
  Payload ID: 11263
  Gene Symbol: NLRP9
  Gene Name: NLR family, pyrin domain containing 9
  Uniprot ID: Q7RTR0
  ENSP ID: ENSP00000331857
MAESFFSDFGLLWYLKELRKEEFWKFKELLKQPLEKFELKPIPWAELKKASKEDVAKLLDKHYPGKQAWEVTLNLFLQINRKDLWTKAQEEMRNKLNPYRKHMKETFQLIWEKETCLHVPEHFYKETMKNEYKELNDAYTAAARRHTVVLEGPDGIGKTTLLRKVMLDWAEGNLWKDRFTFVFFLNVCEMNGIAETSLLELLSRDWPESSEKIEDIFSQPERILFIMDGFEQLKFNLQLKADLSDDWRQRQPMPIILSSLLQKKMLPESSLLIALGKLAMQKHYFMLRHPKLIKLLGFSESEKKSYFSYFFGEKSKALKVFNFVRDNGPLFILCHNPFTCWLVCTCVKQRLERGEDLEINSQNTTYLYASFLTTVFKAGSQSFPPKVNRARLKSLCALAAEGIWTYTFVFSHGDLRRNGLSESEGVMWVGMRLLQRRGDCFAFMHLCIQEFCAAMFYLLKRPKDDPNPAIGSITQLVRASVVQPQTLLTQVGIFMFGISTEEIVSMLETSFGFPLSKDLKQEITQCLESLSQCEADREAIAFQELFIGLFETQEKEFVTKVMNFFEEVFIYIGNIEHLVIASFCLKHCQHLTTLRMCVENIFPDDSGCISDYNEKLVYWRELCSMFITNKNFQILDMENTSLDDPSLAILCKALAQPVCKLRKLIFTSVYFGHDSELFKAVLHNPHLKLLSLYGTSLSQSDIRHLCETLKHPMCKIEELILGKCDISSEVCEDIASVLACNSKLKHLSLVENPLRDEGMTLLCEALKHSHCALERLMLMYCCLTSVSCDSISEVLLCSKSLSLLDLGSNALEDNGVASLCAALKHPGCSIRELWLMGCFLTSDSCKDIAAVLICNGKLKTLKLGHNEIGDTGVRQLCAALQHPHCKLECLGLQTCPITRACCDDIAAALIACKTLRSLNLDWIALDADAVVVLCEALSHPDCALQMLGLHKSGFDEETQKILMSVEEKIPHLTISHGPWIDEEYKIRGVLL

SEQ ID NO: 57373 - protein, 986 aa, Homo sapiens
  Payload ID: 11263
  Gene Symbol: NLRP9
  Gene Name: NLR family, pyrin domain containing 9
  Uniprot ID: Q7RTR0
  ENSP ID: ENSP00000465253
MAESFFSDFGLLWYLKELRKEEFWKFKELLKQPLEKFELKPIPWAELKKASKEDVAKLLDKHYPGKQAWEVTLNLFLQINRKDLWTKAQEEMRNKLNPYRKHMKETFQLIWEKETCLHVPEHFYKETMKNEYKELNDAYTAAARRHTVVLEGPDGIGKTTLLRKVMLDWAEGNLWKDRFTFVFFLNVCEMNGIAETSLLELLSRDWPESSEKIEDIFSQPERILFIMDGFEQLKFNLQLKADLSDDWRQRQPMPIILSSLLQKKMLPESSLLIALGKLAMQKHYFMLRHPKLIKLLGFSESEKKSYFSYFFGEKSKALKVFNFVRDNGPLFILCHNPFTCWLVCTCVKQRLERGEDLEINSQNTTYLYASFLTTVFKAGSQSFPPKVNRARLKSLCALAAEGIWTYTFVFSHGDLRRNGLSESEGVMWVGMRLLQRRGDCFAFMHLCIQEFCAAMFYLLKRPKDDPNPAIGSITQLVRASVVQPQTLLTQVGIFMFGISTEEIVSMLETSFGFPLSKDLKQEITQCLESLSQCEADREAIAFQELFIGLFETQEKEFVTKVMNFFEEVFIYIGNIEHLVIASFCLKHCQHLTTLRMCVENIFPDDSGCISDYNEKLVYWRELCSMFITNKNFQILDMENTSLDDPSLAILCKALAQPVCKLRKLIFTSVYFGHDSELFKAVLHNPHLKLLSLYGTSLSQSDIRHLCETLKHPMCKIEELILGKCDISSEVCEDIASVLACNSKLKHLSLVENPLRDEGMTLLCEALKHSHCALERLMLMYCCLTSVSCDSISEVLLCSKSLSLLDLGSNALEDNGVASLCAALKHPGCSIRELWLMGCFLTSDSCKDIAAVLICNGKLKTLKLGHNEIGDTGVRQLCAALQHPHCKLECLGLQTCPITRACCDDIAAALIACKTLRSLNLDWIALDADAVVVLCEALSHPDCALQMLGNCQKSLGDTVAPGENHCSIKHLLLTLPINMQRQLRLQK

SEQ ID NO: 57374 - protein, 503 aa, Homo sapiens
  Payload ID: 11264
  Gene Symbol: NMD3
  Gene Name: NMD3 ribosome export adaptor
  Uniprot ID: Q96D46
  ENSP ID: ENSP00000307525
MEYMAESTDRSPGHILCCECGVPISPNPANICVACLRSKVDISQGIPKQVSISFCKQCQRYFQPPGTWIQCALESRELLALCLKKIKAPLSKVRLVDAGFVWTEPHSKRLKVKLTIQKEVMNGAILQQVFVVDYVVQSQMCGDCHRVEAKDFWKAVIQVRQKTLHKKTFYYLEQLILKYGMHQNTLRIKEIHDGLDFYYSSKQHAQKMVEFLQCTVPCRYKASQRLISQDIHSNTYNYKSTFSVEIVPICKDNVVCLSPKLAQSLGNMNQICVCIRVTSAIHLIDPNTLQVADIDGSTFWSHPFNSLCHPKQLEEFIVMECSIVQDIKRAAGAGMISKKHTLGEVWVQKTSEMNTDKQYFCRTHLGHLLNPGDLVLGFDLANCNLNDEHVNKMNSDRVPDVVLIKKSYDRTKRQRRRNWKLKELARERENMDTDDERQYQDFLEDLEEDEAIRKNVNIYRDSAIPVESDTDDEGAPRISLAEMLEDLHISQDATGEEGASMLT

SEQ ID NO: 57375 - protein, 529 aa, Homo sapiens
  Payload ID: 11264
  Gene Symbol: NMD3
  Gene Name: NMD3 ribosome export adaptor
  ENSP ID: ENSP00000417559
MEYMAESTDRSPGHILCCECGVPISPNPANICVACLRSKVDISQGIPKQVSISFCKQCQRYFQPPGTWIQCALESRELLALCLKKIKAPLSKVRLVDAGFVWTEPHSKRLKVKLTIQKEVMNGAILQQVFVVDYVVQSQMCGDCHRVEAKDFWKAVIQVRQKTLHKKTFYYLEQLILKYGMHQNTLRIKEIHDGLDFYYSSKQHAQKMVEFLQCTVPCRYKASQRLISQDIHSNTYNYKSTFSVEIVPICKDNVVCLSPKLAQSLGNMNQICVCIRVTSAIHLIDPNTLQVADIDGSTFWSHPFNSLCHPKQLEEFIVMECSIVQDIKRAAGAGMISKKHTLGEVWVQKTSEMNTDKQYFCRTHLGHLLNPGDLVLGFDLANCNLNDEHVNKMNSDRVPDVVLIKKSYDRTKRQRRRNWKLKELARERENMDTDDERQYQDFLEDLEEDEAIRKNVNIYRDSAIPVESDTDDEGAPRISLAEMLEDLHISQDATGEEAKSAPEAADLESEVTEGPSVVVDACNPSTLGG

SEQ ID NO: 57376 - protein, 98 aa, Homo sapiens
  Payload ID: 11264
  Gene Symbol: NMD3
  Gene Name: NMD3 ribosome export adaptor
  ENSP ID: ENSP00000418852
MEYMAESTDRSPGHILCCECGVPISPNPANICVACLRSKVDISQGIPKQVSISFCKQCQRYFQPPGTWIQCALESRELLALCLKKIKAPLSKVRLVDA

SEQ ID NO: 57377 - protein, 218 aa, Homo sapiens
  Payload ID: 11264
  Gene Symbol: NMD3
  Gene Name: NMD3 ribosome export adaptor
  ENSP ID: ENSP00000418908
MEYMAESTDRSPGHILCCECGVPISPNPANICVACLRSKVDISQGIPKQVSISFCKQCQRYFQPPGTWIQCALESRELLALCLKKIKAPLSKVRLVDAGFVWTEPHSKRLKVKLTIQKEVMNGAILQQVFVVDYVVQSQMCGDCHRVEAKDFWKAVIQVRQKTLHKKTFYYLEQLILKYGMHQNTLRIKEIHDGLDFYYSSKQHAQKMVEFLQCTVPC

SEQ ID NO: 57378 - protein, 155 aa, Homo sapiens
  Payload ID: 11264
  Gene Symbol: NMD3
  Gene Name: NMD3 ribosome export adaptor
  ENSP ID: ENSP00000418980
MEYMAESTDRSPGHILCCECGVPISPNPANICVACLRSKVDISQGIPKQVSISFCKQCQRYFQPPGTWIQCALESRELLALCLKKIKAPLSKVRLVDAGFVWTEPHSKRLKVKLTIQKEVMNGAILQQVFVVDYVVQSQMCGDCHRVEAKDFWKA

SEQ ID NO: 57379 - protein, 503 aa, Homo sapiens; identical to SEQ ID NO: 57374
  Payload ID: 11264
  Gene Symbol: NMD3
  Gene Name: NMD3 ribosome export adaptor
  Uniprot ID: Q96D46
  ENSP ID: ENSP00000419004

SEQ ID NO: 57380 - protein, 218 aa, Homo sapiens; identical to SEQ ID NO: 57377
  Payload ID: 11264
  Gene Symbol: NMD3
  Gene Name: NMD3 ribosome export adaptor
  ENSP ID: ENSP00000419030

SEQ ID NO: 57381 - protein, 162 aa, Homo sapiens
  Payload ID: 11264
  Gene Symbol: NMD3
  Gene Name: NMD3 ribosome export adaptor
  ENSP ID: ENSP00000419647
MEYMAESTDRSPGHILCCECGVPISPNPANICVACLRSKVDISQGIPKQVSISFCKQCQRYFQPPGTWIQCALESRELLALCLKKIKAPLSKVRLVDAGFVWTEPHSKRLKVKLTIQKEVMNGAILQQVFVVDYVVQSQMCGDCHRVEAKDFWKAVIQVRQK

SEQ ID NO: 57382 - protein, 528 aa, Homo sapiens
  Payload ID: 11265
  Gene Symbol: NSMF
  Gene Name: NMDA receptor synaptonuclear signaling and neuronal migration factor
  Uniprot ID: Q6X4W1
  ENSP ID: ENSP00000265663
MGAAASRRRALRSEAMSSVAAKVRAARAFGEYLSQSHPENRNGADHLLADAYSGHDGSPEMQPAPQNKRRLSLVSNGCYEGSLSEEPSIRKPAGEGPQPRVYTISGEPALLPSPEAEAIELAVVKGRRQRHPHHHSQPLRASPGGSREDVSRPCQSWAGSRQGSKECPGCAQLAPGPTPRAFGLDQPPLPETSGRRKKLERMYSVDRVSDDIPIRTWFPKENLFSFQTATTTMQAVFRGYAERKRRKRENDSASVIQRNFRKHLRMVGSRRVKAQTFAERRERSFSRSWSDPTPMKADTSHDSRDSSDLQSSHCTLDEAFEDLDWDTEKGLEAVACDTEGFVPPKVMLISSKVPKAEYIPTIIRRDDPSIIPILYDHEHATFEDILEEIERKLNVYHKGAKIWKMLIFCQGGPGHLYLLKNKVATFAKVEKEEDMIHFWKRLSRLMSKVNPEPNVIHIMGCYILGNPNGEKLFQNLRTLMTPYRVTFESPLELSAQGKQMIETYFDFRLYRLWKSRQHSKLLDFDDVL

SEQ ID NO: 57383 - protein, 327 aa, Homo sapiens
  Payload ID: 11265
  Gene Symbol: NSMF
  Gene Name: NMDA receptor synaptonuclear signaling and neuronal migration factor
  ENSP ID: ENSP00000342966
MYSVDRVSDDIPIRTWFPKENLFSFQTATTTMQAVFRGYAERKRRKRENDSASVIQRNFRKHLRMVGSRRVKAQTFAERRERSFSRSWSDPTPMKADTSHDSRDSSDLQSSHCTLDEAFEDLDWDTEKGLEAVACDTEGFVPPKVMLISSKVPKAEYIPTIIRRDDPSIIPILYDHEHATFEDILEEIERKLNVYHKGAKIWKMLIFCQGGPGHLYLLKNKVATFAKVEKEEDMIHFWKRLSRLMSKVNPEPNVIHIMGCYILGNPNGEKLFQNLRTLMTPYRVTFESPLELSAQGKQMIETYFDFRLYRLWKSRQHSKLLDFDDVL

SEQ ID NO: 57384 - protein, 145 aa, Homo sapiens
  Payload ID: 11265
  Gene Symbol: NSMF
  Gene Name: NMDA receptor synaptonuclear signaling and neuronal migration factor
  ENSP ID: ENSP00000360523
MVGSRRVKAQTFAERRERSFSRSWSDPTPMKADTSHDSRDSSDLQSSHCTLDEAFEDLDWDTEKGLEAVACDTEGFVPPKVMLISSKVPKAEYIPTIIRRDDPSIIPILYVSPAPGLPPTDALLRPHPGPAPAPQVPRVLWRCWL

SEQ ID NO: 57385 - protein, 528 aa, Homo sapiens; identical to SEQ ID NO: 57382
  Payload ID: 11265
  Gene Symbol: NSMF
  Gene Name: NMDA receptor synaptonuclear signaling and neuronal migration factor
  Uniprot ID: Q6X4W1
  ENSP ID: ENSP00000360527

SEQ ID NO: 57386 - protein, 500 aa, Homo sapiens
  Payload ID: 11265
  Gene Symbol: NSMF
  Gene Name: NMDA receptor synaptonuclear signaling and neuronal migration factor
  Uniprot ID: Q6X4W1
  ENSP ID: ENSP00000360528
MGAAASRRRALRSEAMSSVAAKVRAARAFGEYLSQSHPENRNGADHLLADAYSGHDGSPEMQPAPQNKRRLSLVSNGCYEGSLSEEPSIRKPAGEGPQPRVYTISGEPALLPSPEAEAIELAVVKGRRQRHPHHHSQPLRASPGGSREDVSRPCQSWAGSRQGSKECPGCAQLAPGPTPRAFGLDQPPLPETSGRRKKLERMYSVDRVSDDIPIRTWFPKENLFSFQTATTTMQAISVFRGYAERKRRKRENDSASVIQRNFRKHLRMVGSRRVKAQSSDLQSSHCTLDEAFEDLDWDTEKGLEAVACDTEGFVPPKVMLISSKVPKAEYIPTIIRRDDPSIIPILYDHEHATFEDILEEIERKLNVYHKGAKIWKMLIFCQGGPGHLYLLKNKVATFAKVEKEEDMIHFWKRLSRLMSKVNPEPNVIHIMGCYILGNPNGEKLFQNLRTLMTPYRVTFESPLELSAQGKQMIETYFDFRLYRLWKSRQHSKLLDFDDVL

SEQ ID NO: 57387 - protein, 505 aa, Homo sapiens
  Payload ID: 11265
  Gene Symbol: NSMF
  Gene Name: NMDA receptor synaptonuclear signaling and neuronal migration factor
  Uniprot ID: Q6X4W1
  ENSP ID: ENSP00000360529
MGAAASRRRALRSEAMSSVAAKVRAARAFGEYLSQSHPENRNGADHLLADAYSGHDGSPEMQPAPQNKRRLSLVSNGCYEGSLSEEPSIRKPAGEGPQPRVYTISGEPALLPSPEAEAIELAVVKGRRQRHPHHHSQPLRASPGGSREDVSRPCQSWAGSRQGSKECPGCAQLAPGPTPRAFGLDQPPLPETSGRRKKLERMYSVDRVSDDIPIRTWFPKENLFSFQTATTTMQANFRKHLRMVGSRRVKAQTFAERRERSFSRSWSDPTPMKADTSHDSRDSSDLQSSHCTLDEAFEDLDWDTEKGLEAVACDTEGFVPPKVMLISSKVPKAEYIPTIIRRDDPSIIPILYDHEHATFEDILEEIERKLNVYHKGAKIWKMLIFCQGGPGHLYLLKNKVATFAKVEKEEDMIHFWKRLSRLMSKVNPEPNVIHIMGCYILGNPNGEKLFQNLRTLMTPYRVTFESPLELSAQGKQMIETYFDFRLYRLWKSRQHSKLLDFDDVL

SEQ ID NO: 57388 - protein, 530 aa, Homo sapiens
  Payload ID: 11265
  Gene Symbol: NSMF
  Gene Name: NMDA receptor synaptonuclear signaling and neuronal migration factor
  Uniprot ID: Q6X4W1
  ENSP ID: ENSP00000360530
MGAAASRRRALRSEAMSSVAAKVRAARAFGEYLSQSHPENRNGADHLLADAYSGHDGSPEMQPAPQNKRRLSLVSNGCYEGSLSEEPSIRKPAGEGPQPRVYTISGEPALLPSPEAEAIELAVVKGRRQRHPHHHSQPLRASPGGSREDVSRPCQSWAGSRQGSKECPGCAQLAPGPTPRAFGLDQPPLPETSGRRKKLERMYSVDRVSDDIPIRTWFPKENLFSFQTATTTMQAISVFRGYAERKRRKRENDSASVIQRNFRKHLRMVGSRRVKAQTFAERRERSFSRSWSDPTPMKADTSHDSRDSSDLQSSHCTLDEAFEDLDWDTEKGLEAVACDTEGFVPPKVMLISSKVPKAEYIPTIIRRDDPSIIPILYDHEHATFEDILEEIERKLNVYHKGAKIWKMLIFCQGGPGHLYLLKNKVATFAKVEKEEDMIHFWKRLSRLMSKVNPEPNVIHIMGCYILGNPNGEKLFQNLRTLMTPYRVTFESPLELSAQGKQMIETYFDFRLYRLWKSRQHSKLLDFDDVL

SEQ ID NO: 57389 - protein, 194 aa, Homo sapiens
  Payload ID: 11265
  Gene Symbol: NSMF
  Gene Name: NMDA receptor synaptonuclear signaling and neuronal migration factor
  ENSP ID: ENSP00000360537
MGLGPLSSSLSPQLISSKVPKAEYIPTIIRRDDPSIIPILYDHEHATFEDILEEIERKLNVYHKGAKIWKMLIFCQGGPGHLYLLKNKVATFAKVEKEEDMIHFWKRLSRLMSKVNPEPNVIHIMGCYILGNPNGEKLFQNLRTLMTPYRVTFESPLELSAQGKQMIETYFDFRLYRLWKSRQHSKLLDFDDVL

SEQ ID NO: 57390 - protein, 507 aa, Homo sapiens
  Payload ID: 11265
  Gene Symbol: NSMF
  Gene Name: NMDA receptor synaptonuclear signaling and neuronal migration factor
  Uniprot ID: Q6X4W1
  ENSP ID: ENSP00000412007
MGAAASRRRALRSEAMSSVAAKVRAARAFGEYLSQSHPENRNGADHLLADAYSGHDGSPEMQPAPQNKRRLSLVSNGCYEGSLSEEPSIRKPAGEGPQPRVYTISGEPALLPSPEAEAIELAVVKGRRQRHPHHHSQPLRASPGGSREDVSRPCQSWAGSRQGSKECPGCAQLAPGPTPRAFGLDQPPLPETSGRRKKLERMYSVDRVSDDIPIRTWFPKENLFSFQTATTTMQAISNFRKHLRMVGSRRVKAQTFAERRERSFSRSWSDPTPMKADTSHDSRDSSDLQSSHCTLDEAFEDLDWDTEKGLEAVACDTEGFVPPKVMLISSKVPKAEYIPTIIRRDDPSIIPILYDHEHATFEDILEEIERKLNVYHKGAKIWKMLIFCQGGPGHLYLLKNKVATFAKVEKEEDMIHFWKRLSRLMSKVNPEPNVIHIMGCYILGNPNGEKLFQNLRTLMTPYRVTFESPLELSAQGKQMIETYFDFRLYRLWKSRQHSKLLDFDDVL

SEQ ID NO: 57391 - protein, 212 aa, Homo sapiens
  Payload ID: 11266
  Gene Symbol: NME5
  Gene Name: NME/NM23 family member 5
  Uniprot ID: P56597
  ENSP ID: ENSP00000265191
MEISMPPPQIYVEKTLAIIKPDIVDKEEEIQDIILRSGFTIVQRRKLRLSPEQCSNFYVEKYGKMFFPNLTAYMSSGPLVAMILARHKAISYWLELLGPNNSLVAKETHPDSLRAIYGTDDLRNALHGSNDFAAAEREIRFMFPEVIVEPIPIGQAAKDYLNLHIMPTLLEGLTELCKQKPADPLIWLADWLLKNNPNKPKLCHHPIVEEPY

SEQ ID NO: 57392 - protein, 376 aa, Homo sapiens
  Payload ID: 11267
  Gene Symbol: NME7
  Gene Name: NME/NM23 family member 7
  Uniprot ID: Q9Y5B8
  ENSP ID: ENSP00000356785
MNHSERFVFIAEWYDPNASLLRRYELLFYPGDGSVEMHDVKNHRTFLKRTKYDNLHLEDLFIGNKVNVFSRQLVLIDYGDQYTARQLGSRKEKTLALIKPDAISKAGEIIEIINKAGFTITKLKMMMLSRKEALDFHVDHQSRPFFNELIQFITTGPIIAMEILRDDAICEWKRLLGPANSGVARTDASESIRALFGTDGIRNAAHGPDSFASAAREMELFFPSSGGCGPANTAKFTNCTCCIVKPHAVSEGLLGKILMAIRDAGFEISAMQMFNMDRVNVEEFYEVYKGVVTEYHDMVTEMYSGPCVAMEIQQNNATKTFREFCGPADPEIARHLRPGTLRAIFGKTKIQNAVHCTDLPEDGLLEVQYFFKILDN

SEQ ID NO: 57393 - protein, 339 aa, Homo sapiens
  Payload ID: 11267
  Gene Symbol: NME7
  Gene Name: NME/NM23 family member 7
  ENSP ID: ENSP00000431467
MNHSERFVFIAEWYDPNASLLRRYELLFYPGDGSVEMHDVKNHRTFLKRTKYDNLHLEDLFIGNKVNVFSRQLVLIDYGDQYTARQLGSRKEKTLALIKPDAISKAGEIIEIINKAGFTITKLKMMMLSRKEALDFHVDHQSRPFFNELIQFITTGPIIAMEILRDDAICEWKRLLGPANSGVARTDASESIRALFGTDGIRNAAHGPDSFASAAREMELFFPSSGGCGPANTAKFTNCTCCIVKPHAVSEGLLGKILMAIRDAGFEISAMQMFNMDRVNVEEFYEVYKGVVTEYHDMVTEMYSGPCVAMEIQQNNATKTFREFCGPADPTPKSPISHK

SEQ ID NO: 57394 - protein, 256 aa, Homo sapiens
  Payload ID: 11267
  Gene Symbol: NME7
  Gene Name: NME/NM23 family member 7
  ENSP ID: ENSP00000432753
MNHSERFVFIAEWYDPNASLLRRYELLFYPGDGSVEMHDVKNHRTFLKRTKYDNLHLEDLFIGNKVNVFSRQLVLIDYGDQYTARQLGSRKEKTLALIKPDAISKAGEIIEIINKAGFTITKLKMMMLSRKEALDFHVDHQSRPFFNELIQFITTGPIIAMEILRDDAICEWKRLLGPANSGVARTDASESIRALFGTDGIRNAAHGPDSFASAAREMELFFPSSGGCGPANTAKFTNCTCCIVKPHAVSEVRRNP

SEQ ID NO: 57395 - protein, 340 aa, Homo sapiens
  Payload ID: 11267
  Gene Symbol: NME7
  Gene Name: NME/NM23 family member 7
  Uniprot ID: Q9Y5B8
  ENSP ID: ENSP00000433341
MHDVKNHRTFLKRTKYDNLHLEDLFIGNKVNVFSRQLVLIDYGDQYTARQLGSRKEKTLALIKPDAISKAGEIIEIINKAGFTITKLKMMMLSRKEALDFHVDHQSRPFFNELIQFITTGPIIAMEILRDDAICEWKRLLGPANSGVARTDASESIRALFGTDGIRNAAHGPDSFASAAREMELFFPSSGGCGPANTAKFTNCTCCIVKPHAVSEGLLGKILMAIRDAGFEISAMQMFNMDRVNVEEFYEVYKGVVTEYHDMVTEMYSGPCVAMEIQQNNATKTFREFCGPADPEIARHLRPGTLRAIFGKTKIQNAVHCTDLPEDGLLEVQYFFKILDN

SEQ ID NO: 57396 - protein, 588 aa, Homo sapiens
  Payload ID: 11268
  Gene Symbol: NME8
  Gene Name: NME/NM23 family member 8
  Uniprot ID: Q8N427
  ENSP ID: ENSP00000199447
MASKKREVQLQTVINNQSLWDEMLQNKGLTVIDVYQAWCGPCRAMQPLFRKLKNELNEDEILHFAVAEADNIVTLQPFRDKCEPVFLFSVNGKIIEKIQGANAPLVNKKVINLIDEERKIAAGEMARPQYPEIPLVDSDSEVSEESPCESVQELYSIAIIKPDAVISKKVLEIKRKITKAGFIIEAEHKTVLTEEQVVNFYSRIADQCDFEEFVSFMTSGLSYILVVSQGSKHNPPSEETEPQTDTEPNERSEDQPEVEAQVTPGMMKNKQDSLQEYLERQHLAQLCDIEEDAANVAKFMDAFFPDFKKMKSMKLEKTLALLRPNLFHERKDDVLRIIKDEDFKILEQRQVVLSEKEAQALCKEYENEDYFNKLIENMTSGPSLALVLLRDNGLQYWKQLLGPRTVEEAIEYFPESLCAQFAMDSLPVNQLYGSDSLETAEREIQHFFPLQSTLGLIKPHATSEQREQILKIVKEAGFDLTQVKKMFLTPEQIEKIYPKVTGKDFYKDLLEMLSVGPSMVMILTKWNAVAEWRRLMGPTDPEEAKLLSPDSIRAQFGISKLKNIVHGASNAYEAKEVVNRLFEDPEEN

SEQ ID NO: 57397 - protein, 115 aa, Homo sapiens
  Payload ID: 11268
  Gene Symbol: NME8
  Gene Name: NME/NM23 family member 8
  ENSP ID: ENSP00000390047
MASKKREVQLQAEADNIVTLQPFRDKCEPVFLFSVNGKIIEKIQGANAPLVNKKVINLIDEERKIAAGEMARPQYPEIPLVDSDSEVSEESPCESVQELYSIAIIKPDAVISKKV

SEQ ID NO: 57398 - protein, 150 aa, Homo sapiens
  Payload ID: 11268
  Gene Symbol: NME8
  Gene Name: NME/NM23 family member 8
  ENSP ID: ENSP00000390596
MASKKREVQLQAEADNIVTLQPFRDKCEPVFLFSVNGKIIEKIQGANAPLVNKKVINLIDEERKIAAGEMARPQYPEIPLVDSDSEVSEESPCESVQELYSIAIIKPDAVISKKVLEIKRKITKAGFIIEAEHKTVLTEEQVVNFYSRIA

SEQ ID NO: 57399 - protein, 588 aa, Homo sapiens; identical to SEQ ID NO: 57396
  Payload ID: 11268
  Gene Symbol: NME8
  Gene Name: NME/NM23 family member 8
  Uniprot ID: Q8N427
  ENSP ID: ENSP00000397063

SEQ ID NO: 57400 - protein, 54 aa, Homo sapiens
  Payload ID: 11268
  Gene Symbol: NME8
  Gene Name: NME/NM23 family member 8
  ENSP ID: ENSP00000408841
MASKKREVQLQAEADNIVTLQPFRDKCEPVFLFSVMMFCVLLKMKTSKYWSKDK

SEQ ID NO: 57401 - protein, 263 aa, Homo sapiens
  Payload ID: 11269
  Gene Symbol: NME9
  Gene Name: NME/NM23 family member 9
  Uniprot ID: Q86XW9
  ENSP ID: ENSP00000321929
MLSSKGLTVVDVYQGWCGPCKPVVSLFQKMRIEVGLDLLHFALAEADRLDVLEKYRGKCEPTFLFYAIKDEALSDEDECVSHGKNNGEDEDMVSSERTCTLAIIKPDAVAHGKTDEIIMKIQEAGFEILTNEERTMTEAEVRLFYQHKAGEEAFEKLVHHMCSGPSHLLILTRTEGFEDVVTTWRTVMGPRDPNVARREQPESLRAQYGTEMPFNAVHGSRDREDADRELALLFPSLKFSDKDTEAPQGESSTQPRLKITDLD

SEQ ID NO: 57402 - protein, 330 aa, Homo sapiens
  Payload ID: 11269
  Gene Symbol: NME9
  Gene Name: NME/NM23 family member 9
  Uniprot ID: Q86XW9
  ENSP ID: ENSP00000335444
MGSRKKEIALQVNISTQELWEEMLSSKGLTVVDVYQGWCGPCKPVVSLFQKMRIEVGLDLLHFALAEADRLDVLEKYRGKCEPTFLFYAGGELVAVVRGANAPLLQKTILDQLEAEKKVLAEGRERKVIKDEALSDEDECVSHGKNNGEDEDMVSSERTCTLAIIKPDAVAHGKTDEIIMKIQEAGFEILTNEERTMTEAEVRLFYQHKAGEEAFEKLVHHMCSGPSHLLILTRTEGFEDVVTTWRTVMGPRDPNVARREQPESLRAQYGTEMPFNAVHGSRDREDADRELALLFPSLKFSDKDTEAPQGGEAEATAGPTEALCFPEDVD

SEQ ID NO: 57403 - protein, 263 aa, Homo sapiens; identical to SEQ ID NO: 57401
  Payload ID: 11269
  Gene Symbol: NME9
  Gene Name: NME/NM23 family member 9
  Uniprot ID: Q86XW9
  ENSP ID: ENSP00000372667

SEQ ID NO: 57404 - protein, 202 aa, Homo sapiens
  Payload ID: 11269
  Gene Symbol: NME9
  Gene Name: NME/NM23 family member 9
  ENSP ID: ENSP00000419147
MGSRKKEIALQVNISTQELWEEMLSSKGLTVVDVYQGWCGPCKPVVSLFQKMRIEVGLDLLHFALAEADRLDVLEKYRGKCEPTFLFYAGGELVAVVRGANAPLLQKTILDQLEAEKKVLAEGRERKVIKDEALSDEDECVSHGKNNGEDEDMVSSERTCTLAIIKPDAVAHGKTDEIIMKIQEAGFEILTNEERTMTEAEV

SEQ ID NO: 57405 - protein, 174 aa, Homo sapiens
  Payload ID: 11269
  Gene Symbol: NME9
  Gene Name: NME/NM23 family member 9
  ENSP ID: ENSP00000419355
MLSSKGLTVVDVYQGWCGPCKPVVSLFQKMRIEVGLDLLHFALAEADRLDVLEKYRGKCEPTFLFYAIKDEALSDEDECVSHGKNNGEDEDMVSSERTCTLAIIKPDAVAHGKTDEIIMKIQEAGFEILTNEERTMTEAEVRLFYQHKAGESPSSVRHRNALQCRPWKPGQRRC

SEQ ID NO: 57406 - protein, 261 aa, Homo sapiens
  Payload ID: 11269
  Gene Symbol: NME9
  Gene Name: NME/NM23 family member 9
  Uniprot ID: Q86XW9
  ENSP ID: ENSP00000419882
MGSRKKEIALQVNISTQELWEEMLSSKGLTVVDVYQGWCGPCKPVVSLFQKMRIEVGLDLLHFALIKDEALSDEDECVSHGKNNGEDEDMVSSERTCTLAIIKPDAVAHGKTDEIIMKIQEAGFEILTNEERTMTEAEVRLFYQHKAGEEAFEKLVHHMCSGPSHLLILTRTEGFEDVVTTWRTVMGPRDPNVARREQPESLRAQYGTEMPFNAVHGSRDREDADRELALLFPSLKFSDKDTEAPQGESSTQPRLKITDLD

SEQ ID NO: 57407 - protein, 30 aa, Homo sapiens
  Payload ID: 11269
  Gene Symbol: NME9
  Gene Name: NME/NM23 family member 9
  ENSP ID: ENSP00000420258
MGSRKKEIALQVNISTQELWEEMLSSKGLT

SEQ ID NO: 57408 - protein, 166 aa, Homo sapiens
  Payload ID: 11269
  Gene Symbol: NME9
  Gene Name: NME/NM23 family member 9
  ENSP ID: ENSP00000420435
  MOD_RES (1)..(1): Any amino acid
XVDVYQGWCGPCKPVVSLFQKMRIEVGLDLLHFALAEADRLDVLEKYRGKCEPTFLFYAIKDEALSDEDECVSHGKNNGEDEDMVSSERTCTLAIIKPDAVAHGKTDEIIMKIQEAGFEILTNEERTMTEAEVRLFYQHKAGESPSSVRHRNALQCRPWKPGQRRC

SEQ ID NO: 57409 - protein, 89 aa, Homo sapiens
  Payload ID: 11269
  Gene Symbol: NME9
  Gene Name: NME/NM23 family member 9
  ENSP ID: ENSP00000420668
MGSRKKEIALQVNISTQELWEEMLSSKGLTGTKGECIGRNTGISWNSKDGRRARHHWDLNLGLQSLGNSRPLSMGLLIPILLASVICCT

SEQ ID NO: 57410 - protein, 177 aa, Homo sapiens
  Payload ID: 11270
  Gene Symbol: NME1
  Gene Name: NME/NM23 nucleoside diphosphate kinase 1
  Uniprot ID: P15531
  ENSP ID: ENSP00000013034
MVLLSTLGIVFQGEGPPISSCDTGTMANCERTFIAIKPDGVQRGLVGEIIKRFEQKGFRLVGLKFMQASEDLLKEHYVDLKDRPFFAGLVKYMHSGPVVAMVWEGLNVVKTGRVMLGETNPADSKPGTIRGDFCIQVGRNIIHGSDSVESAEKEIGLWFHPEELVDYTSCAQNWIYE

SEQ ID NO: 57411 - protein, 177 aa, Homo sapiens; identical to SEQ ID NO: 57410
  Payload ID: 11270
  Gene Symbol: NME1
  Gene Name: NME/NM23 nucleoside diphosphate kinase 1
  Uniprot ID: P15531
  ENSP ID: ENSP00000337060

SEQ ID NO: 57412 - protein, 152 aa, Homo sapiens
  Payload ID: 11270
  Gene Symbol: NME1
  Gene Name: NME/NM23 nucleoside diphosphate kinase 1
  Uniprot ID: P15531
  ENSP ID: ENSP00000376892
MANCERTFIAIKPDGVQRGLVGEIIKRFEQKGFRLVGLKFMQASEDLLKEHYVDLKDRPFFAGLVKYMHSGPVVAMVWEGLNVVKTGRVMLGETNPADSKPGTIRGDFCIQVGRNIIHGSDSVESAEKEIGLWFHPEELVDYTSCAQNWIYE

SEQ ID NO: 57413 - protein, 60 aa, Homo sapiens
  Payload ID: 11270
  Gene Symbol: NME1
  Gene Name: NME/NM23 nucleoside diphosphate kinase 1
  ENSP ID: ENSP00000387682
MVLLSTLGIVFQGEGPPISSCDTGTMANCERTFIAIKPDGVQRGLVGEIIKRFEQKGFRL

SEQ ID NO: 57414 - protein, 82 aa, Homo sapiens
  Payload ID: 11270
  Gene Symbol: NME1
  Gene Name: NME/NM23 nucleoside diphosphate kinase 1
  ENSP ID: ENSP00000428553
MANCERTFIAIKPDGVQRGLVGEIIKRFEQKGFRLVGLKFMQASEDLLKEHYVDLKDRPFFAGLVKYMHSGPVVAMLPDFLL

SEQ ID NO: 57415 - protein, 139 aa, Homo sapiens
  Payload ID: 11270
  Gene Symbol: NME1
  Gene Name: NME/NM23 nucleoside diphosphate kinase 1
  ENSP ID: ENSP00000429318
MVLLSTLGIVFQGEGPPISSCDTGTMANCERTFIAIKPDGVQRGLVGEIIKRFEQKGFRLVGLKFMQASEDLLKEHYVDLKDRPFFAGLVKYMHSGPVVAMVWEGLNVVKTGRVMLGETNPADSKPGTIRGDFCIQVGR

SEQ ID NO: 57416 - protein, 82 aa, Homo sapiens; identical to SEQ ID NO: 57414
  Payload ID: 11270
  Gene Symbol: NME1
  Gene Name: NME/NM23 nucleoside diphosphate kinase 1
  ENSP ID: ENSP00000435498

SEQ ID NO: 57417 - protein, 82 aa, Homo sapiens
  Payload ID: 11271
  Gene Symbol: NME2
  Gene Name: NME/NM23 nucleoside diphosphate kinase 2
  ENSP ID: ENSP00000376880
MANLERTFIAIKPDGVQRGLVGEIIKRFEQKGFRLVAMKFLRASEEHLKQHYIDLKDRPFFPGLVKYMNSGPVVAMEHHSWQ

SEQ ID NO: 57418 - protein, 152 aa, Homo sapiens
  Payload ID: 11271
  Gene Symbol: NME2
  Gene Name: NME/NM23 nucleoside diphosphate kinase 2
  ENSP ID: ENSP00000376886
MANLERTFIAIKPDGVQRGLVGEIIKRFEQKGFRLVAMKFLRASEEHLKQHYIDLKDRPFFPGLVKYMNSGPVVAMVWEGLNVVKTGRVMLGETNPADSKPGTIRGDFCIQVGRNIIHGSDSVKSAEKEISLWFKPEELVDYKSCAHDWVYE

SEQ ID NO: 57419 - protein, 152 aa, Homo sapiens; identical to SEQ ID NO: 57418
  Payload ID: 11271
  Gene Symbol: NME2
  Gene Name: NME/NM23 nucleoside diphosphate kinase 2
  ENSP ID: ENSP00000421064

SEQ ID NO: 57420 - protein, 152 aa, Homo sapiens; identical to SEQ ID NO: 57418
  Payload ID: 11271
  Gene Symbol: NME2
  Gene Name: NME/NM23 nucleoside diphosphate kinase 2
  ENSP ID: ENSP00000425581

SEQ ID NO: 57421 - protein, 152 aa, Homo sapiens; identical to SEQ ID NO: 57418
  Payload ID: 11271
  Gene Symbol: NME2
  Gene Name: NME/NM23 nucleoside diphosphate kinase 2
  ENSP ID: ENSP00000426901

SEQ ID NO: 57422 - protein, 152 aa, Homo sapiens; identical to SEQ ID NO: 57418
  Payload ID: 11271
  Gene Symbol: NME2
  Gene Name: NME/NM23 nucleoside diphosphate kinase 2
  ENSP ID: ENSP00000426976

SEQ ID NO: 57423 - protein, 169 aa, Homo sapiens
  Payload ID: 11272
  Gene Symbol: NME3
  Gene Name: NME/NM23 nucleoside diphosphate kinase 3
  Uniprot ID: Q13232
  ENSP ID: ENSP00000219302
MICLVLTIFANLFPAACTGAHERTFLAVKPDGVQRRLVGEIVRRFERKGFKLVALKLVQASEELLREHYAELRERPFYGRLVKYMASGPVVAMVWQGLDVVRTSRALIGATNPADAPPGTIRGDFCIEVGKNLIHGSDSVESARREIALWFRADELLCWEDSAGHWLYE

SEQ ID NO: 57424 - protein, 57 aa, Homo sapiens
  Payload ID: 11272
  Gene Symbol: NME3
  Gene Name: NME/NM23 nucleoside diphosphate kinase 3
  ENSP ID: ENSP00000454498
IFANLFPAACTGAHERTFLAVKPDGVQRRLVGEIVRRFERKGFKRPDPSAGLRGAAA

SEQ ID NO: 57425 - protein, 53 aa, Homo sapiens
  Payload ID: 11272
  Gene Symbol: NME3
  Gene Name: NME/NM23 nucleoside diphosphate kinase 3
  ENSP ID: ENSP00000455271
FANLFPAACTGAHERTFLAVKPDGVQRRLVGEIVRRFERKGFKLVALKLVQAA

SEQ ID NO: 57426 - protein, 85 aa, Homo sapiens
  Payload ID: 11272
  Gene Symbol: NME3
  Gene Name: NME/NM23 nucleoside diphosphate kinase 3
  ENSP ID: ENSP00000455435
MASGPVVAMVWQGLDVVRTSRALIGATNPADAPPGTIRGDFCIEVGKNLIHGSDSVESARREIALWFRADELLCWEDSAGHWLYE

SEQ ID NO: 57427 - protein, 123 aa, Homo sapiens
  Payload ID: 11272
  Gene Symbol: NME3
  Gene Name: NME/NM23 nucleoside diphosphate kinase 3
  ENSP ID: ENSP00000456160
PAACTGAHERTFLAVKPDGVQRRLVGEIVRRFERKGFKLVALKLVQVGARPPRSCCVSTTPSCVNARSTAALSSIWPPGRWWPWYGRGWTWCAPRGRSSEPRTRPTPRPAPSAGISASRLART

SEQ ID NO: 57428 - protein, 187 aa, Homo sapiens
  Payload ID: 11273
  Gene Symbol: NME4
  Gene Name: NME/NM23 nucleoside diphosphate kinase 4
  Uniprot ID: O00746
  ENSP ID: ENSP00000219479
MGGLFWRSALRGLRCGPRAPGPSLLVRHGSGGPSWTRERTLVAVKPDGVQRRLVGDVIQRFERRGFTLVGMKMLQAPESVLAEHYQDLRRKPFYPALIRYMSSGPVVAMVWEGYNVVRASRAMIGHTDSAEAAPGTIRGDFSVHISRNVIHASDSVEGAQREIQLWFQSSELVSWADGGQHSSIHPA

SEQ ID NO: 57429 - protein, 195 aa, Homo sapiens
  Payload ID: 11273
  Gene Symbol: NME4
  Gene Name: NME/NM23 nucleoside diphosphate kinase 4
  ENSP ID: ENSP00000372398
MGGLFWRSALRGLRCGPRAPGPSLLVRHGSGLPPSALKRGPSWTRERTLVAVKPDGVQRRLVGDVIQRFERRGFTLVGMKMLQAPESVLAEHYQDLRRKPFYPALIRYMSSGPVVAMVWEGYNVVRASRAMIGHTDSAEAAPGTIRGDFSVHISRNVIHASDSVEGAQREIQLWFQSSELVSWADGGQHSSIHPA

SEQ ID NO: 57430 - protein, 117 aa, Homo sapiens
  Payload ID: 11273
  Gene Symbol: NME4
  Gene Name: NME/NM23 nucleoside diphosphate kinase 4
  Uniprot ID: O00746
  ENSP ID: ENSP00000380834
MKMLQAPESVLAEHYQDLRRKPFYPALIRYMSSGPVVAMVWEGYNVVRASRAMIGHTDSAEAAPGTIRGDFSVHISRNVIHASDSVEGAQREIQLWFQSSELVSWADGGQHSSIHPA

SEQ ID NO: 57431 - protein, 117 aa, Homo sapiens; identical to SEQ ID NO: 57430
  Payload ID: 11273
  Gene Symbol: NME4
  Gene Name: NME/NM23 nucleoside diphosphate kinase 4
  Uniprot ID: O00746
  ENSP ID: ENSP00000389048

SEQ ID NO: 57432 - protein, 233 aa, Homo sapiens
  Payload ID: 11273
  Gene Symbol: NME4
  Gene Name: NME/NM23 nucleoside diphosphate kinase 4
  ENSP ID: ENSP00000395605
MGGLFWRSALRGLRCGPRAPGPSLLVRHGSGGPSWTRERTLVAVKPDGVQRRLVGDVIQRFERRGFTLVGMKMLQAPESVLAEHYQDLRRKPFYPALIRYMSSGPVVAMVWEGYNVVRASRAMIGHTDSAEAAPGTIRGDFSVHISRNVIHASDSVEGAQREIQLWFQSSELSPTGAPWPSRRPTWRGTTVSPRTATSSARTCCGTKWPSSQEAALGLGSGLLRFSCGTAAIR

SEQ ID NO: 57433 - protein, 169 aa, Homo sapiens
  Payload ID: 11273
  Gene Symbol: NME4
  Gene Name: NME/NM23 nucleoside diphosphate kinase 4
  ENSP ID: ENSP00000405925
  MOD_RES (1)..(1): Any amino acid
XWRSALRGLRCGPRAPGPSLLVRHGSGGPSWTRERTLVAVKPDGVQRRLVGDVIQRFERRGFTLVGMKMLQAPESVLAEHYQDLRRKPFYPALIRYMSSGPVVAMVWEGYNVVRASRAMIGHTDSAEAAPGTIRGDFSVHISSHRLAPLDRGQREQQMVPGIPQGAHEA

SEQ ID NO: 57434 - protein, 37 aa, Homo sapiens
  Payload ID: 11273
  Gene Symbol: NME4
  Gene Name: NME/NM23 nucleoside diphosphate kinase 4
  ENSP ID: ENSP00000406317
MKMLQAPESVLAEHYQDLRRKPFYPALIRYMSSGPVV

SEQ ID NO: 57435 - protein, 44 aa, Homo sapiens
  Payload ID: 11273
  Gene Symbol: NME4
  Gene Name: NME/NM23 nucleoside diphosphate kinase 4
  ENSP ID: ENSP00000412039
MGGLFWRSALRGLRCGPRAPGPSLLVRHGSASPPEEDGWGGAQR

SEQ ID NO: 57436 - protein, 153 aa, Homo sapiens
  Payload ID: 11273
  Gene Symbol: NME4
  Gene Name: NME/NM23 nucleoside diphosphate kinase 4
  ENSP ID: ENSP00000479681
MGGLFWRSALRGLRCGPRAPGPSLLVRHGSGGPSWTRERTLVAVKPDGVQRRLVGDVIQRFERRGFTLVGMKMLQVWEGYNVVRASRAMIGHTDSAEAAPGTIRGDFSVHISRNVIHASDSVEGAQREIQLWFQSSELVSWADGGQHSSIHPA

SEQ ID NO: 57437 - protein, 117 aa, Homo sapiens; identical to SEQ ID NO: 57430
  Payload ID: 11273
  Gene Symbol: NME4
  Gene Name: NME/NM23 nucleoside diphosphate kinase 4
  Uniprot ID: O00746
  ENSP ID: ENSP00000479996

SEQ ID NO: 57438 - protein, 186 aa, Homo sapiens
  Payload ID: 11274
  Gene Symbol: NME6
  Gene Name: NME/NM23 nucleoside diphosphate kinase 6
  Uniprot ID: O75414
  ENSP ID: ENSP00000392352
MASILRSPQALQLTLALIKPDAVAHPLILEAVHQQILSNKFLIVRMRELLWRKEDCQRFYREHEGRFFYQRLVEFMASGPIRAYILAHKDAIQLWRTLMGPTRVFRARHVAPDSIRGSFGLTDTRNTTHGSDSVVSASREIAAFFPDFSEQRWYEEEEPQLRCGPVCYSPEGGVHYVAGTGGLGPA

SEQ ID NO: 57439 - protein, 111 aa, Homo sapiens
  Payload ID: 11274
  Gene Symbol: NME6
  Gene Name: NME/NM23 nucleoside diphosphate kinase 6
  ENSP ID: ENSP00000392715
MASILRSPQALQLTLALIKPDAVAHPLILEAVHQQILSNKFLIVRMRELLWRKEDCQRFYREHEGRFFYQRLVEFMASGPIRAYILAHKDAIQLWRTLMGPTRVFRARHVA

SEQ ID NO: 57440 - protein, 163 aa, Homo sapiens
  Payload ID: 11274
  Gene Symbol: NME6
  Gene Name: NME/NM23 nucleoside diphosphate kinase 6
  Uniprot ID: O75414
  ENSP ID: ENSP00000393261
MASILRSPQALQLTLALIKPDAVAHPLILEAVHQQILSNKFLIVRMRELLWRKEDCQRFYREHEAGQSEPTSLPTRMPSSSGGRSWDPPECSEHAMWPQILSVGVSASLTPATPPMVRTLWFQPAERLQPSSLTSVNSAGMRRKSPSCAVALCAIAQREVSTM

SEQ ID NO: 57441 - protein, 82 aa, Homo sapiens
  Payload ID: 11274
  Gene Symbol: NME6
  Gene Name: NME/NM23 nucleoside diphosphate kinase 6
  ENSP ID: ENSP00000394128
MASILRSPQALQLTLALIKPDAVAHPLILEAVHQQILSNKFLIVRMRELLWRKEDCQRFYREHEGKEVEVQKVALGTRMKVS

SEQ ID NO: 57442 - protein, 119 aa, Homo sapiens
  Payload ID: 11274
  Gene Symbol: NME6
  Gene Name: NME/NM23 nucleoside diphosphate kinase 6
  Uniprot ID: O75414
  ENSP ID: ENSP00000394232
MASILRSPQALQLTLALIKPDAVAHPLILEAVHQQILSNKFLIVRMRELLWRKEDCQRFYREHEDSVVSASREIAAFFPDFSEQRWYEEEEPQLRCGPVCYSPEGGVHYVAGTGGLGPA

SEQ ID NO: 57443 - protein, 186 aa, Homo sapiens; identical to SEQ ID NO: 57438
  Payload ID: 11274
  Gene Symbol: NME6
  Gene Name: NME/NM23 nucleoside diphosphate kinase 6
  Uniprot ID: O75414
  ENSP ID: ENSP00000399582

SEQ ID NO: 57444 - protein, 61 aa, Homo sapiens
  Payload ID: 11274
  Gene Symbol: NME6
  Gene Name: NME/NM23 nucleoside diphosphate kinase 6
  ENSP ID: ENSP00000405755
MRLERSEMASILRSPQALQLTLALIKPDAVAHPLILEAVHQQILSNKFLIVRMRELLWRKE

SEQ ID NO: 57445 - protein, 186 aa, Homo sapiens; identical to SEQ ID NO: 57438
  Payload ID: 11274
  Gene Symbol: NME6
  Gene Name: NME/NM23 nucleoside diphosphate kinase 6
  Uniprot ID: O75414
  ENSP ID: ENSP00000406642

SEQ ID NO: 57446 - protein, 163 aa, Homo sapiens; identical to SEQ ID NO: 57440
  Payload ID: 11274
  Gene Symbol: NME6
  Gene Name: NME/NM23 nucleoside diphosphate kinase 6
  Uniprot ID: O75414
  ENSP ID: ENSP00000407933

SEQ ID NO: 57447 - protein, 82 aa, Homo sapiens; identical to SEQ ID NO: 57441
  Payload ID: 11274
  Gene Symbol: NME6
  Gene Name: NME/NM23 nucleoside diphosphate kinase 6
  ENSP ID: ENSP00000410435

SEQ ID NO: 57448 - protein, 174 aa, Homo sapiens
  Payload ID: 11274
  Gene Symbol: NME6
  Gene Name: NME/NM23 nucleoside diphosphate kinase 6
  ENSP ID: ENSP00000411116
MASILRSPQALQLTLALIKPDAVAHPLILEAVHQQILSNKFLIVRMRELLWRKEDCQRFYREHEGRFFYQRLVEFMASGPIRAYILAHKDAIQLWRTLMGPTRVFRARHVAPDSIRGSFGLTDTRNTTHGSDSVVSASREIAAFFPDFSEQRWYEEEEPQLRCGPVCYSPEGGV

SEQ ID NO: 57449 - protein, 141 aa, Homo sapiens
  Payload ID: 11274
  Gene Symbol: NME6
  Gene Name: NME/NM23 nucleoside diphosphate kinase 6
  ENSP ID: ENSP00000414842
MRELLWRKEDCQRFYREHEGRFFYQRLVEFMASGPIRAYILAHKDAIQLWRTLMGPTRVFRARHVAPDSIRGSFGLTDTRNTTHGSDSVVSASREIAAFFPDFSEQRWYEEEEPQLRCGPVCYSPEGGVHYVAGTGGLGPA

SEQ ID NO: 57450 - protein, 194 aa, Homo sapiens
  Payload ID: 11274
  Gene Symbol: NME6
  Gene Name: NME/NM23 nucleoside diphosphate kinase 6
  ENSP ID: ENSP00000416658
MTQNLGSEMASILRSPQALQLTLALIKPDAVAHPLILEAVHQQILSNKFLIVRMRELLWRKEDCQRFYREHEGRFFYQRLVEFMASGPIRAYILAHKDAIQLWRTLMGPTRVFRARHVAPDSIRGSFGLTDTRNTTHGSDSVVSASREIAAFFPDFSEQRWYEEEEPQLRCGPVCYSPEGGVHYVAGTGGLGPA

SEQ ID NO: 57451 - protein, 186 aa, Homo sapiens; identical to SEQ ID NO: 57438
  Payload ID: 11274
  Gene Symbol: NME6
  Gene Name: NME/NM23 nucleoside diphosphate kinase 6
  Uniprot ID: O75414
  ENSP ID: ENSP00000440286

SEQ ID NO: 57452 - protein, 197 aa, Homo sapiens
  Payload ID: 11275
  Gene Symbol: NME1-NME2
  Gene Name: NME1-NME2 readthrough
  ENSP ID: ENSP00000365572
MANCERTFIAIKPDGVQRGLVGEIIKRFEQKGFRLVGLKFMQASEDLLKEHYVDLKDRPFFAGLVKYMHSGPVVAMVWEGLNVVKTGRVMLGETNPADSKPGTIRGDFCIQVGRTMANLERTFIAIKPDGVQRGLVGEIIKRFEQKGFRLVAMKFLRASEEHLKQHYIDLKDRPFFPGLVKYMNSGPVVAMEHHSWQ

SEQ ID NO: 57453 - protein, 267 aa, Homo sapiens
  Payload ID: 11275
  Gene Symbol: NME1-NME2
  Gene Name: NME1-NME2 readthrough
  Uniprot ID: P22392
  ENSP ID: ENSP00000376889
MANCERTFIAIKPDGVQRGLVGEIIKRFEQKGFRLVGLKFMQASEDLLKEHYVDLKDRPFFAGLVKYMHSGPVVAMVWEGLNVVKTGRVMLGETNPADSKPGTIRGDFCIQVGRTMANLERTFIAIKPDGVQRGLVGEIIKRFEQKGFRLVAMKFLRASEEHLKQHYIDLKDRPFFPGLVKYMNSGPVVAMVWEGLNVVKTGRVMLGETNPADSKPGTIRGDFCIQVGRNIIHGSDSVKSAEKEISLWFKPEELVDYKSCAHDWVYE

SEQ ID NO: 57454 - protein, 292 aa, Homo sapiens
  Payload ID: 11275
  Gene Symbol: NME1-NME2
  Gene Name: NME1-NME2 readthrough
  ENSP ID: ENSP00000451932
MVLLSTLGIVFQGEGPPISSCDTGTMANCERTFIAIKPDGVQRGLVGEIIKRFEQKGFRLVGLKFMQASEDLLKEHYVDLKDRPFFAGLVKYMHSGPVVAMVWEGLNVVKTGRVMLGETNPADSKPGTIRGDFCIQVGRTMANLERTFIAIKPDGVQRGLVGEIIKRFEQKGFRLVAMKFLRASEEHLKQHYIDLKDRPFFPGLVKYMNSGPVVAMVWEGLNVVKTGRVMLGETNPADSKPGTIRGDFCIQVGRNIIHGSDSVKSAEKEISLWFKPEELVDYKSCAHDWVYE

SEQ ID NO: 57455 - protein, 298 aa, Homo sapiens
  Payload ID: 11276
  Gene Symbol: MPG
  Gene Name: N-methylpurine DNA glycosylase
  Uniprot ID: P29372
  ENSP ID: ENSP00000219431
MVTPALQMKKPKQFCRRMGQKKQRPARAGQPHSSSDAAQAPAEQPHSSSDAAQAPCPRERCLGPPTTPGPYRSIYFSSPKGHLTRLGLEFFDQPAVPLARAFLGQVLVRRLPNGTELRGRIVETEAYLGPEDEAAHSRGGRQTPRNRGMFMKPGTLYVYIIYGMYFCMNISSQGDGACVLLRALEPLEGLETMRQLRSTLRKGTASRVLKDRELCSGPSKLCQALAINKSFDQRDLAQDEAVWLERGPLEPSEPAVVAAARVGVGHAGEWARKPLRFYVRGSPWVSVVDRVAEQDTQA

SEQ ID NO: 57456 - protein, 293 aa, Homo sapiens
  Payload ID: 11276
  Gene Symbol: MPG
  Gene Name: N-methylpurine DNA glycosylase
  Uniprot ID: P29372
  ENSP ID: ENSP00000348809
MPARSGAQFCRRMGQKKQRPARAGQPHSSSDAAQAPAEQPHSSSDAAQAPCPRERCLGPPTTPGPYRSIYFSSPKGHLTRLGLEFFDQPAVPLARAFLGQVLVRRLPNGTELRGRIVETEAYLGPEDEAAHSRGGRQTPRNRGMFMKPGTLYVYIIYGMYFCMNISSQGDGACVLLRALEPLEGLETMRQLRSTLRKGTASRVLKDRELCSGPSKLCQALAINKSFDQRDLAQDEAVWLERGPLEPSEPAVVAAARVGVGHAGEWARKPLRFYVRGSPWVSVVDRVAEQDTQA

SEQ ID NO: 57457 - protein, 281 aa, Homo sapiens
  Payload ID: 11276
  Gene Symbol: MPG
  Gene Name: N-methylpurine DNA glycosylase
  Uniprot ID: P29372
  ENSP ID: ENSP00000380918
MGQKKQRPARAGQPHSSSDAAQAPAEQPHSSSDAAQAPCPRERCLGPPTTPGPYRSIYFSSPKGHLTRLGLEFFDQPAVPLARAFLGQVLVRRLPNGTELRGRIVETEAYLGPEDEAAHSRGGRQTPRNRGMFMKPGTLYVYIIYGMYFCMNISSQGDGACVLLRALEPLEGLETMRQLRSTLRKGTASRVLKDRELCSGPSKLCQALAINKSFDQRDLAQDEAVWLERGPLEPSEPAVVAAARVGVGHAGEWARKPLRFYVRGSPWVSVVDRVAEQDTQA

SEQ ID NO: 57458 - protein, 251 aa, Homo sapiens
  Payload ID: 11276
  Gene Symbol: MPG
  Gene Name: N-methylpurine DNA glycosylase
  ENSP ID: ENSP00000388097
MGQKKQRPARAGQPHSSSDAAQAPAEQPHSSSDAAQAPCPRERCLGPPTTPGPYRSIYFSSPKGHLTRLGLEFFDQPAVPLARAFLGQVLVRRLPNGTELRGRIVETEAYLGPEDEAAHSRGGRQTPRNRGMFMKPGTLYVYIIYGMYFCMNISSQGDGACVLLRALEPLEGLETMRQLRSTLRKGTASRVLKDRELCSGPSKLCQALAINKSFDQRDLAQDEAVWLERGPLEPSEPAVVAAARVGVGHAG

SEQ ID NO: 57459 - protein, 299 aa, Homo sapiens
  Payload ID: 11277
  Gene Symbol: NMRAL1
  Gene Name: NmrA-like family domain containing 1
  Uniprot ID: Q9HBL8
  ENSP ID: ENSP00000283429
MVDKKLVVVFGGTGAQGGSVARTLLEDGTFKVRVVTRNPRKKAAKELRLQGAEVVQGDQDDQVIMELALNGAYATFIVTNYWESCSQEQEVKQGKLLADLARRLGLHYVVYSGLENIKKLTAGRLAAAHFDGKGEVEEYFRDIGVPMTSVRLPCYFENLLSHFLPQKAPDGKSYLLSLPTGDVPMDGMSVSDLGPVVLSLLKMPEKYVGQNIGLSTCRHTAEEYAALLTKHTRKVVHDAKMTPEDYEKLGFPGARDLANMFRFYALRPDRDIELTLRLNPKALTLDQWLEQHKGDFNLL

SEQ ID NO: 57460 - protein, 299 aa, Homo sapiens; identical to SEQ ID NO: 57459
  Payload ID: 11277
  Gene Symbol: NMRAL1
  Gene Name: NmrA-like family domain containing 1
  Uniprot ID: Q9HBL8
  ENSP ID: ENSP00000383962

SEQ ID NO: 57461 - protein, 188 aa, Homo sapiens
  Payload ID: 11277
  Gene Symbol: NMRAL1
  Gene Name: NmrA-like family domain containing 1
  ENSP ID: ENSP00000458425
MVDKKLVVVFGGTEIWFHHVAQAGLKLLSSRDLRASASQSVWITGAQGGSVARTLLEDGTFKVRVVTRNPRKKAAKELRLQGAEVVQGDQDDQVIMELALNGAYATFIVTNYWESCSQEQEVKQGKLLADLARRLGLHYVVYSGLENIKKLTAGRLAAAHFDGKGEVEEYFRDIGVPMTSVRLPCYFE

SEQ ID NO: 57462 - protein, 299 aa, Homo sapiens; identical to SEQ ID NO: 57459
  Payload ID: 11277
  Gene Symbol: NMRAL1
  Gene Name: NmrA-like family domain containing 1
  Uniprot ID: Q9HBL8
  ENSP ID: ENSP00000458762

SEQ ID NO: 57463 - protein, 57 aa, Homo sapiens
  Payload ID: 11277
  Gene Symbol: NMRAL1
  Gene Name: NmrA-like family domain containing 1
  ENSP ID: ENSP00000459022
MVDKKLVVVFGGTEIWFHHVAQAGLKLLSSRDLRASASQSVWITGMSPWAQLQRAKS

SEQ ID NO: 57464 - protein, 190 aa, Homo sapiens
  Payload ID: 11277
  Gene Symbol: NMRAL1
  Gene Name: NmrA-like family domain containing 1
  ENSP ID: ENSP00000459221
NIKKLTAGRLAAAHFDGKGEVEEYFRDIGVPMTSVRLPCYFENLLSHFLPQKAPDGKSYLLSLPTGDVPMDGMSVSDLGPVVLSLLKMPEKYVGQNIGLSTCRHTAEEYAALLTKHTRKVVHDAKVGLPPQMTPEDYEKLGFPGARDLANMFRFYALRPDRDIELTLRLNPKALTLDQWLEQHKGDFNLL

SEQ ID NO: 57465 - protein, 41 aa, Homo sapiens
  Payload ID: 11277
  Gene Symbol: NMRAL1
  Gene Name: NmrA-like family domain containing 1
  ENSP ID: ENSP00000459926
MVDKKLVVVFGGTEAGFHQAKIVPLHFSLGDRVRLHLKKIK

SEQ ID NO: 57466 - protein, 299 aa, Homo sapiens; identical to SEQ ID NO: 57459
  Payload ID: 11277
  Gene Symbol: NMRAL1
  Gene Name: NmrA-like family domain containing 1
  Uniprot ID: Q9HBL8
  ENSP ID: ENSP00000460263

SEQ ID NO: 57467 - protein, 224 aa, Homo sapiens
  Payload ID: 11277
  Gene Symbol: NMRAL1
  Gene Name: NmrA-like family domain containing 1
  ENSP ID: ENSP00000460476
  MOD_RES (1)..(1): Any amino acid
XRLQGAEVVQGDQDDQVIMELALNGAYATFIVTNYWESCSQEQEVKQGKLLADLARRLGLHYVVYSGLENIKKLTAGRLAAAHFDGKGEVEEYFRDIGVPMTSVRLPCYFENLLSHFLPQKAPDGKSYLLSLPTGDVPMDGMSVSDLGPVVLSLLKMPEKYVGQNIGLSTCRHTAEEYAALLTKHTRKVVHDAKVGLPPQVTQASLSGLSSSRREGVSRAAHTS

SEQ ID NO: 57468 - protein, 124 aa, Homo sapiens
  Payload ID: 11277
  Gene Symbol: NMRAL1
  Gene Name: NmrA-like family domain containing 1
  ENSP ID: ENSP00000460837
DGKSYLLSLPTGDVPMDGMSVSDLGPVVLSLLKMPEKYVGQNIGLSTCRHTAEEYAALLTKHTRKMTPEDYEKLGFPGARDLANMFRFYALRPDRDIELTLRLNPKALTLDQWLEQHKGDFNLL

SEQ ID NO: 57469 - protein, 159 aa, Homo sapiens
  Payload ID: 11277
  Gene Symbol: NMRAL1
  Gene Name: NmrA-like family domain containing 1
  ENSP ID: ENSP00000461763
QGKLLADLARRLGLHYVVYSGLENIKKLTAGRLAAAHFDGKGEVEEYFRDIGVPMTSVRLPCYFENLLSHFLPQKAPDGKSYLLSLPTGDVPMDGMSVSDLGPVVLSLLKMPEKYVGQNIGLSTCRHTAEEYAALLTKHTRKVVHDAKELTGHRVKFLA

SEQ ID NO: 57470 - protein, 299 aa, Homo sapiens; identical to SEQ ID NO: 57459
  Payload ID: 11277
  Gene Symbol: NMRAL1
  Gene Name: NmrA-like family domain containing 1
  Uniprot ID: Q9HBL8
  ENSP ID: ENSP00000478990

SEQ ID NO: 57471 - protein, 299 aa, Homo sapiens; identical to SEQ ID NO: 57459
  Payload ID: 11277
  Gene Symbol: NMRAL1
  Gene Name: NmrA-like family domain containing 1
  Uniprot ID: Q9HBL8
  ENSP ID: ENSP00000479569

SEQ ID NO: 57472 - protein, 124 aa, Homo sapiens; identical to SEQ ID NO: 57468
  Payload ID: 11277
  Gene Symbol: NMRAL1
  Gene Name: NmrA-like family domain containing 1
  ENSP ID: ENSP00000488058

SEQ ID NO: 57473 - protein, 57 aa, Homo sapiens; identical to SEQ ID NO: 57463
  Payload ID: 11277
  Gene Symbol: NMRAL1
  Gene Name: NmrA-like family domain containing 1
  ENSP ID: ENSP00000488151

SEQ ID NO: 57474 - protein, 224 aa, Homo sapiens; identical to SEQ ID NO: 57467
  Payload ID: 11277
  Gene Symbol: NMRAL1
  Gene Name: NmrA-like family domain containing 1
  ENSP ID: ENSP00000488163
  MOD_RES (1)..(1): Any amino acid

SEQ ID NO: 57475 - protein, 159 aa, Homo sapiens; identical to SEQ ID NO: 57469
  Payload ID: 11277
  Gene Symbol: NMRAL1
  Gene Name: NmrA-like family domain containing 1
  ENSP ID: ENSP00000488172

SEQ ID NO: 57476 - protein, 188 aa, Homo sapiens; identical to SEQ ID NO: 57461
  Payload ID: 11277
  Gene Symbol: NMRAL1
  Gene Name: NmrA-like family domain containing 1
  ENSP ID: ENSP00000488191

SEQ ID NO: 57477 - protein, 299 aa, Homo sapiens; identical to SEQ ID NO: 57459
  Payload ID: 11277
  Gene Symbol: NMRAL1
  Gene Name: NmrA-like family domain containing 1
  Uniprot ID: Q9HBL8
  ENSP ID: ENSP00000488644

SEQ ID NO: 57478 - protein, 41 aa, Homo sapiens; identical to SEQ ID NO: 57465
  Payload ID: 11277
  Gene Symbol: NMRAL1
  Gene Name: NmrA-like family domain containing 1
  ENSP ID: ENSP00000488691

SEQ ID NO: 57479 - protein, 299 aa, Homo sapiens; identical to SEQ ID NO: 57459
  Payload ID: 11277
  Gene Symbol: NMRAL1
  Gene Name: NmrA-like family domain containing 1
  Uniprot ID: Q9HBL8
  ENSP ID: ENSP00000488692

SEQ ID NO: 57480 - protein, 190 aa, Homo sapiens; identical to SEQ ID NO: 57464
  Payload ID: 11277
  Gene Symbol: NMRAL1
  Gene Name: NmrA-like family domain containing 1
  ENSP ID: ENSP00000488749

SEQ ID NO: 57481 - protein, 307 aa, Homo sapiens
  Payload ID: 11278
  Gene Symbol: NMI
  Gene Name: N-myc (and STAT) interactor
  Uniprot ID: Q13287
  ENSP ID: ENSP00000243346
MEADKDDTQQILKEHSPDEFIKDEQNKGLIDEITKKNIQLKKEIQKLETELQEATKEFQIKEDIPETKMKFLSVETPENDSQLSNISCSFQVSSKVPYEIQKGQALITFEKEEVAQNVVSMSKHHVQIKDVNLEVTAKPVPLNSGVRFQVYVEVSKMKINVTEIPDTLREDQMRDKLELSFSKSRNGGGEVDRVDYDRQSGSAVITFVEIGVADKILKKKEYPLYINQTCHRVTVSPYTEIHLKKYQIFSGTSKRTVLLTGMEGIQMDEEIVEDLINIHFQRAKNGGGEVDVVKCSLGQPHIAYFEE

SEQ ID NO: 57482 - protein, 28 aa, Homo sapiens
  Payload ID: 11278
  Gene Symbol: NMI
  Gene Name: N-myc (and STAT) interactor
  ENSP ID: ENSP00000387373
MEADKDDTQQILKEHSPDEFIKDEQNKG

SEQ ID NO: 57483 - protein, 394 aa, Homo sapiens
  Payload ID: 11279
  Gene Symbol: NDRG1
  Gene Name: N-myc downstream regulated 1
  Uniprot ID: Q92597
  ENSP ID: ENSP00000319977
MSREMQDVDLAEVKPLVEKGETITGLLQEFDVQEQDIETLHGSVHVTLCGTPKGNRPVILTYHDIGMNHKTCYNPLFNYEDMQEITQHFAVCHVDAPGQQDGAASFPAGYMYPSMDQLAEMLPGVLQQFGLKSIIGMGTGAGAYILTRFALNNPEMVEGLVLINVNPCAEGWMDWAASKISGWTQALPDMVVSHLFGKEEMQSNVEVVHTYRQHIVNDMNPGNLHLFINAYNSRRDLEIERPMPGTHTVTLQCPALLVVGDSSPAVDAVVECNSKLDPTKTTLLKMADCGGLPQISQPAKLAEAFKYFVQGMGYMPSASMTRLMRSRTASGSSVTSLDGTRSRSHTSEGTRSRSHTSEGTRSRSHTSEGAHLDITPNSGAAGNSAGPKSMEVSC

SEQ ID NO: 57484 - protein, 394 aa, Homo sapiens; identical to SEQ ID NO: 57483
  Payload ID: 11279
  Gene Symbol: NDRG1
  Gene Name: N-myc downstream regulated 1
  Uniprot ID: Q92597
  ENSP ID: ENSP00000404854

SEQ ID NO: 57485 - protein, 328 aa, Homo sapiens
  Payload ID: 11279
  Gene Symbol: NDRG1
  Gene Name: N-myc downstream regulated 1
  Uniprot ID: Q92597
  ENSP ID: ENSP00000427894
MNHKTCYNPLFNYEDMQEITQHFAVCHVDAPGQQDGAASFPAGYMYPSMDQLAEMLPGVLQQFGLKSIIGMGTGAGAYILTRFALNNPEMVEGLVLINVNPCAEGWMDWAASKISGWTQALPDMVVSHLFGKEEMQSNVEVVHTYRQHIVNDMNPGNLHLFINAYNSRRDLEIERPMPGTHTVTLQCPALLVVGDSSPAVDAVVECNSKLDPTKTTLLKMADCGGLPQISQPAKLAEAFKYFVQGMGYMPSASMTRLMRSRTASGSSVTSLDGTRSRSHTSEGTRSRSHTSEGTRSRSHTSEGAHLDITPNSGAAGNSAGPKSMEVSC

SEQ ID NO: 57486 - protein, 193 aa, Homo sapiens
  Payload ID: 11279
  Gene Symbol: NDRG1
  Gene Name: N-myc downstream regulated 1
  ENSP ID: ENSP00000428345
MAVPPPGIMKQAGDSRDMSREMQDVDLAEVKPLVEKGETITGLLQEFDVQEQDIETLHGSVHVTLCGTPKGNRPVILTYHDIGMNHKTCYNPLFNYEDMQEITQHFAVCHVDAPGQQDGAASFPAGYMYPSMDQLAEMLPGVLQQFGLKSIIGMGTGAGAYILTRFALNNPEMVEGLVLINVNPCAEGWMDWA

SEQ ID NO: 57487 - protein, 158 aa, Homo sapiens
  Payload ID: 11279
  Gene Symbol: NDRG1
  Gene Name: N-myc downstream regulated 1
  ENSP ID: ENSP00000428384
MSREMQDVDLAEVKPLVEKGETITGLLQEFDVQEQDIETLHGSVHVTLCGTPKGNRPVILTYHDIGMNHKTCYNPLFNYEDMQEITQHFAVCHVDAPGQQDGAASFPAGYMYPSMDQLAEMLPGVLQQFGLKSIIGMGTGAGAYILTRFALNNPEMVE

SEQ ID NO: 57488 - protein, 100 aa, Homo sapiens
  Payload ID: 11279
  Gene Symbol: NDRG1
  Gene Name: N-myc downstream regulated 1
  ENSP ID: ENSP00000428802
MNHKTCYNPLFNYEDMQEITQHFAVCHVDAPGQQDGAASFPAGYMYPSMDQLAEMLPGVLQQFGLKSIIGMGTGAGAYILTRFALNNPEMVEGLVLINVN

SEQ ID NO: 57489 - protein, 167 aa, Homo sapiens
  Payload ID: 11279
  Gene Symbol: NDRG1
  Gene Name: N-myc downstream regulated 1
  ENSP ID: ENSP00000428991
MSGSRESCTVGCVCVFTRMRVPVCLCVCITNLLLGLTVRLKLALCLYVAGDSRDMSREMQDVDLAEVKPLVEKGETITGLLQEFDVQEQDIETLHGSVHVTLCGTPKGNRPVILTYHDIGMNHKTCYNPLFNYEDMQEITQHFAVCHVDAPGQQDGAASFPAGYMYP

SEQ ID NO: 57490 - protein, 141 aa, Homo sapiens
  Payload ID: 11279
  Gene Symbol: NDRG1
  Gene Name: N-myc downstream regulated 1
  ENSP ID: ENSP00000429007
MSREMQDVDLAEVKPLVECNSKLDPTKTTLLKMADCGGLPQISQPAKLAEAFKYFVQGMGYMPSASMTRLMRSRTASGSSVTSLDGTRSRSHTSEGTRSRSHTSEGTRSRSHTSEGAHLDITPNSGAAGNSAGPKSMEVSC

SEQ ID NO: 57491 - protein, 95 aa, Homo sapiens
  Payload ID: 11279
  Gene Symbol: NDRG1
  Gene Name: N-myc downstream regulated 1
  ENSP ID: ENSP00000429172
MSREMQDVDLAEVKPLVEKGETITGLLQEFDVQTKPATTPSSTTRTCRRSPSTLPSATWTPLASRTAQPPSPQGTCTPPWISWLKCFLESFNSLG

SEQ ID NO: 57492 - protein, 158 aa, Homo sapiens; identical to SEQ ID NO: 57487
  Payload ID: 11279
  Gene Symbol: NDRG1
  Gene Name: N-myc downstream regulated 1
  ENSP ID: ENSP00000429272

SEQ ID NO: 57493 - protein, 216 aa, Homo sapiens
  Payload ID: 11279
  Gene Symbol: NDRG1
  Gene Name: N-myc downstream regulated 1
  ENSP ID: ENSP00000429380
MSREMQDVDLAEVKPLVEKGETITGLLQEFDVQEQDIETLHGSVHVTLCGTPKGNRPVILTYHDIGMNHKTCYNPLFNYEDMQEITQHFAVCHVDAPGQQDGAASFPAGYMYPSMDQLAEMLPGVLQQFGLKSIIGMGTGAGAYILTRFALNNPEMVEGLVLINVNPCAEGWMDWAASKPFDYQALVLDTVMCAVTSCSPSLDLVALKFLALPVPD

SEQ ID NO: 57494 - protein, 133 aa, Homo sapiens
  Payload ID: 11279
  Gene Symbol: NDRG1
  Gene Name: N-myc downstream regulated 1
  ENSP ID: ENSP00000429524
MSREMQDVDLAEVKPLVEKGETITGLLQEFDVQEQDIETLHGSVHVTLCGTPKGNRPVILTYHDIGMNHKTCYNPLFNYEDMQEITQHFAVCHVDAPGQQDGAASFPAGYMYPSMDQLAEMLPGVLQQFGLKS

SEQ ID NO: 57495 - protein, 156 aa, Homo sapiens
  Payload ID: 11279
  Gene Symbol: NDRG1
  Gene Name: N-myc downstream regulated 1
  ENSP ID: ENSP00000429840
MTVPAAGDSRDMSREMQDVDLAEVKPLVEKGETITGLLQEFDVQEQDIETLHGSVHVTLCGTPKGNRPVILTYHDIGMNHKTCYNPLFNYEDMQEITQHFAVCHVDAPGQQDGAASFPAGYMYPSMDQLAEMLPGVLQQFGLKSIIGMGTGAGAYI

SEQ ID NO: 57496 - protein, 165 aa, Homo sapiens
  Payload ID: 11279
  Gene Symbol: NDRG1
  Gene Name: N-myc downstream regulated 1
  ENSP ID: ENSP00000429994
MSREMQDVDLAEVKPLVEKGETITGLLQEFDVQEQDIETLHGSVHVTLCGTPKGNRPVILTYHDIGMNHKTCYNPLFNYEDMQEITQHFAVCHVDAPGQQDGAASFPAGYMYPSMDQLAEMLPGVLQQFGLKSIIGMGTGAGAYILTRFALNNPEMVEGLVLINV

SEQ ID NO: 57497 - protein, 42 aa, Homo sapiens
  Payload ID: 11279
  Gene Symbol: NDRG1
  Gene Name: N-myc downstream regulated 1
  ENSP ID: ENSP00000430171
MNHKTCYNPLFNYEDMQEITQHFAVCHVDAPGQQDGAASFPA

SEQ ID NO: 57498 - protein, 103 aa, Homo sapiens
  Payload ID: 11279
  Gene Symbol: NDRG1
  Gene Name: N-myc downstream regulated 1
  ENSP ID: ENSP00000431057
MSREMQDVDLAEAFKYFVQGMGYMPSASMTRLMRSRTASGSSVTSLDGTRSRSHTSEGTRSRSHTSEGTRSRSHTSEGAHLDITPNSGAAGNSAGPKSMEVSC

SEQ ID NO: 57499 - protein, 313 aa, Homo sapiens
  Payload ID: 11279
  Gene Symbol: NDRG1
  Gene Name: N-myc downstream regulated 1
  Uniprot ID: Q92597
  ENSP ID: ENSP00000437443
MQEITQHFAVCHVDAPGQQDGAASFPAGYMYPSMDQLAEMLPGVLQQFGLKSIIGMGTGAGAYILTRFALNNPEMVEGLVLINVNPCAEGWMDWAASKISGWTQALPDMVVSHLFGKEEMQSNVEVVHTYRQHIVNDMNPGNLHLFINAYNSRRDLEIERPMPGTHTVTLQCPALLVVGDSSPAVDAVVECNSKLDPTKTTLLKMADCGGLPQISQPAKLAEAFKYFVQGMGYMPSASMTRLMRSRTASGSSVTSLDGTRSRSHTSEGTRSRSHTSEGTRSRSHTSEGAHLDITPNSGAAGNSAGPKSMEVSC

SEQ ID NO: 57500 - protein, 496 aa, Homo sapiens
  Payload ID: 11280
  Gene Symbol: NMT1
  Gene Name: N-myristoyltransferase 1
  Uniprot ID: P30419
  ENSP ID: ENSP00000258960
MADESETAVKPPAPPLPQMMEGNGNGHEHCSDCENEEDNSYNRGGLSPANDTGAKKKKKKQKKKKEKGSETDSAQDQPVKMNSLPAERIQEIQKAIELFSVGQGPAKTMEEASKRSYQFWDTQPVPKLGEVVNTHGPVEPDKDNIRQEPYTLPQGFTWDALDLGDRGVLKELYTLLNENYVEDDDNMFRFDYSPEFLLWALRPPGWLPQWHCGVRVVSSRKLVGFISAIPANIHIYDTEKKMVEINFLCVHKKLRSKRVAPVLIREITRRVHLEGIFQAVYTAGVVLPKPVGTCRYWHRSLNPRKLIEVKFSHLSRNMTMQRTMKLYRLPETPKTAGLRPMETKDIPVVHQLLTRYLKQFHLTPVMSQEEVEHWFYPQENIIDTFVVENANGEVTDFLSFYTLPSTIMNHPTHKSLKAAYSFYNVHTQTPLLDLMSDALVLAKMKGFDVFNALDLMENKTFLEKLKFGIGDGNLQYYLYNWKCPSMGAEKVGLVLQ

SEQ ID NO: 57501 - protein, 137 aa, Homo sapiens
  Payload ID: 11280
  Gene Symbol: NMT1
  Gene Name: N-myristoyltransferase 1
  ENSP ID: ENSP00000439263
MADESETAVKPPAPPLPQMMEGNGNGHEHCSDCENEEDNSYNRGGLSPANDTGAKKKKKKQKKKKEKGSETDSAQDQPVKMNSLPAERIQEIQKAIELFSVGQGPAKTMEEASKRSYQFWDTQPVPKLAKRTVHPPE

SEQ ID NO: 57502 - protein, 88 aa, Homo sapiens
  Payload ID: 11280
  Gene Symbol: NMT1
  Gene Name: N-myristoyltransferase 1
  ENSP ID: ENSP00000466777
  MOD_RES (1)..(1): Any amino acid
XDESETAVKPPAPPLPQMMEGNGNGHEHCSDCENEEDNSYNRGGLSPANDTGAKKKKKKQKKKKEKGSETDSAQDQPVKVGVQKYEHG

SEQ ID NO: 57503 - protein, 72 aa, Homo sapiens
  Payload ID: 11280
  Gene Symbol: NMT1
  Gene Name: N-myristoyltransferase 1
  ENSP ID: ENSP00000466827
MNSLPAERIQEIQKAIELFSVGQGPAKTMEEASKRSYQFWDTQPVPKLGEVVNTHGPVEPDKDNIRQEPYTL

SEQ ID NO: 57504 - protein, 496 aa, Homo sapiens; identical to SEQ ID NO: 57500
  Payload ID: 11280
  Gene Symbol: NMT1
  Gene Name: N-myristoyltransferase 1
  Uniprot ID: P30419
  ENSP ID: ENSP00000468424

SEQ ID NO: 57505 - protein, 485 aa, Homo sapiens
  Payload ID: 11281
  Gene Symbol: NMT2
  Gene Name: N-myristoyltransferase 2
  ENSP ID: ENSP00000367392
MRRRRSTPKEVLEGIWEPKRKRRNRREKRRNQIPEAPSQTRHLIPRRLKFSSLRNTTPSGSRFQREQPWNPSVPMQKLQDIQRAMELLSACQGPARNIDEAAKHRYQFWDTQPVPKLDEVITSHGAIEPDKDNVRQEPYSLPQGFMWDTLDLSDAEVLKELYTLLNENYVEDDDNMFRFDYSPEFLLWALRPPGWLLQWHCGVRVSSNKKLVGFISAIPANIRIYDSVKKMVEINFLCVHKKLRSKRVAPVLIREITRRVNLEGIFQAVYTAGVVLPKPIATCRYWHRSLNPRKLVEVKFSHLSRNMTLQRTMKLYRLPDVTKTSGLRPMEPKDIKSVRELINTYLKQFHLAPVMDEEEVAHWFLPREHIIDTFVVESPNGKLTDFLSFYTLPSTVMHHPAHKSLKAAYSFYNIHTETPLLDLMSDALILAKSKGFDVFNALDLMENKTFLEKLKFGIGDGNLQYYLYNWRCPGTDSEKVGLVLQ

SEQ ID NO: 57506 - protein, 498 aa, Homo sapiens
  Payload ID: 11281
  Gene Symbol: NMT2
  Gene Name: N-myristoyltransferase 2
  Uniprot ID: O60551
  ENSP ID: ENSP00000367407
MAEDSESAASQQSLELDDQDTCGIDGDNEEETEHAKGSPGGYLGAKKKKKKQKRKKEKPNSGGTKSDSASDSQEIKIQQPSKNPSVPMQKLQDIQRAMELLSACQGPARNIDEAAKHRYQFWDTQPVPKLDEVITSHGAIEPDKDNVRQEPYSLPQGFMWDTLDLSDAEVLKELYTLLNENYVEDDDNMFRFDYSPEFLLWALRPPGWLLQWHCGVRVSSNKKLVGFISAIPANIRIYDSVKKMVEINFLCVHKKLRSKRVAPVLIREITRRVNLEGIFQAVYTAGVVLPKPIATCRYWHRSLNPRKLVEVKFSHLSRNMTLQRTMKLYRLPDVTKTSGLRPMEPKDIKSVRELINTYLKQFHLAPVMDEEEVAHWFLPREHIIDTFVVESPNGKLTDFLSFYTLPSTVMHHPAHKSLKAAYSFYNIHTETPLLDLMSDALILAKSKGFDVFNALDLMENKTFLEKLKFGIGDGNLQYYLYNWRCPGTDSEKVGLVLQ

SEQ ID NO: 57507 - protein, 691 aa, Homo sapiens
  Payload ID: 11282
  Gene Symbol: NOBOX
  Gene Name: NOBOX oogenesis homeobox
  Uniprot ID: O60393
  ENSP ID: ENSP00000419457
MALLLTLTSPDLEGTWDTRDKDGFKAQEGPPLAVPEFPVCGLYRIYGVCGSFSSFFIIRCSLCALETLKSPQHDPLEIPEQSLKLIPLVSGKRELTRGQKAGEKPLAAGPGEEELLRGSAPHAQDTQSEELPPSCTISGEKKPPAVSGEATGADAGRLCPPPRSRAPHKDRTLARSRPQTQGEDCSLPVGEVKIGKRSYSPAPGKQKKPNAMGLAPTSSPGAPNSARATHNPVPCGSGRGPCHLANLLSTLAQSNQNRDHKQGPPEVTCQIRKKTRTLYRSDQLEELEKIFQEDHYPDSDKRREIAQTVGVTPQRIMVKGAGSLVAGWSGGGPTIETLELQSERSAVAWVWFQNRRAKWRKMEKLNGKESKDNPAAPGPASSQCSSAAEILPAVPMEPKPDPFPQESPLDTFPEPPMLLTSDQTLAPTQPSEGAQRVVTPPLFSPPPVRRADLPFPLGPVHTPQLMPLLMDVAGSDSSHKDGPCGSWGTSITLPPPCSYLEELEPQDYQQSNQPGPFQFSQAPQPPLFQSPQPKLPYLPTFPFSMPSSLTLPPPEDSLFMFPCGPSGGTSQGYCPGASSGQILMQPPAGNIGTASWSDPCLPELPFPGPFCPQALGHPPGGDGYFPDLFPTPCPQALGRQPSSALSWMPEGARPGTGPLLSKAKEEPPAASLDQPSALEEARGDDKNSHVP

SEQ ID NO: 57508 - protein, 659 aa, Homo sapiens
  Payload ID: 11282
  Gene Symbol: NOBOX
  Gene Name: NOBOX oogenesis homeobox
  Uniprot ID: O60393
  ENSP ID: ENSP00000419565
MALLLTLTSPDLEGTWDTRDKDGFKAQEGPPLAVPEFPVCGLYRIYGVCGSFSSFFIIRCSLCALETLKSPQHDPLEIPEQSLKLIPLVSGKRELTRGQKAGEKPLAAGPGEEELLRGSAPHAQDTQSEELPPSCTISGEKKPPAVSGEATGADAGRLCPPPRSRAPHKDRTLARSRPQTQGEDCSLPVGEVKIGKRSYSPAPGKQKKPNAMGLAPTSSPGAPNSARATHNPVPCGSGRGPCHLANLLSTLAQSNQNRDHKQGPPEVTCQIRKKTRTLYRSDQLEELEKIFQEDHYPDSDKRREIAQTVGVTPQRIMVWFQNRRAKWRKMEKLNGKESKDNPAAPGPASSQCSSAAEILPAVPMEPKPDPFPQESPLDTFPEPPMLLTSDQTLAPTQPSEGAQRVVTPPLFSPPPVRRADLPFPLGPVHTPQLMPLLMDVAGSDSSHKDGPCGSWGTSITLPPPCSYLEELEPQDYQQSNQPGPFQFSQAPQPPLFQSPQPKLPYLPTFPFSMPSSLTLPPPEDSLFMFPCGPSGGTSQGYCPGASSGQILMQPPAGNIGTASWSDPCLPELPFPGPFCPQALGHPPGGDGYFPDLFPTPCPQALGRQPSSALSWMPEGARPGTGPLLSKAKEEPPAASLDQPSALEEARGDDKNSHVP

SEQ ID NO: 57509 - protein, 749 aa, Homo sapiens [sequence omitted]

SEQ ID NO: 57510 - protein, 800 aa, Homo sapiens
  Payload ID: 11284
  Gene Symbol: NOC3L
  Gene Name: NOC3-like DNA replication regulator
  Uniprot ID: Q8WTT2
  ENSP ID: ENSP00000360412
MKARRNKKQIPSFRKLIKTSKVKLENKLKNKQFKQQSTLKKYRKEQRKLRQAVKDAVSKKPIPLENPKEKRPGKRIEREEEEEEEALPLDMMDEDDLQLMKDLGQRVSFLTRDLSSSEPVHAKKRKHERIIDKYEKIPRTLQTAPEKELIHLLPIKDKSGIIPQTREKPVTDSNKDEEDQEEERELEEEIIEDPIQELTIEEHLIERKKKLQEKKMHIAALASAILSDPENNIKKLKELRSMLMEQDPDVAVTVRKLVIVSLMELFKDITPSYKIRPLTEAEKSTKTRKETQKLREFEEGLVSQYKFYLENLEQMVKDWKQRKLKKSNVVSLKAYKGLAEVAVKSLCELLVALPHFNFHNNIIVLIVPLMNDMSKLISEMCCEAVKKLFKQDKLGQASLGVIKVISGFVKGRNYEVRPEMLKTFLCLRIKEVEVKKDTEDINKPKKFMTFKEKRKSLSRMQRKWKKAEEKLERELREAEASESTEKKLKLHTETLNIVFVTYFRILKKAQRSPLLPAVLEGLAKFAHLINVEFFDDLLVVLHTLIESGDLSYQESLHCVQTAFHILSGQGDVLNIDPLKFYTHLYKTLFKLHAGATNEGVEIVLQCLDVMLTKRRKQVSQQRALAFIKRLCTLALHVLPNSSIGILATTRILMHTFPKTDLLLDSESQGSGVFLPELDEPEYCNAQNTALWELHALRRHYHPIVQRFAAHLIAGAPSEGSGALKPELSRRSATELFEAYSMAEMTFNPPVESSNPKIKGKFLQGDSFLNEDLNQLIKRYSSEVATESPLDFTKYLKTSLH

SEQ ID NO: 57511 - protein, 431 aa, Homo sapiens
  Payload ID: 11285
  Gene Symbol: NOCT
  Gene Name: nocturnin
  Uniprot ID: Q9UK39
  ENSP ID: ENSP00000280614
MFHSPRRLCSALLQRDAPGLRRLPAPGLRRPLSPPAAVPRPASPRLLAAASAASGAARSCSRTVCSMGTGTSRLYSALAKTLNSSAASQHPEYLVSPDPEHLEPIDPKELLEECRAVLHTRPPRFQRDFVDLRTDCPSTHPPIRVMQWNILAQALGEGKDNFVQCPVEALKWEERKCLILEEILAYQPDILCLQEVDHYFDTFQPLLSRLGYQGTFFPKPWSPCLDVEHNNGPDGCALFFLQNRFKLVNSANIRLTAMTLKTNQVAIAQTLECKESGRQFCIAVTHLKARTGWERFRSAQGCDLLQNLQNITQGAKIPLIVCGDFNAEPTEEVYKHFASSSLNLNSAYKLLSADGQSEPPYTTWKIRTSGECRHTLDYIWYSKHALNVRSALDLLTEEQIGPNRLPSFNYPSDHLSLVCDFSFTEESDGLS

SEQ ID NO: 57512 - protein, 167 aa, Homo sapiens
  Payload ID: 11285
  Gene Symbol: NOCT
  Gene Name: nocturnin
  ENSP ID: ENSP00000486546
MFHSPRRLCSALLQRDAPGLRRLPAPGLRRPLSPPAAVPRPASPRLLAAASAASGAARSCSRTVCSMGTGTSRLYSALAKTLNSSAASQHPEYLVSPDPEHLEPIDPKELLEECRAVLHTRPPRFQRDFVDLRTDCPSTHPPIRVMQWNILAQGMLDAFVPLQSSLL

SEQ ID NO: 57513 - protein, 347 aa, Homo sapiens
  Payload ID: 11286
  Gene Symbol: NODAL
  Gene Name: nodal growth differentiation factor
  Uniprot ID: Q96S42
  ENSP ID: ENSP00000287139
MHAHCLPFLLHAWWALLQAGAATVATALLRTRGQPSSPSPLAYMLSLYRDPLPRADIIRSLQAEDVAVDGQNWTFAFDFSFLSQQEDLAWAELRLQLSSPVDLPTEGSLAIEIFHQPKPDTEQASDSCLERFQMDLFTVTLSQVTFSLGSMVLEVTRPLSKWLKHPGALEKQMSRVAGECWPRPPTPPATNVLLMLYSNLSQEQRQLGGSTLLWEAESSWRAQEGQLSWEWGKRHRRHHLPDRSQLCRKVKFQVDFNLIGWGSWIIYPKQYNAYRCEGECPNPVGEEFHPTNHAYIQSLLKRYQPHRVPSTCCAPVKTKPLSMLYVDNGRVLLDHHKDMIVEECGCL

SEQ ID NO: 57514 - protein, 292 aa, Homo sapiens
  Payload ID: 11286
  Gene Symbol: NODAL
  Gene Name: nodal growth differentiation factor
  ENSP ID: ENSP00000394468
DQQLGIQTKDVAVDGQNWTFAFDFSFLSQQEDLAWAELRLQLSSPVDLPTEGSLAIEIFHQPKPDTEQASDSCLERFQMDLFTVTLSQVTFSLGSMVLEVTRPLSKWLKHPGALEKQMSRVAGECWPRPPTPPATNVLLMLYSNLSQEQRQLGGSTLLWEAESSWRAQEGQLSWEWGKRHRRHHLPDRSQLCRKVKFQVDFNLIGWGSWIIYPKQYNAYRCEGECPNPVGEEFHPTNHAYIQSLLKRYQPHRVPSTCCAPVKTKPLSMLYVDNGRVLLDHHKDMIVEECGCL

SEQ ID NO: 57515 - protein, 1222 aa, Homo sapiens
  Payload ID: 11287
  Gene Symbol: NOMO1
  Gene Name: NODAL modulator 1
  Uniprot ID: Q15155
  ENSP ID: ENSP00000287667
MLVGQGAGPLGPAVVTAAVVLLLSGVGPAHGSEDIVVGCGGFVKSDVEINYSLIEIKLYTKHGTLKYQTDCAPNNGYFMIPLYDKGDFILKIEPPLGWSFEPTTVELHVDGVSDICTKGGDINFVFTGFSVNGKVLSKGQPLGPAGVQVSLRNTGTEAKIQSTVTQPGGKFAFFKVLPGDYEILATHPTWALKEASTTVRVTNSNANAASPLIVAGYNVSGSVRSDGEPMKGVKFLLFSSLVTKEDVLGCNVSPVPGFQPQDESLVYLCYTVSREDGSFSFYSLPSGGYTVIPFYRGERITFDVAPSRLDFTVEHDSLKIEPVFHVMGFSVTGRVLNGPEGDGVPEAVVTLNNQIKVKTKADGSFRLENITTGTYTIHAQKEHLYFETVTIKIAPNTPQLADIIATGFSVCGQISIIRFPDTVKQMNKYKVVLSSQDKDKSLVTVETDAHGSFCFKAKPGTYKVQVMVPEAETRAGLTLKPQTFPLTVTNRPMMDVAFVQFLASVSGKVSCLDTCGDLLVTLQSLSRQGEKRSLQLSGKVNAMTFTFDNVLPGKYKISIMHEDWCWKNKSLEVEVLEDDMSAVEFRQTGYMLRCSLSHAITLEFYQDGNGRENVGIYNLSKGVNRFCLSKPGVYKVTPRSCHRFEQAFYTYDTSSPSILTLTAIRHHVLGTITTDKMMDVTVTIKSSIDSEPALVLGPLKSVQELRREQQLAEIEARRQEREKNGNEEGEERMTKPPVQEMVDELQGPFSYDFSYWARSGEKITVTPSSKELLFYPPSMEAVVSGESCPGKLIEIHGKAGLFLEGQIHPELEGVEIVISEKGASSPLITVFTDDKGAYSVGPLHSDLEYTVTSQKEGYVLTAVEGTIGDFKAYALAGVSFEIKAEDDQPLPGVLLSLSGGLFRSNLLTQDNGILTFSNLSPGQYYFKPMMKEFRFEPSSQMIEVQEGQNLKITITGYRTAYSCYGTVSSLNGEPEQGVAMEAVGQNDCSIYGEDTVTDEEGKFRLRGLLPGCVYHVQLKAEGNDHIERALPHHRVIEVGNNDIDDVNIIVFRQINQFDLSGNVITSSEYLPTLWVKLYKSENLDNPIQTVSLGQSLFFHFPPLLRDGENYVVLLDSTLPRSQYDYILPQVSFTAVGYHKHITLIFNPTRKLPEQDIAQGSYIALPLTLLVLLAGYNHDKLIPLLLQLTSRLQGVRALGQAASDNSGPEDAKRQAKKQKTRRT

SEQ ID NO: 57516 - protein, 144 aa, Homo sapiens
  Payload ID: 11287
  Gene Symbol: NOMO1
  Gene Name: NODAL modulator 1
  ENSP ID: ENSP00000457581
  MOD_RES (1)..(1): Any amino acid
XSENLDNPIQTVSLGQSLFFHFPPLLRDGENYVVLLDSTLPRSQYDYILPQVSFTAVGYHKHITLIFNPTRKLPEQDIAQGSYIALPLTLLVLLAGYNHDKLIPLLLQLTSRLQGVRALGQAASDNSGPEDAKRQAKKQKTRRT

SEQ ID NO: 57517 - protein, 1100 aa, Homo sapiens
  Payload ID: 11287
  Gene Symbol: NOMO1
  Gene Name: NODAL modulator 1
  ENSP ID: ENSP00000479933
MARFAFFKVLPGDYEILATHPTWALKEASTTVRVTNSNANAASPLIVAGYNVSGSVRSDGEPMKGVKFLLFSSLVTKEDVLGCNVSPVPGFQPQDESLVYLCYTVSREDGSFSFYSLPSGGYTVIPFYRGERITFDVAPSRLDFTVEHDSLKIEPVFHVMGFSVTGRVLNGPEGDGVPEAVVTLNNQIKVKTKADGSFRLENITTGTYTIHAQKEHLYFETVTIKIAPNTPQLADIIATGFSVCGQISIIRFPDTVKQMNKYKVVLSSQDKDKSLVTVETDAHGSFCFKAKPGTYKVQVMVPEAETRAGLTLKPQTFPLTVTNRPMMDVAFVQFLASVSGKVSCLDTCGDLLVTLQSLSRQGEKRSLQLSGKVNAMTFTFDNVLPGKYKISIMHEDWCWKNKSLEVEVLEDDMSAVEFRQTGYMLRCSLSHAITLEFYQDGNGRENVGIYNLSKGVNRFCLSKPGVYKVTPRSCHRFEQAFYTYDTSSPSILTLTAIRHHVLGTITTDKMMDVTVTIKSSIDSEPALVLGPLKSVQELRREQQLAEIEARRQEREKNGNEEGEERMTKPPVQEMVDELQGPFSYDFSYWARSGEKITVTPSSKELLFYPPSMEAVVSGESCPGKLIEIHGKAGLFLEGQIHPELEGVEIVISEKGASSPLITVFTDDKGAYSVGPLHSDLEYTVTSQKEGYVLTAVEGTIGDFKAYALAGVSFEIKAEDDQPLPGVLLSLSGGLFRSNLLTQDNGILTFSNLSPGQYYFKPMMKEFRFEPSSQMIEVQEGQNLKITITGYRTAYSCYGTVSSLNGEPEQGVAMEAVGQNDCSIYGEDTVTDEEGKFRLRGLLPGCVYHVQLKAEGNDHIERALPHHRVIEVGNNDIDDVNIIVFRQINQFDLSGNVITSSEYLPTLWVKLYKSENLDNPIQTVSLGQSLFFHFPPLLRDGENYVVLLDSTLPRSQYDYILPQVSFTAVGYHKHITLIFNPTRKLPEQDIAQGSYIALPLTLLVLLAGYNHDKLIPLLLQLTSRLQGVRALGQAASDNSGPEDAKRQAKKQKTRRTLRLQGEFQLTWCLVPWRGTLGIHLFSSLPFASEILLETTATCIHY

SEQ ID NO: 57518 - protein, 1267 aa, Homo sapiens
  Payload ID: 11287
  Gene Symbol: NOMO1
  Gene Name: NODAL modulator 1
  ENSP ID: ENSP00000480539
MLVGQGAGPLGPAVVTAAVVLLLSGVGPAHGSEDIVVGCGGFVKSDVEINYSLIEIKLYTKHGTLKYQTDCAPNNGYFMIPLYDKGDFILKIEPPLGWSFEPTTVELHVDGVSDICTKGGDINFVFTGFSVNGKVLSKGQPLGPAGVQVSLRNTGTEAKIQSTVTQPGGKFAFFKVLPGDYEILATHPTWALKEASTTVRVTNSNANAASPLIVAGYNVSGSVRSDGEPMKGVKFLLFSSLVTKEDVLGCNVSPVPGFQPQDESLVYLCYTVSREDGSFSFYSLPSGGYTVIPFYRGERITFDVAPSRLDFTVEHDSLKIEPVFHVMGFSVTGRVLNGPEGDGVPEAVVTLNNQIKVKTKADGSFRLENITTGTYTIHAQKEHLYFETVTIKIAPNTPQLADIIATGFSVCGQISIIRFPDTVKQMNKYKVVLSSQDKDKSLVTVETDAHGSFCFKAKPGTYKVQVMVPEAETRAGLTLKPQTFPLTVTNRPMMDVAFVQFLASVSGKVSCLDTCGDLLVTLQSLSRQGEKRSLQLSGKVNAMTFTFDNVLPGKYKISIMHEDWCWKNKSLEVEVLEDDMSAVEFRQTGYMLRCSLSHAITLEFYQDGNGRENVGIYNLSKGVNRFCLSKPGVYKVTPRSCHRFEQAFYTYDTSSPSILTLTAIRHHVLGTITTDKMMDVTVTIKSSIDSEPALVLGPLKSVQELRREQQLAEIEARRQEREKNGNEEGEERMTKPPVQEMVDELQGPFSYDFSYWARSGEKITVTPSSKELLFYPPSMEAVVSGESCPGKLIEIHGKAGLFLEGQIHPELEGVEIVISEKGASSPLITVFTDDKGAYSVGPLHSDLEYTVTSQKEGYVLTAVEGTIGDFKAYALAGVSFEIKAEDDQPLPGVLLSLSGGLFRSNLLTQDNGILTFSNLSPGQYYFKPMMKEFRFEPSSQMIEVQEGQNLKITITGYRTAYSCYGTVSSLNGEPEQGVAMEAVGQNDCSIYGEDTVTDEEGKFRLRGLLPGCVYHVQLKAEGNDHIERALPHHRVIEVGNNDIDDVNIIVFRQINQFDLSGNVITSSEYLPTLWVKLYKSENLDNPIQTVSLGQSLFFHFPPLLRDGENYVVLLDSTLPRSQYDYILPQVSFTAVGYHKHITLIFNPTRKLPEQDIAQGSYIALPLTLLVLLAGYNHDKLIPLLLQLTSRLQGVRALGQAASDNSGPEDAKRQAKKQKTRRTLRLQEEFQLTWCLVPWRGTLGIHLFSSLPFASEILLETTATCIHY

SEQ ID NO: 57519 - protein, 1222 aa, Homo sapiens; identical to SEQ ID NO: 57515
  Payload ID: 11287
  Gene Symbol: NOMO1
  Gene Name: NODAL modulator 1
  Uniprot ID: Q15155
  ENSP ID: ENSP00000482008

SEQ ID NO: 57520 - protein, 1100 aa, Homo sapiens
  Payload ID: 11287
  Gene Symbol: NOMO1
  Gene Name: NODAL modulator 1
  ENSP ID: ENSP00000483204
MARFAFFKVLPGDYEILATHPTWALKEASTTVRVTNSNANAASPLIVAGYNVSGSVRSDGEPMKGVKFLLFSSLVTKEDVLGCNVSPVPGFQPQDESLVYLCYTVSREDGSFSFYSLPSGGYTVIPFYRGERITFDVAPSRLDFTVEHDSLKIEPVFHVMGFSVTGRVLNGPEGDGVPEAVVTLNNQIKVKTKADGSFRLENITTGTYTIHAQKEHLYFETVTIKIAPNTPQLADIIATGFSVCGQISIIRFPDTVKQMNKYKVVLSSQDKDKSLVTVETDAHGSFCFKAKPGTYKVQVMVPEAETRAGLTLKPQTFPLTVTNRPMMDVAFVQFLASVSGKVSCLDTCGDLLVTLQSLSRQGEKRSLQLSGKVNAMTFTFDNVLPGKYKISIMHEDWCWKNKSLEVEVLEDDMSAVEFRQTGYMLRCSLSHAITLEFYQDGNGRENVGIYNLSKGVNRFCLSKPGVYKVTPRSCHRFEQAFYTYDTSSPSILTLTAIRHHVLGTITTDKMMDVTVTIKSSIDSEPALVLGPLKSVQELRREQQLAEIEARRQEREKNGNEEGEERMTKPPVQEMVDELQGPFSYDFSYWARSGEKITVTPSSKELLFYPPSMEAVVSGESCPGKLIEIHGKAGLFLEGQIHPELEGVEIVISEKGASSPLITVFTDDKGAYSVGPLHSDLEYTVTSQKEGYVLTAVEGTIGDFKAYALAGVSFEIKAEDDQPLPGVLLSLSGGLFRSNLLTQDNGILTFSNLSPGQYYFKPMMKEFRFEPSSQMIEVQEGQNLKITITGYRTAYSCYGTVSSLNGEPEQGVAMEAVGQNDCSIYGEDTVTDEEGKFRLRGLLPGCVYHVQLKAEGNDHIERALPHHRVIEVGNNDIDDVNIIVFRQINQFDLSGNVITSSEYLPTLWVKLYKSENLDNPIQTVSLGQSLFFHFPPLLRDGENYVVLLDSTLPRSQYDYILPQVSFTAVGYHKHITLIFNPTRKLPEQDIAQGSYIALPLTLLVLLAGYNHDKLIPLLLQLTSRLQGVRALGQAASDNSGPEDAKRQAKKQKTRRTLRLQEEFQLTWCLVPWRGTLGIHLFSSLPFASEILLETTATCIHY

SEQ ID NO: 57521 - protein, 1267 aa, Homo sapiens
  Payload ID: 11287
  Gene Symbol: NOMO1
  Gene Name: NODAL modulator 1
  ENSP ID: ENSP00000483827
MLVGQGAGPLGPAVVTAAVVLLLSGVGPAHGSEDIVVGCGGFVKSDVEINYSLIEIKLYTKHGTLKYQTDCAPNNGYFMIPLYDKGDFILKIEPPLGWSFEPTTVELHVDGVSDICTKGGDINFVFTGFSVNGKVLSKGQPLGPAGVQVSLRNTGTEAKIQSTVTQPGGKFAFFKVLPGDYEILATHPTWALKEASTTVRVTNSNANAASPLIVAGYNVSGSVRSDGEPMKGVKFLLFSSLVTKEDVLGCNVSPVPGFQPQDESLVYLCYTVSREDGSFSFYSLPSGGYTVIPFYRGERITFDVAPSRLDFTVEHDSLKIEPVFHVMGFSVTGRVLNGPEGDGVPEAVVTLNNQIKVKTKADGSFRLENITTGTYTIHAQKEHLYFETVTIKIAPNTPQLADIIATGFSVCGQISIIRFPDTVKQMNKYKVVLSSQDKDKSLVTVETDAHGSFCFKAKPGTYKVQVMVPEAETRAGLTLKPQTFPLTVTNRPMMDVAFVQFLASVSGKVSCLDTCGDLLVTLQSLSRQGEKRSLQLSGKVNAMTFTFDNVLPGKYKISIMHEDWCWKNKSLEVEVLEDDMSAVEFRQTGYMLRCSLSHAITLEFYQDGNGRENVGIYNLSKGVNRFCLSKPGVYKVTPRSCHRFEQAFYTYDTSSPSILTLTAIRHHVLGTITTDKMMDVTVTIKSSIDSEPALVLGPLKSVQELRREQQLAEIEARRQEREKNGNEEGEERMTKPPVQEMVDELQGPFSYDFSYWARSGEKITVTPSSKELLFYPPSMEAVVSGESCPGKLIEIHGKAGLFLEGQIHPELEGVEIVISEKGASSPLITVFTDDKGAYSVGPLHSDLEYTVTSQKEGYVLTAVEGTIGDFKAYALAGVSFEIKAEDDQPLPGVLLSLSGGLFRSNLLTQDNGILTFSNLSPGQYYFKPMMKEFRFEPSSQMIEVQEGQNLKITITGYRTAYSCYGTVSSLNGEPEQGVAMEAVGQNDCSIYGEDTVTDEEGKFRLRGLLPGCVYHVQLKAEGNDHIERALPHHRVIEVGNNDIDDVNIIVFRQINQFDLSGNVITSSEYLPTLWVKLYKSENLDNPIQTVSLGQSLFFHFPPLLRDGENYVVLLDSTLPRSQYDYILPQVSFTAVGYHKHITLIFNPTRKLPEQDIAQGSYIALPLTLLVLLAGYNHDKLIPLLLQLTSRLQGVRALGQAASDNSGPEDAKRQAKKQKTRRTLRLQGEFQLTWCLVPWRGTLGIHLFSSLPFASEILLETTATCIHY

SEQ ID NO: 57522 - protein, 144 aa, Homo sapiens; identical to SEQ ID NO: 57516
  Payload ID: 11287
  Gene Symbol: NOMO1
  Gene Name: NODAL modulator 1
  ENSP ID: ENSP00000487843
  MOD_RES (1)..(1): Any amino acid

SEQ ID NO: 57523 - protein, 1222 aa, Homo sapiens
  Payload ID: 11288
  Gene Symbol: NOMO2
  Gene Name: NODAL modulator 2
  Uniprot ID: Q5JPE7
  ENSP ID: ENSP00000331851
MLVGQGAGLLGPAVVTAAVVLLLSGVGPAHGSEDIVVGCGGFVKSDVEINYSLIEIKLYTKHGTLKYQTDCAPNNGYFMIPLYDKGDFILKIEPPLGWSFEPTTVELHVDGVSDICTKGGDINFVFTGFSVNGKVLSKGQPLGPAGVQVSLRNTGTEAKIQSTVTQPGGKFAFFKVLPGDYEILATHPTWALKEASTTVRVTNSNANAASPLIVAGYNVSGSVRSDGEPMKGVKFLLFSSLVTKEDVLGCNVSPVPGFQPQDESLVYLCYTVSREDGSFSFYSLPSGGYTVIPFYRGERITFDVAPSRLDFTVEHDSLKIEPVFHVMGFSVTGRVLNGPEGDGVPEAVVTLNNQIKVKTKADGSFRLENITTGTYTIHAQKEHLYFETVTIKIAPNTPQLADIVATGFSVCGRISIIRFPDTVKQMNKYKVVLSSQDKDKSLVTVETDAHGSFCFKAKPGTYKVQVMVPEAETRAGLTLKPQTFPLTVTDRPVMDVAFVQFLASVSGKVSCLDTCGDLLVTLQSLSRQGEKRSLQLSGKVNAMTFTFDNVLPGKYKISIMHEDWCWKNKSLEVEVLEDDVSAVEFRQTGYMLRCSLSHAITLEFYQDGNGRENVGIYNLSKGVNRFCLSKPGVYKVTPRSCHRFEQAFYTYDTSSPSILTLTAIRHHVLGTITTDKMMDVTVTIKSSIDSEPALVLGPLKSVQELRREQQLAEIEARRQEREKNGNEEGEERMTKPPVQEMVDELQGPFSYDFSYWARSGEKITVTPSSKELLFYPPSMEAVVSGESCPGKLIEIHGKAGLFLEGQIHPELEGVEIVISEKGASSPLITVFTDDKGAYSVGPLHSDLEYTVTSQKEGYVLTAVEGTIGDFKAYALAGVSFEIKAEDDQPLPGVLLSLSGGLFRSNLLTQDNGILTFSNLSPGQYYFKPMMKEFRFEPSSQMIEVQEGQNLKITITGYRTAYSCYGTVSSLNGEPEQGVAMEAVGQNDCSIYGEDTVTDEEGKFRLRGLLPGCVYHVQLKAEGNDHIERALPHHRVIEVGNNDIDDVNIIVFRQINQFDLSGNVITSSEYLPTLWVKLYKSENLDNPIQTVSLGQSLFFHFPPLLRDGENYVVLLDSTLPRSQYDYILPQVSFTAVGYHKHITLIFNPTRKLPEQDIAQGSYIALPLTLLVLLAGYNHDKLIPLLLQLTSRLQGVGALGQAASDNSGPEDAKRQAKKQKTRRT

SEQ ID NO: 57524 - protein, 1267 aa, Homo sapiens
  Payload ID: 11288
  Gene Symbol: NOMO2
  Gene Name: NODAL modulator 2
  Uniprot ID: Q5JPE7
  ENSP ID: ENSP00000370883
MLVGQGAGLLGPAVVTAAVVLLLSGVGPAHGSEDIVVGCGGFVKSDVEINYSLIEIKLYTKHGTLKYQTDCAPNNGYFMIPLYDKGDFILKIEPPLGWSFEPTTVELHVDGVSDICTKGGDINFVFTGFSVNGKVLSKGQPLGPAGVQVSLRNTGTEAKIQSTVTQPGGKFAFFKVLPGDYEILATHPTWALKEASTTVRVTNSNANAASPLIVAGYNVSGSVRSDGEPMKGVKFLLFSSLVTKEDVLGCNVSPVPGFQPQDESLVYLCYTVSREDGSFSFYSLPSGGYTVIPFYRGERITFDVAPSRLDFTVEHDSLKIEPVFHVMGFSVTGRVLNGPEGDGVPEAVVTLNNQIKVKTKADGSFRLENITTGTYTIHAQKEHLYFETVTIKIAPNTPQLADIVATGFSVCGRISIIRFPDTVKQMNKYKVVLSSQDKDKSLVTVETDAHGSFCFKAKPGTYKVQVMVPEAETRAGLTLKPQTFPLTVTDRPVMDVAFVQFLASVSGKVSCLDTCGDLLVTLQSLSRQGEKRSLQLSGKVNAMTFTFDNVLPGKYKISIMHEDWCWKNKSLEVEVLEDDVSAVEFRQTGYMLRCSLSHAITLEFYQDGNGRENVGIYNLSKGVNRFCLSKPGVYKVTPRSCHRFEQAFYTYDTSSPSILTLTAIRHHVLGTITTDKMMDVTVTIKSSIDSEPALVLGPLKSVQELRREQQLAEIEARRQEREKNGNEEGEERMTKPPVQEMVDELQGPFSYDFSYWARSGEKITVTPSSKELLFYPPSMEAVVSGESCPGKLIEIHGKAGLFLEGQIHPELEGVEIVISEKGASSPLITVFTDDKGAYSVGPLHSDLEYTVTSQKEGYVLTAVEGTIGDFKAYALAGVSFEIKAEDDQPLPGVLLSLSGGLFRSNLLTQDNGILTFSNLSPGQYYFKPMMKEFRFEPSSQMIEVQEGQNLKITITGYRTAYSCYGTVSSLNGEPEQGVAMEAVGQNDCSIYGEDTVTDEEGKFRLRGLLPGCVYHVQLKAEGNDHIERALPHHRVIEVGNNDIDDVNIIVFRQINQFDLSGNVITSSEYLPTLWVKLYKSENLDNPIQTVSLGQSLFFHFPPLLRDGENYVVLLDSTLPRSQYDYILPQVSFTAVGYHKHITLIFNPTRKLPEQDIAQGSYIALPLTLLVLLAGYNHDKLIPLLLQLTSRLQGVGALGQAASDNSGPEDAKRQAKKQKTRRTLRLQEEFQLMWCLVPWRGTLGIHLFSSLPFASEILLETTATCIHY

SEQ ID NO: 57525 - protein, 1100 aa, Homo sapiens
  Payload ID: 11288
  Gene Symbol: NOMO2
  Gene Name: NODAL modulator 2
  Uniprot ID: Q5JPE7
  ENSP ID: ENSP00000439970
MARFAFFKVLPGDYEILATHPTWALKEASTTVRVTNSNANAASPLIVAGYNVSGSVRSDGEPMKGVKFLLFSSLVTKEDVLGCNVSPVPGFQPQDESLVYLCYTVSREDGSFSFYSLPSGGYTVIPFYRGERITFDVAPSRLDFTVEHDSLKIEPVFHVMGFSVTGRVLNGPEGDGVPEAVVTLNNQIKVKTKADGSFRLENITTGTYTIHAQKEHLYFETVTIKIAPNTPQLADIVATGFSVCGRISIIRFPDTVKQMNKYKVVLSSQDKDKSLVTVETDAHGSFCFKAKPGTYKVQVMVPEAETRAGLTLKPQTFPLTVTDRPVMDVAFVQFLASVSGKVSCLDTCGDLLVTLQSLSRQGEKRSLQLSGKVNAMTFTFDNVLPGKYKISIMHEDWCWKNKSLEVEVLEDDVSAVEFRQTGYMLRCSLSHAITLEFYQDGNGRENVGIYNLSKGVNRFCLSKPGVYKVTPRSCHRFEQAFYTYDTSSPSILTLTAIRHHVLGTITTDKMMDVTVTIKSSIDSEPALVLGPLKSVQELRREQQLAEIEARRQEREKNGNEEGEERMTKPPVQEMVDELQGPFSYDFSYWARSGEKITVTPSSKELLFYPPSMEAVVSGESCPGKLIEIHGKAGLFLEGQIHPELEGVEIVISEKGASSPLITVFTDDKGAYSVGPLHSDLEYTVTSQKEGYVLTAVEGTIGDFKAYALAGVSFEIKAEDDQPLPGVLLSLSGGLFRSNLLTQDNGILTFSNLSPGQYYFKPMMKEFRFEPSSQMIEVQEGQNLKITITGYRTAYSCYGTVSSLNGEPEQGVAMEAVGQNDCSIYGEDTVTDEEGKFRLRGLLPGCVYHVQLKAEGNDHIERALPHHRVIEVGNNDIDDVNIIVFRQINQFDLSGNVITSSEYLPTLWVKLYKSENLDNPIQTVSLGQSLFFHFPPLLRDGENYVVLLDSTLPRSQYDYILPQVSFTAVGYHKHITLIFNPTRKLPEQDIAQGSYIALPLTLLVLLAGYNHDKLIPLLLQLTSRLQGVGALGQAASDNSGPEDAKRQAKKQKTRRTLRLQEEFQLMWCLVPWRGTLGIHLFSSLPFASEILLETTATCIHY

SEQ ID NO: 57526 - protein, 61 aa, Homo sapiens
  Payload ID: 11288
  Gene Symbol: NOMO2
  Gene Name: NODAL modulator 2
  ENSP ID: ENSP00000454412
MLVGQGAGLLGPAVVTAAVVLLLSGVGPAHGSEDIVVGCGGFVKSDVEINYSLIEQVLNMH

SEQ ID NO: 57527 - protein, 80 aa, Homo sapiens
  Payload ID: 11288
  Gene Symbol: NOMO2
  Gene Name: NODAL modulator 2
  ENSP ID: ENSP00000454780
  MOD_RES (1)..(1): Any amino acid
XTGYMLRCSLSHAITLVCTAYGVSYLEKRSPCGCQERLTSQEYCKRRNFIRMEMGVRMWGFITSPKESTDSACPSLVCTK

SEQ ID NO: 57528 - protein, 223 aa, Homo sapiens
  Payload ID: 11288
  Gene Symbol: NOMO2
  Gene Name: NODAL modulator 2
  ENSP ID: ENSP00000455456
  MOD_RES (1)..(1): Any amino acid
XSSQDKDKSLVTVETDAHGSFCFKAKPGTYKVQVMVPEAETRAGLTLKPQTFPLTVTDRPVMDVAFVQFLASVSGKVSCLDTCGDLLVTLQSLSRQGEKRSLQLSGKVNAMTFTFDNVLPGKYKISIMHEDWCWKNKSLEVEVLEDDVSAVEFRQTGYMLRCSLSHAITLAQPYCSGEMCPGTSELKTPRNFIRMEMGVRMWGFITSPKESTDSACPSLVCTK

SEQ ID NO: 57529 - protein, 138 aa, Homo sapiens
  Payload ID: 11288
  Gene Symbol: NOMO2
  Gene Name: NODAL modulator 2
  ENSP ID: ENSP00000457351
MLVGQGAGLLGPAVVTAAVVLLLSGVGPAHGSEDIVVGCGGFVKSDVEINYSLIEIKLYTKHGTLKYQTDCAPNNGYFMIPLYDKGDFILKIEPPLGWSFEPTTVELHVDGVSDICTKGGDINFVFTGFSVNGKVCIF

SEQ ID NO: 57530 - protein, 1267 aa, Homo sapiens; identical to SEQ ID NO: 57524
  Payload ID: 11288
  Gene Symbol: NOMO2
  Gene Name: NODAL modulator 2
  Uniprot ID: Q5JPE7
  ENSP ID: ENSP00000477502

SEQ ID NO: 57531 - protein, 282 aa, Homo sapiens
  Payload ID: 11288
  Gene Symbol: NOMO2
  Gene Name: NODAL modulator 2
  ENSP ID: ENSP00000477774
MIEVQEGQNLKITITGYRTAYSCYGTVSSLNGEPEQGVAMEAVGQNDCSIYGEDTVTDEEGKFRLRGLLPGCVYHVQLKAEGNDHIERALPHHRVIEVGNNDIDDVNIIVFRQINQFDLSGNVITSSEYLPTLWVKLYKSENLDNPIQTVSLGQSLFFHFPPLLRDGENYVVLLDSTLPRSQYDYILPQVSFTAVGYHKHITLIFNPTRKLPEQDIAQGSYIALPLTLLVLLAGYNHDKLIPLLLQLTSRLQGVGALGQAASDNSGPEDAKRQAKKQKTRRT

SEQ ID NO: 57532 - protein, 1222 aa, Homo sapiens; identical to SEQ ID NO: 57523
  Payload ID: 11288
  Gene Symbol: NOMO2
  Gene Name: NODAL modulator 2
  Uniprot ID: Q5JPE7
  ENSP ID: ENSP00000478653

SEQ ID NO: 57533 - protein, 1267 aa, Homo sapiens
  Payload ID: 11289
  Gene Symbol: NOMO3
  Gene Name: NODAL modulator 3
  ENSP ID: ENSP00000263012
MLVGQGAGPLGPAVVTAAVVLLLSGVGPAHGSEDIVVGCGGFVKSDVEINYSLIEIKLYTKHGTLKYQTDCAPNNGYFMIPLYDKGDFILKIEPPLGWSFEPTTVELHVDGVSDICTKGGDINFVFTGFSVNGKVLSKGQPLGPAGVQVSLRNTGTEAKIQSTVTQPGGKFAFFKVLPGDYEILATHPTWALKEASTTVRVTNSNANAASPLIVAGYNVSGSVRSDGEPMKGVKFLLFSSLVTKEDVLGCNVSPVPGFQPQDESLVYLCYTVSREDGSFSFYSLPSGGYTVIPFYRGERITFDVAPSRLDFTVEHDSLKIEPVFHVMGFSVTGRVLNGPEGDGVPEAVVTLNNQIKVKTKADGSFRLENITTGTYTIHAQKEHLYFETVTIKIAPNTPQLADIVATGFSVCGQISIIRFPDTVKQMNKYKVVLSSQDKDKSLVTVETDAHGSFCFKANPGTYKVQVMVPEAETRAGLTLKPQTFPLTVTDRPVMDVAFVQFLASVSGKVSCLDTCGDLLVTLQSLSRQGEKRSLQLSGKVNAMTFTFDNVLPGKYKISIMHEDWCWKNKSLEVEVLEDDVSAVEFRQTGYMLRCSLSHAITLEFYQDGNGRENVGIYNLSKGVNRFCLSKPGVYKVTPRSCHRFEQAFYTYDTSSPSILTLTAIRHHVLGTITTDKMMDVTVTIKSSIDSEPALVLGPLKSVQELRREQQLAEIEARRQEREKNGNEEGEERMTKPPVQEMVDELQGPFSYDFSYWARSGEKITVTPSSKELLFYPPSMEAVVSGESCPGKLIEIHGKAGLFLEGQIHPELEGVEIVISEKGASSPLITVFTDDKGAYSVGPLHSDLEYTVTSQKEGYVLTAVEGTIGDFKAYALAGVSFEIKAEDDQPLPGVLLSLSGGLFRSNLLTQDNGILTFSNLSPGQYYFKPMMKEFRFEPSSQMIEVQEGQNLKITITGYRTAYSCYGTVSSLNGEPEQGVAMEAVGQNDCSIYGEDTVTDEEGKFRLRGLLPGCVYHVQLKAEGNDHIERALPHHRVIEVGNNDIDDVNIIVFRQINQFDLSGNVITSSEYLPTLWVKLYKSENLDNPIQTVSLGQSLFFHFPPLLRDGENYVVLLDSTLPRSQYDYILPQVSFTAVGYHKHITLIFNPTRKLPEQDIAQGSYIALPLTLLVLLAGYNHDKLIPLLLQLTSRLQGVGALGQAASDNSGPEDAKRQAKKQKTRRTLRLQEEFQLMWCLVPWRGTLGIHLFSSLPFASEILLETTATCIHY

SEQ ID NO: 57534 - protein, 1222 aa, Homo sapiens
  Payload ID: 11289
  Gene Symbol: NOMO3
  Gene Name: NODAL modulator 3
  Uniprot ID: P69849
  ENSP ID: ENSP00000382274
MLVGQGAGPLGPAVVTAAVVLLLSGVGPAHGSEDIVVGCGGFVKSDVEINYSLIEIKLYTKHGTLKYQTDCAPNNGYFMIPLYDKGDFILKIEPPLGWSFEPTTVELHVDGVSDICTKGGDINFVFTGFSVNGKVLSKGQPLGPAGVQVSLRNTGTEAKIQSTVTQPGGKFAFFKVLPGDYEILATHPTWALKEASTTVRVTNSNANAASPLIVAGYNVSGSVRSDGEPMKGVKFLLFSSLVTKEDVLGCNVSPVPGFQPQDESLVYLCYTVSREDGSFSFYSLPSGGYTVIPFYRGERITFDVAPSRLDFTVEHDSLKIEPVFHVMGFSVTGRVLNGPEGDGVPEAVVTLNNQIKVKTKADGSFRLENITTGTYTIHAQKEHLYFETVTIKIAPNTPQLADIVATGFSVCGQISIIRFPDTVKQMNKYKVVLSSQDKDKSLVTVETDAHGSFCFKANPGTYKVQVMVPEAETRAGLTLKPQTFPLTVTDRPVMDVAFVQFLASVSGKVSCLDTCGDLLVTLQSLSRQGEKRSLQLSGKVNAMTFTFDNVLPGKYKISIMHEDWCWKNKSLEVEVLEDDVSAVEFRQTGYMLRCSLSHAITLEFYQDGNGRENVGIYNLSKGVNRFCLSKPGVYKVTPRSCHRFEQAFYTYDTSSPSILTLTAIRHHVLGTITTDKMMDVTVTIKSSIDSEPALVLGPLKSVQELRREQQLAEIEARRQEREKNGNEEGEERMTKPPVQEMVDELQGPFSYDFSYWARSGEKITVTPSSKELLFYPPSMEAVVSGESCPGKLIEIHGKAGLFLEGQIHPELEGVEIVISEKGASSPLITVFTDDKGAYSVGPLHSDLEYTVTSQKEGYVLTAVEGTIGDFKAYALAGVSFEIKAEDDQPLPGVLLSLSGGLFRSNLLTQDNGILTFSNLSPGQYYFKPMMKEFRFEPSSQMIEVQEGQNLKITITGYRTAYSCYGTVSSLNGEPEQGVAMEAVGQNDCSIYGEDTVTDEEGKFRLRGLLPGCVYHVQLKAEGNDHIERALPHHRVIEVGNNDIDDVNIIVFRQINQFDLSGNVITSSEYLPTLWVKLYKSENLDNPIQTVSLGQSLFFHFPPLLRDGENYVVLLDSTLPRSQYDYILPQVSFTAVGYHKHITLIFNPTRKLPEQDIAQGSYIALPLTLLVLLAGYNHDKLIPLLLQLTSRLQGVGALGQAASDNSGPEDAKRQAKKQKTRRT

SEQ ID NO: 57535 - protein, 138 aa, Homo sapiens
  Payload ID: 11289
  Gene Symbol: NOMO3
  Gene Name: NODAL modulator 3
  ENSP ID: ENSP00000458267
MLVGQGAGPLGPAVVTAAVVLLLSGVGPAHGSEDIVVGCGGFVKSDVEINYSLIEIKLYTKHGTLKYQTDCAPNNGYFMIPLYDKGDFILKIEPPLGWSFEPTTVELHVDGVSDICTKGGDINFVFTGFSVNGKVCIF

SEQ ID NO: 57536 - protein, 95 aa, Homo sapiens
  Payload ID: 11289
  Gene Symbol: NOMO3
  Gene Name: NODAL modulator 3
  ENSP ID: ENSP00000458821
  MOD_RES (1)..(1): Any amino acid
XEDWCWKNKSLEVEVLEDDVSAVEFRQTGYMLRCSLSHAITLVQPYCSGEMCPGTSELKTPRNFIRMEMGVRMWGFITSPKESTDSACPSLVCTK

SEQ ID NO: 57537 - protein, 50 aa, Homo sapiens
  Payload ID: 11289
  Gene Symbol: NOMO3
  Gene Name: NODAL modulator 3
  ENSP ID: ENSP00000459996
  MOD_RES (1)..(1): Any amino acid
XSYIALPLTLLVLLAGYNHDKGHIRPGERPAHPWGLISKRPASFELKPTH

SEQ ID NO: 57538 - protein, 61 aa, Homo sapiens
  Payload ID: 11289
  Gene Symbol: NOMO3
  Gene Name: NODAL modulator 3
  ENSP ID: ENSP00000461721
MLVGQGAGPLGPAVVTAAVVLLLSGVGPAHGSEDIVVGCGGFVKSDVEINYSLIEQVLNMH

SEQ ID NO: 57539 - protein, 80 aa, Homo sapiens
  Payload ID: 11289
  Gene Symbol: NOMO3
  Gene Name: NODAL modulator 3
  ENSP ID: ENSP00000461870
  MOD_RES (1)..(1): Any amino acid
XTGYMLRCSLSHAITLVCTAYGVSYLEKRLPCGCQERLTSQEYCKRRNFIRMEMGVRMWGFITSPKESTDSACPSLVCTK

SEQ ID NO: 57540 - protein, 138 aa, Homo sapiens; identical to SEQ ID NO: 57535
  Payload ID: 11289
  Gene Symbol: NOMO3
  Gene Name: NODAL modulator 3
  ENSP ID: ENSP00000478494

SEQ ID NO: 57541 - protein, 1222 aa, Homo sapiens; identical to SEQ ID NO: 57534
  Payload ID: 11289
  Gene Symbol: NOMO3
  Gene Name: NODAL modulator 3
  Uniprot ID: P69849
  ENSP ID: ENSP00000483234

SEQ ID NO: 57542 - protein, 1267 aa, Homo sapiens; identical to SEQ ID NO: 57533
  Payload ID: 11289
  Gene Symbol: NOMO3
  Gene Name: NODAL modulator 3
  ENSP ID: ENSP00000484978

SEQ ID NO: 57543 - protein, 95 aa, Homo sapiens; identical to SEQ ID NO: 57536
  Payload ID: 11289
  Gene Symbol: NOMO3
  Gene Name: NODAL modulator 3
  ENSP ID: ENSP00000487733
  MOD_RES (1)..(1): Any amino acid

SEQ ID NO: 57544 - protein, 80 aa, Homo sapiens; identical to SEQ ID NO: 57539
  Payload ID: 11289
  Gene Symbol: NOMO3
  Gene Name: NODAL modulator 3
  ENSP ID: ENSP00000487889
  MOD_RES (1)..(1): Any amino acid

SEQ ID NO: 57545 - protein, 50 aa, Homo sapiens; identical to SEQ ID NO: 57537
  Payload ID: 11289
  Gene Symbol: NOMO3
  Gene Name: NODAL modulator 3
  ENSP ID: ENSP00000487910
  MOD_RES (1)..(1): Any amino acid

SEQ ID NO: 57546 - protein, 61 aa, Homo sapiens; identical to SEQ ID NO: 57538
  Payload ID: 11289
  Gene Symbol: NOMO3
  Gene Name: NODAL modulator 3
  ENSP ID: ENSP00000488449

SEQ ID NO: 57547 - protein, 232 aa, Homo sapiens
  Payload ID: 11290
  Gene Symbol: NOG
  Gene Name: noggin
  Uniprot ID: Q13253
  ENSP ID: ENSP00000328181
MERCPSLGVTLYALVVVLGLRATPAGGQHYLHIRPAPSDNLPLVDLIEHPDPIFDPKEKDLNETLLRSLLGGHYDPGFMATSPPEDRPGGGGGAAGGAEDLAELDQLLRQRPSGAMPSEIKGLEFSEGLAQGKKQRLSKKLRRKLQMWLWSQTFCPVLYAWNDLGSRFWPRYVKVGSCFSKRSCSVPEGMVCKPSKSVHLTVLRWRCQRRGGQRCGWIPIQYPIISECKCSC

SEQ ID NO: 57548 - protein, 329 aa, Homo sapiens
  Payload ID: 11291
  Gene Symbol: NIPA1
  Gene Name: non imprinted in Prader-Willi/Angelman syndrome 1
  Uniprot ID: Q7RTP0
  ENSP ID: ENSP00000337452
MGTAAAAAAAAAAAAAGEGARSPSPAAVSLGLGVAVVSSLVNGSTFVLQKKGIVRAKRRGTSYLTDIVWWAGTIAMAVGQIGNFLAYTAVPTVLVTPLGALGVPFGSILASYLLKEKLNILGKLGCLLSCAGSVVLIIHSPKSESVTTQAELEEKLTNPVFVGYLCIVLLMLLLLIFWIAPAHGPTNIMVYISICSLLGSFTVPSTKGIGLAAQDILHNNPSSQRALCLCLVLLAVLGCSIIVQFRYINKALECFDSSVFGAIYYVVFTTLVLLASAILFREWSNVGLVDFLGMACGFTTVSVGIVLIQVFKEFNFNLGEMNKSNMKTD

SEQ ID NO: 57549 - protein, 254 aa, Homo sapiens
  Payload ID: 11291
  Gene Symbol: NIPA1
  Gene Name: non imprinted in Prader-Willi/Angelman syndrome 1
  Uniprot ID: Q7RTP0
  ENSP ID: ENSP00000393962
MAVGQIGNFLAYTAVPTVLVTPLGALGVPFGSILASYLLKEKLNILGKLGCLLSCAGSVVLIIHSPKSESVTTQAELEEKLTNPVFVGYLCIVLLMLLLLIFWIAPAHGPTNIMVYISICSLLGSFTVPSTKGIGLAAQDILHNNPSSQRALCLCLVLLAVLGCSIIVQFRYINKALECFDSSVFGAIYYVVFTTLVLLASAILFREWSNVGLVDFLGMACGFTTVSVGIVLIQVFKEFNFNLGEMNKSNMKTD

SEQ ID NO: 57550 - protein, 90 aa, Homo sapiens
  Payload ID: 11291
  Gene Symbol: NIPA1
  Gene Name: non imprinted in Prader-Willi/Angelman syndrome 1
  ENSP ID: ENSP00000453286
  MOD_RES (1)..(1): Any amino acid
XSSLVNGSTFVLQKKGIVRAKRRGTSYLTDIVWWAGTIAMAVGQIGNFLAYTAVPTVLVTPLGALGVPFGQMPKSLQRSVSMMGVLKFTP

SEQ ID NO: 57551 - protein, 254 aa, Homo sapiens; identical to SEQ ID NO: 57549
  Payload ID: 11291
  Gene Symbol: NIPA1
  Gene Name: non imprinted in Prader-Willi/Angelman syndrome 1
  Uniprot ID: Q7RTP0
  ENSP ID: ENSP00000453722

SEQ ID NO: 57552 - protein, 58 aa, Homo sapiens
  Payload ID: 11291
  Gene Symbol: NIPA1
  Gene Name: non imprinted in Prader-Willi/Angelman syndrome 1
  ENSP ID: ENSP00000453797
IVRAKRRGTSYLTDIVWWAGTIAMAVGQIGNFLAYTAVPTVLVTPLGALGVPFGCYSL

SEQ ID NO: 57553 - protein, 360 aa, Homo sapiens
  Payload ID: 11292
  Gene Symbol: NIPA2
  Gene Name: non imprinted in Prader-Willi/Angelman syndrome 2
  Uniprot ID: Q8N8Q9
  ENSP ID: ENSP00000337618
MSQGRGKYDFYIGLGLAMSSSIFIGGSFILKKKGLLRLARKGSMRAGQGGHAYLKEWLWWAGLLSMGAGEVANFAAYAFAPATLVTPLGALSVLVSAILSSYFLNERLNLHGKIGCLLSILGSTVMVIHAPKEEEIETLNEMSHKLGDPGFVVFATLVVIVALILIFVVGPRHGQTNILVYITICSVIGAFSVSCVKGLGIAIKELFAGKPVLRHPLAWILLLSLIVCVSTQINYLNRALDIFNTSIVTPIYYVFFTTSVLTCSAILFKEWQDMPVDDVIGTLSGFFTIIVGIFLLHAFKDVSFSLASLPVSFRKDEKAMNGNLSNMYEVLNNNEESLTCGIEQHTGENVSRRNGNLTAF

SEQ ID NO: 57554 - protein, 341 aa, Homo sapiens
  Payload ID: 11292
  Gene Symbol: NIPA2
  Gene Name: non imprinted in Prader-Willi/Angelman syndrome 2
  Uniprot ID: Q8N8Q9
  ENSP ID: ENSP00000352762
MSQGRGKYDFYIGLGLAMSSSIFIGGSFILKKKGLLRLARKGSMRAVGAGEVANFAAYAFAPATLVTPLGALSVLVSAILSSYFLNERLNLHGKIGCLLSILGSTVMVIHAPKEEEIETLNEMSHKLGDPGFVVFATLVVIVALILIFVVGPRHGQTNILVYITICSVIGAFSVSCVKGLGIAIKELFAGKPVLRHPLAWILLLSLIVCVSTQINYLNRALDIFNTSIVTPIYYVFFTTSVLTCSAILFKEWQDMPVDDVIGTLSGFFTIIVGIFLLHAFKDVSFSLASLPVSFRKDEKAMNGNLSNMYEVLNNNEESLTCGIEQHTGENVSRRNGNLTAF

SEQ ID NO: 57555 - protein, 360 aa, Homo sapiens; identical to SEQ ID NO: 57553
  Payload ID: 11292
  Gene Symbol: NIPA2
  Gene Name: non imprinted in Prader-Willi/Angelman syndrome 2
  Uniprot ID: Q8N8Q9
  ENSP ID: ENSP00000381095

SEQ ID NO: 57556 - protein, 360 aa, Homo sapiens; identical to SEQ ID NO: 57553
  Payload ID: 11292
  Gene Symbol: NIPA2
  Gene Name: non imprinted in Prader-Willi/Angelman syndrome 2
  Uniprot ID: Q8N8Q9
  ENSP ID: ENSP00000381096

SEQ ID NO: 57557 - protein, 341 aa, Homo sapiens; identical to SEQ ID NO: 57554
  Payload ID: 11292
  Gene Symbol: NIPA2
  Gene Name: non imprinted in Prader-Willi/Angelman syndrome 2
  Uniprot ID: Q8N8Q9
  ENSP ID: ENSP00000437746

SEQ ID NO: 57558 - protein, 59 aa, Homo sapiens
  Payload ID: 11292
  Gene Symbol: NIPA2
  Gene Name: non imprinted in Prader-Willi/Angelman syndrome 2
  ENSP ID: ENSP00000453700
MSQGRGKYDFYIGLGLAMSSSIFIGGSFILKKKGLLRLARKGSMRAGQGGHAYLKEWLW

SEQ ID NO: 57559 - protein, 102 aa, Homo sapiens
  Payload ID: 11293
  Gene Symbol: NCMAP
  Gene Name: noncompact myelin associated protein
  Uniprot ID: Q5T1S8
  ENSP ID: ENSP00000363513
MTTATPLGDTTFFSLNMTTRGEDFLYKSSGAIVAAVVVVVIIIFTVVLILLKMYNRKMRTRRELEPKGPKPTAPSAVGPNSNGSQHPATVTFSPVDVQVETR

SEQ ID NO: 57560 - protein, 299 aa, Homo sapiens
  Payload ID: 11294
  Gene Symbol: NHEJ1
  Gene Name: nonhomologous end-joining factor 1
  Uniprot ID: Q9H9Q4
  ENSP ID: ENSP00000349313
MEELEQGLLMQPWAWLQLAENSLLAKVFITKQGYALLVSDLQQVWHEQVDTSVVSQRAKELNKRLTAPPAAFLCHLDNLLRPLLKDAAHPSEATFSCDCVADALILRVRSELSGLPFYWNFHCMLASPSLVSQHLIRPLMGMSLALQCQVRELATLLHMKDLEIQDYQESGATLIRDRLKTEPFEENSFLEQFMIEKLPEACSIGDGKPFVMNLQDLYMAVTTQEVQVGQKHQGAGDPHTSNSASLQGIDSQCVNQPEQLVSSAPTLSAPEKESTGTSGPLQRPQLSKVKRKKPRGLFS

SEQ ID NO: 57561 - protein, 316 aa, Homo sapiens
  Payload ID: 11294
  Gene Symbol: NHEJ1
  Gene Name: nonhomologous end-joining factor 1
  Uniprot ID: Q9H9Q4
  ENSP ID: ENSP00000387290
MEELEQGLLMQPWAWLQLAENSLLAKVFITKQGYALLVSDLQQVWHEQVDTSVVSQRAKELNKRLTAPPAAFLCHLDNLLRPLLKDAAHPSEATFSCDCVADALILRVRSELSGLPFYWNFHCMLASPSLVSQHLIRPLMGMSLALQCQVRELATLLHMKDLEIQDYQESGATLIRDRLKTEPFEENSFLEQFMIEKLPEACSIGDGKPFVMNLQDLYMAVTTQEVQVGQKHQGAGDPHTSNSASLQGIDSQCVNQPEQLVSSAPTLSAPEKESTALCRDLSCQRSRGRSQGVSSVNLLWPQLLRMDLENSFQASP

SEQ ID NO: 57562 - protein, 224 aa, Homo sapiens
  Payload ID: 11294
  Gene Symbol: NHEJ1
  Gene Name: nonhomologous end-joining factor 1
  ENSP ID: ENSP00000394896
RPLLKDAAHPSEATFSCDCVADALILRVRSELSGLPFYWNFHCMLASPSLVSQHLIRPLMGMSLALQCQVRELATLLHMKDLEIQDYQESGATLIRDRLKTEPFEENSFLEQFMIEKLPEACSIGDGKPFVMNLQDLYMAVTTQEVQVGQKHQGAGEPSRGDPHTSNSASLQGIDSQCVNQPEQLVSSAPTLSAPEKESTGTSGPLQRPQLSKVKRKKPRGLFS

SEQ ID NO: 57563 - protein, 229 aa, Homo sapiens
  Payload ID: 11294
  Gene Symbol: NHEJ1
  Gene Name: nonhomologous end-joining factor 1
  ENSP ID: ENSP00000407201
MEELEQGLLMQPWAWLQLAENSLLAKVFITKQGYALLVSDLQQVWHEQVDTSVVSQRAKELNKRLTAPPAAFLCHLDNLLRPLLKDAAHPSEATFSCDCVADALILRVRSELSGLPFYWNFHCMLASPSLVSQHLIRPLMGMSLALQCQVRELATLLHMKDLEIQDYQESGATLIRDRLKTEPFEENSFLEQFMIEKLPEACSIGDGKPFVMNLQDLYMAVTTQEVQVG

SEQ ID NO: 57564 - protein, 50 aa, Homo sapiens
  Payload ID: 11294
  Gene Symbol: NHEJ1
  Gene Name: nonhomologous end-joining factor 1
  ENSP ID: ENSP00000408421
MEELEQGLLMQPWAWLQLAENSLLAKVFITKQGYALLVSDLQQVWHEQMH

SEQ ID NO: 57565 - protein, 232 aa, Homo sapiens
  Payload ID: 11294
  Gene Symbol: NHEJ1
  Gene Name: nonhomologous end-joining factor 1
  ENSP ID: ENSP00000408966
MEELEQGLLMQPWAWLQLAENSLLAKVFITKQGYALLVSDLQQVWHEQVDTSVVSQRAKELNKRLTAPPAAFLCHLDNLLRPLLKDAAHPSEATFSCDCVADALILRVRSELSGLPFYWNFHCMLASPSLVSQHLIRPLMGMSLALQCQVRELATLLHMKDLEIQDYQESGATLIRDRLKTEPFEENSFLEQFMIELKDIPIKTGDPAYWPRTLHAASVSFYHETARGMQHW

SEQ ID NO: 57566 - protein, 471 aa, Homo sapiens
  Payload ID: 11295
  Gene Symbol: NONO
  Gene Name: non-POU domain containing, octamer-binding
  Uniprot ID: Q15233
  ENSP ID: ENSP00000276079
MQSNKTFNLEKQNHTPRKHHQHHHQQQHHQQQQQQPPPPPIPANGQQASSQNEGLTIDLKNFRKPGEKTFTQRSRLFVGNLPPDITEEEMRKLFEKYGKAGEVFIHKDKGFGFIRLETRTLAEIAKVELDNMPLRGKQLRVRFACHSASLTVRNLPQYVSNELLEEAFSVFGQVERAVVIVDDRGRPSGKGIVEFSGKPAARKALDRCSEGSFLLTTFPRPVTVEPMDQLDDEEGLPEKLVIKNQQFHKEREQPPRFAQPGSFEYEYAMRWKALIEMEKQQQDQVDRNIKEAREKLEMEMEAARHEHQVMLMRQDLMRRQEELRRMEELHNQEVQKRKQLELRQEEERRRREEEMRRQQEEMMRRQQEGFKGTFPDAREQEIRMGQMAMGGAMGINNRGAMPPAPVPAGTPAPPGPATMMPDGTLGLTPPTTERFGQAATMEGIGAIGGTPPAFNRAAPGAEFAPNKRRRY

SEQ ID NO: 57567 - protein, 471 aa, Homo sapiens; identical to SEQ ID NO: 57566
  Payload ID: 11295
  Gene Symbol: NONO
  Gene Name: non-POU domain containing, octamer-binding
  Uniprot ID: Q15233
  ENSP ID: ENSP00000362947

SEQ ID NO: 57568 - protein, 471 aa, Homo sapiens; identical to SEQ ID NO: 57566
  Payload ID: 11295
  Gene Symbol: NONO
  Gene Name: non-POU domain containing, octamer-binding
  Uniprot ID: Q15233
  ENSP ID: ENSP00000362963

SEQ ID NO: 57569 - protein, 207 aa, Homo sapiens
  Payload ID: 11295
  Gene Symbol: NONO
  Gene Name: non-POU domain containing, octamer-binding
  ENSP ID: ENSP00000406673
MQSNKTFNLEKQNHTPRKHHQHHHQQQHHQQQQQQPPPPPIPANGQQASSQNEGLTIDLKNFRKPGEKTFTQRSRLFVGNLPPDITEEEMRKLFEKYGKAGEVFIHKDKGFGFIRLETRTLAEIAKVELDNMPLRGKQLRVRFACHSASLTVRNLPQYVSNELLEEAFSVFGQVERAVVIVDDRGRPSGKGIVEFSGKPAARKALDR

SEQ ID NO: 57570 - protein, 234 aa, Homo sapiens
  Payload ID: 11295
  Gene Symbol: NONO
  Gene Name: non-POU domain containing, octamer-binding
  ENSP ID: ENSP00000409773
  MOD_RES (1)..(1): Any amino acid
XPDITEEEMRKLFEKYGKAGEVFIHKDKGFGFIRLVERAVVIVDDRGRPSGKGIVEFSGKPAARKALDRCSEGSFLLTTFPRPVTVEPMDQLDDEEGLPEKLVIKNQQFHKEREQPPRFAQPGSFEYEYAMRWKALIEMEKQQQDQVDRNIKEAREKLEMEMEAARHEHQVMLMRQDLMRRQEELRRMEELHNQEVQKRKQLELRQEEERRRREEEMRRQQEEMMRRQQEGFKG

SEQ ID NO: 57571 - protein, 124 aa, Homo sapiens
  Payload ID: 11295
  Gene Symbol: NONO
  Gene Name: non-POU domain containing, octamer-binding
  ENSP ID: ENSP00000410299
MQSNKTFNLEKQNHTPRKHHQHHHQQQHHQQQQQQPPPPPIPANGQQASSQNEGLTIDLKNFRKPGEKTFTQRSRLFVGNLPPDITEEEMRKLFEKYGKETRTLAEIAKVELDNMPLRGKQLRV

SEQ ID NO: 57572 - protein, 247 aa, Homo sapiens
  Payload ID: 11295
  Gene Symbol: NONO
  Gene Name: non-POU domain containing, octamer-binding
  ENSP ID: ENSP00000413350
MQSNKTFNLEKQNHTPRKHHQHHHQQQHHQQQQQQPPPPPIPANGQQASSQNEGLTIDLKNFRKPGEKTFTQRSRLFVGNLPPDITEEEMRKLFEKYGKAGEVFIHKDKGFGFIRLETRTLAEIAKVELDNMPLRGKQLRVRFACHSASLTVRNLPQEREQPPRFAQPGSFEYEYAMRWKALIEMEKQQQDQVDRNIKEAREKLEMEMEAARHEHQVMLMRQDLMRRQEELRRMEELHNQEVQKRKQ

SEQ ID NO: 57573 - protein, 65 aa, Homo sapiens
  Payload ID: 11295
  Gene Symbol: NONO
  Gene Name: non-POU domain containing, octamer-binding
  ENSP ID: ENSP00000415777
MQSNKTFNLEKQNHTPRKHHQHHHQQQHHQQQQQQPPPPPIPANGQQASSQNEGLTIDLKNFRKP

SEQ ID NO: 57574 - protein, 382 aa, Homo sapiens
  Payload ID: 11295
  Gene Symbol: NONO
  Gene Name: non-POU domain containing, octamer-binding
  Uniprot ID: Q15233
  ENSP ID: ENSP00000441364
MRKLFEKYGKAGEVFIHKDKGFGFIRLETRTLAEIAKVELDNMPLRGKQLRVRFACHSASLTVRNLPQYVSNELLEEAFSVFGQVERAVVIVDDRGRPSGKGIVEFSGKPAARKALDRCSEGSFLLTTFPRPVTVEPMDQLDDEEGLPEKLVIKNQQFHKEREQPPRFAQPGSFEYEYAMRWKALIEMEKQQQDQVDRNIKEAREKLEMEMEAARHEHQVMLMRQDLMRRQEELRRMEELHNQEVQKRKQLELRQEEERRRREEEMRRQQEEMMRRQQEGFKGTFPDAREQEIRMGQMAMGGAMGINNRGAMPPAPVPAGTPAPPGPATMMPDGTLGLTPPTTERFGQAATMEGIGAIGGTPPAFNRAAPGAEFAPNKRRRY

SEQ ID NO: 57575 - protein, 1401 aa, Homo sapiens
  Payload ID: 11296
  Gene Symbol: NCAPD2
  Gene Name: non-SMC condensin I complex, subunit D2
  Uniprot ID: Q15021
  ENSP ID: ENSP00000325017
MAPQMYEFHLPLSPEELLKSGGVNQYVVQEVLSIKHLPPQLRAFQAAFRAQGPLAMLQHFDTIYSILHHFRSIDPGLKEDTLQFLIKVVSRHSQELPAILDDTTLSGSDRNAHLNALKMNCYALIRLLESFETMASQTNLVDLDLGGKGKKARTKAAHGFDWEEERQPILQLLTQLLQLDIRHLWNHSIIEEEFVSLVTGCCYRLLENPTINHQKNRPTREAITHLLGVALTRYNHMLSATVKIIQMLQHFEHLAPVLVAAVSLWATDYGMKSIVGEIVREIGQKCPQELSRDPSGTKGFAAFLTELAERVPAILMSSMCILLDHLDGENYMMRNAVLAAMAEMVLQVLSGDQLEAAARDTRDQFLDTLQAHGHDVNSFVRSRVLQLFTRIVQQKALPLTRFQAVVALAVGRLADKSVLVCKNAIQLLASFLANNPFSCKLSDADLAGPLQKETQKLQEMRAQRRTAAASAVLDPEEEWEAMLPELKSTLQQLLQLPQGEEEIPEQIANTETTEDVKGRIYQLLAKASYKKAIILTREATGHFQESEPFSHIDPEESEETRLLNILGLIFKGPAASTQEKNPRESTGNMVTGQTVCKNKPNMSDPEESRGNDELVKQEMLVQYLQDAYSFSRKITEAIGIISKMMYENTTTVVQEVIEFFVMVFQFGVPQALFGVRRMLPLIWSKEPGVREAVLNAYRQLYLNPKGDSARAKAQALIQNLSLLLVDASVGTIQCLEEILCEFVQKDELKPAVTQLLWERATEKVACCPLERCSSVMLLGMMARGKPEIVGSNLDTLVSIGLDEKFPQDYRLAQQVCHAIANISDRRKPSLGKRHPPFRLPQEHRLFERLRETVTKGFVHPDPLWIPFKEVAVTLIYQLAEGPEVICAQILQGCAKQALEKLEEKRTSQEDPKESPAMLPTFLLMNLLSLAGDVALQQLVHLEQAVSGELCRRRVLREEQEHKTKDPKEKNTSSETTMEEELGLVGATADDTEAELIRGICEMELLDGKQTLAAFVPLLLKVCNNPGLYSNPDLSAAASLALGKFCMISATFCDSQLRLLFTMLEKSPLPIVRSNLMVATGDLAIRFPNLVDPWTPHLYARLRDPAQQVRKTAGLVMTHLILKDMVKVKGQVSEMAVLLIDPEPQIAALAKNFFNELSHKGNAIYNLLPDIISRLSDPELGVEEEPFHTIMKQLLSYITKDKQTESLVEKLCQRFRTSRTERQQRDLAYCVSQLPLTERGLRKMLDNFDCFGDKLSDESIFSAFLSVVGKLRRGAKPEGKAIIDEFEQKLRACHTRGLDGIKELEIGQAGSQRAPSAKKPSTGSRYQPLASTASDNDFVTPEPRRTTRRHPNTQQRASKKKPKVVFSSDESSEEDLSAEMTEDETPKKTTPILRASARRHRS

SEQ ID NO: 57576 - protein, 919 aa, Homo sapiens
  Payload ID: 11296
  Gene Symbol: NCAPD2
  Gene Name: non-SMC condensin I complex, subunit D2
  ENSP ID: ENSP00000371895
MAPQMYEFHLPLSPEELLKSGGVNQYVVQEVLSIKHLPPQLRAFQAAFRAQGPLAMLQHFDTIYSILHLVTGCCYRLLENPTINHQKNRPTREAITHLLGVALTRYNHMLSATVKIIQMLQHFEHLAPVLVAAVSLWATDYGMKSIVGEIVREIGQKCPQELSRDPSGTKGFAAFLTELAERVPAILMSSMCILLDHLDGENYMMRNAVLAAMAEMVLQVLSGDQLEAAARDTRDQFLDTLQAHGHDVNSFVRSRVLQLFTRIVQQKALPLTRFQAVVALAVGRLADKSVLVCKNAIQLLASFLANNPFSCKLSDADLAGPLQKETQKLQEMRAQRRTAAASAVLDPEEEWEAMLPELKSTLQQLLQLPQGEEEIPEQIANTETTEDVKGRIYQLLAKASYKKAIILTREATGHFQESEPFSHIDPEESEETRLLNILGLIFKGPAASTQEKNPRESTGNMVTGQTVCKNKPNMSDPEESRGNDELVKQEMLVQYLQDAYSFSRKITEAIGIISKMMYENTTTVVQEVIEFFVMVFQFGVPQALFGVRRMLPLIWSKEPGVREAVLNAYRQLYLNPKGDSARAKAQALIQNLSLLLVDASVGTIQCLEEILCEFVQKDELKPAVTQLLWERATEKVACCPLERCSSVMLLGMMARGKPEIVGSNLDTLVSIGLDEKFPQDYRLAQQVCHAIANISDRRKPSLGKRHPPFRLPQEHRLFERLRETVTKGFVHPDPLWIPFKEVAVTLIYQLAEGPEVICAQILQGCAKQALEKLEEKRTSQEDPKESPAMLPTFLLMNLLSLAGDVALQQLVHLEQAVSGELCRRRVLREEQEHKTKDPKEKNTSSETTMEEELGLVGATADDTEAELIRGICEMELLDGKQTLAAFVPLLLKVCNNPGLYSNPDLSAAASLALGKFCMI

SEQ ID NO: 57577 - protein, 81 aa, Homo sapiens
  Payload ID: 11296
  Gene Symbol: NCAPD2
  Gene Name: non-SMC condensin I complex, subunit D2
  ENSP ID: ENSP00000438495
MAPQMYEFHLPLSPEELLKSGGVNQYVVQEVLSIKHLPPQLRAFQAAFRAQGPLAMLQHFDTIYSILHGIPPLPGASSYPG

SEQ ID NO: 57578 - protein, 118 aa, Homo sapiens
  Payload ID: 11296
  Gene Symbol: NCAPD2
  Gene Name: non-SMC condensin I complex, subunit D2
  ENSP ID: ENSP00000444377
MAPQMYEFHLPLSPEELLKSGGVNQYVVQEVLSIKHLPPQLRAFQAAFRAQGPLAMLQHFDTIYSILHHFRSIDPGLKEDTLQFLIKVVSRHSQELPAILDDTTLSGSDRNAHLNALK

SEQ ID NO: 57579 - protein, 1015 aa, Homo sapiens
  Payload ID: 11297
  Gene Symbol: NCAPG
  Gene Name: non-SMC condensin I complex, subunit G
  Uniprot ID: Q9BPX3
  ENSP ID: ENSP00000251496
MGAERRLLSIKEAFRLAQQPHQNQAKLVVALSRTYRTMDDKTVFHEEFIHYLKYVMVVYKREPAVERVIEFAAKFVTSFHQSDMEDDEEEEDGGLLNYLFTFLLKSHEANSNAVRFRVCLLINKLLGSMPENAQIDDDVFDKINKAMLIRLKDKIPNVRIQAVLALSRLQDPKDDECPVVNAYATLIENDSNPEVRRAVLSCIAPSAKTLPKIVGRTKDVKEAVRKLAYQVLAEKVHMRAMSIAQRVMLLQQGLNDRSDAVKQAMQKHLLQGWLRFSEGNILELLHRLDVENSSEVAVSVLNALFSITPLSELVGLCKNNDGRKLIPVETLTPEIALYWCALCEYLKSKGDEGEEFLEQILPEPVVYADYLLSYIQSIPVVNEEHRGDFSYIGNLMTKEFIGQQLILIIKSLDTSEEGGRKKLLAVLQEILILPTIPISLVSFLVERLLHIIIDDNKRTQIVTEIISEIRAPIVTVGVNNDPADVRKKELKMAEIKVKLIEAKEALENCITLQDFNRASELKEEIKALEDARINLLKETEQLEIKEVHIEKNDAETLQKCLILCYELLKQMSISTGLSATMNGIIESLILPGIISIHPVVRNLAVLCLGCCGLQNQDFARKHFVLLLQVLQIDDVTIKISALKAIFDQLMTFGIEPFKTKKIKTLHCEGTEINSDDEQESKEVEETATAKNVLKLLSDFLDSEVSELRTGAAEGLAKLMFSGLLVSSRILSRLILLWYNPVTEEDVQLRHCLGVFFPVFAYASRTNQECFEEAFLPTLQTLANAPASSPLAEIDITNVAELLVDLTRPSGLNPQAKTSQDYQALTVHDNLAMKICNEILTSPCSPEIRVYTKALSSLELSSHLAKDLLVLLNEILEQVKDRTCLRALEKIKIQLEKGNKEFGDQAEAAQDATLTTTTFQNEDEKNKEVYMTPLRGVKATQASKSTQLKTNRGQRKVTVSARTNRRCQTAEADSESDHEVPEPESEMKMRLPRRAKTAALEKSKLNLAQFLNEDLS

SEQ ID NO: 57580 - protein, 232 aa, Homo sapiens
  Payload ID: 11297
  Gene Symbol: NCAPG
  Gene Name: non-SMC condensin I complex, subunit G
  ENSP ID: ENSP00000423042
MGAERRLLSIKEAFRLAQQPHQNQAKLVVALSRTYRTMDDKTVFHEEFIHYLKYVMVVYKREPAVERVIEFAAKFVTSFHQSDMEDDEEEEDGGLLNYLFTFLLKSHEANSNAVRFRVCLLINKLLGSMPENAQIDDDVFDKINKAMLIRLKDKIPNVRIQAVLALSRLQDPKDDECPVVNAYATLIENDSNPEVRRAVLSCIAPSAKTLPKIVGRTKDVKEAVRKLAYQML

SEQ ID NO: 57581 - protein, 269 aa, Homo sapiens
  Payload ID: 11297
  Gene Symbol: NCAPG
  Gene Name: non-SMC condensin I complex, subunit G
  ENSP ID: ENSP00000425625
ISLVSFLVERLLHIIIDDNKRTQIVTEIISEIRAPIVTVGVNNDPADVRKKELKMAEIKVKLIEAKEALENCITLQDFNRASELKEEIKALEDARINLLKETEQLEIKEVHIEKVQNDAETLQKCLILCYELLKQMSISTGLSATMNGIIESLILPGIISIHPVVRNLAVLCLGCCGLQNQDFARKHFVLLLQVLQIDDVTIKISALKAIFDQLMTFGIEPFKTKKIKTLHCEGTEINSDDEQESKEVEETATAKNVLKLLSDFLDSEV

SEQ ID NO: 57582 - protein, 741 aa, Homo sapiens
  Payload ID: 11298
  Gene Symbol: NCAPH
  Gene Name: non-SMC condensin I complex, subunit H
  Uniprot ID: Q15003
  ENSP ID: ENSP00000240423
MGPPGPALPATMNNSSSETRGHPHSASSPSERVFPMPLPRKAPLNIPGTPVLEDFPQNDDEKERLQRRRSRVFDLQFSTDSPRLLASPSSRSIDISATIPKFTNTQITEHYSTCIKLSTENKITTKNAFGLHLIDFMSEILKQKDTEPTNFKVAAGTLDASTKIYAVRVDAVHADVYRVLGGLGKDAPSLEEVEGHVADGSATEMGTTKKAVKPKKKHLHRTIEQNINNLNVSEADRKCEIDPMFQKTAASFDECSTAGVFLSTLHCQDYRSELLFPSDVQTLSTGEPLELPELGCVEMTDLKAPLQQCAEDRQICPSLAGFQFTQWDSETHNESVSALVDKFKKNDQVFDINAEVDESDCGDFPDGSLGDDFDANDEPDHTAVGDHEEFRSWKEPCQVQSCQEEMISLGDGDIRTMCPLLSMKPGEYSYFSPRTMSMWAGPDHWRFRPRRKQDAPSQSENKKKSTKKDFEIDFEDDIDFDVYFRKTKAATILTKSTLENQNWRATTLPTDFNYNVDTLVQLHLKPGTRLLKMAQGHRVETEHYEEIEDYDYNNPNDTSNFCPGLQAADSDDEDLDDLFVGPVGNSDLSPYPCHPPKTAQQNGDTPEAQGLDITTYGESNLVAEPQKVNKIEIHYAKTAKKMDMKKLKQSMWSLLTALSGKEADAEANHREAGKEAALAEVADEKMLSGLTKDLQRSLPPVMAQNLSIPLAFACLLHLANEKNLKLEGTEDLSDVLVRQGD

SEQ ID NO: 57583 - protein, 605 aa, Homo sapiens
  Payload ID: 11298
  Gene Symbol: NCAPH
  Gene Name: non-SMC condensin I complex, subunit H
  Uniprot ID: Q15003
  ENSP ID: ENSP00000400774
MSEILKQKDTEPTNFKVAAGTLDASTKIYAVRVDAVHADVYRVLGGLGKDAPSLEEVEGHVADGSATEMGTTKKAVKPKKKHLHRTIEQNINNLNVSEADRKCEIDPMFQKTAASFDECSTAGVFLSTLHCQDYRSELLFPSDVQTLSTGEPLELPELGCVEMTDLKAPLQQCAEDRQICPSLAGFQFTQWDSETHNESVSALVDKFKKNDQVFDINAEVDESDCGDFPDGSLGDDFDANDEPDHTAVGDHEEFRSWKEPCQVQSCQEEMISLGDGDIRTMCPLLSMKPGEYSYFSPRTMSMWAGPDHWRFRPRRKQDAPSQSENKKKSTKKDFEIDFEDDIDFDVYFRKTKAATILTKSTLENQNWRATTLPTDFNYNVDTLVQLHLKPGTRLLKMAQGHRVETEHYEEIEDYDYNNPNDTSNFCPGLQAADSDDEDLDDLFVGPVGNSDLSPYPCHPPKTAQQNGDTPEAQGLDITTYGESNLVAEPQKVNKIEIHYAKTAKKMDMKKLKQSMWSLLTALSGKEADAEANHREAGKEAALAEVADEKMLSGLTKDLQRSLPPVMAQNLSIPLAFACLLHLANEKNLKLEGTEDLSDVLVRQGD

SEQ ID NO: 57584 - protein, 216 aa, Homo sapiens
  Payload ID: 11298
  Gene Symbol: NCAPH
  Gene Name: non-SMC condensin I complex, subunit H
  ENSP ID: ENSP00000401227
MGPPGPALPATMNNSSSETRGHPHSASSPSERVFPMPLPRKAPLNIPGTPVLEDFPQNDDEKERLQRRRSRVFDLQFSTDSPRLLASPSSRSIDISATIPKFTNTQITEHYSTCIKLSTENIDPMFQKTAASFDECSTAGVFLSTLHCQDYRSELLFPSDVQTLSTGEPLELPELGCVEMTDLKAPLQQCAEDRQICPSLAGFQFTQWDSETHNEV

SEQ ID NO: 57585 - protein, 607 aa, Homo sapiens
  Payload ID: 11298
  Gene Symbol: NCAPH
  Gene Name: non-SMC condensin I complex, subunit H
  ENSP ID: ENSP00000405237
MGPPGPETRGHPHSASSPSERVFPMPLPRKAPLNIPGTPVLEDFPQNDDEKERLQRRRSRVFDLQFSTDSPRLLASPSSRSIDISATIPKFTNTQITEHYSTCIKLSTENKITTKNAFGLHLIDFMSEILKQKDTEPTNFKVAAGTLDASTKIYAVRVDAVHADVYRVLGGLGKDAPSLEEVEGHVADGSATEMGTTKKAVKPKKKHLHRTIEQNINNLNVSEADRKCEIDPMFQKTAASFDECSTAGVFLSTLHCQDYRSELLFPSDVQTLSTGEPLELPELGCVEMTDLKAPLQQCAEDRQICPSLAGFQFTQWDSETHNESVSALVDKFKKNDQVFDINAEVDESDCGDFPDGSLGDDFDANDEPDHTAVGDHEEFRSWKEPCQVQSCQEEMISLGDGDIRTMCPLLSMKPGEYSYFSPRTMSMWAGPDHWRFRPRRKQDAPSQSENKKKSTKKDFEIDFEDDIDFDVYFRKTKAATILTKSTLENQNWRATTLPTDFNYNVDTLVQLHLKPGTRLLKMAQGHRVETEHYEEIEDYDYNNPNDTSNFCPGLQAADSDDEDLDDLFVGPVGNSDLSPYPCHPPKTAQQNGDTPEAQGLDITTYGE

SEQ ID NO: 57586 - protein, 730 aa, Homo sapiens
  Payload ID: 11298
  Gene Symbol: NCAPH
  Gene Name: non-SMC condensin I complex, subunit H
  ENSP ID: ENSP00000407308
MNNSSSETRGHPHSASSPSERVFPMPLPRKAPLNIPGTPVLEDFPQNDDEKERLQRRRSRVFDLQFSTDSPRLLASPSSRSIDISATIPKFTNTQITEHYSTCIKLSTENKITTKNAFGLHLIDFMSEILKQKDTEPTNFKVAAGTLDASTKIYAVRVDAVHADVYRVLGGLGKDAPSLEEVEGHVADGSATEMGTTKKAVKPKKKHLHRTIEQNINNLNVSEADRKCEIDPMFQKTAASFDECSTAGVFLSTLHCQDYRSELLFPSDVQTLSTGEPLELPELGCVEMTDLKAPLQQCAEDRQICPSLAGFQFTQWDSETHNESVSALVDKFKKNDQVFDINAEVDESDCGDFPDGSLGDDFDANDEPDHTAVGDHEEFRSWKEPCQVQSCQEEMISLGDGDIRTMCPLLSMKPGEYSYFSPRTMSMWAGPDHWRFRPRRKQDAPSQSENKKKSTKKDFEIDFEDDIDFDVYFRKTKAATILTKSTLENQNWRATTLPTDFNYNVDTLVQLHLKPGTRLLKMAQGHRVETEHYEEIEDYDYNNPNDTSNFCPGLQAADSDDEDLDDLFVGPVGNSDLSPYPCHPPKTAQQNGDTPEAQGLDITTYGESNLVAEPQKVNKIEIHYAKTAKKMDMKKLKQSMWSLLTALSGKEADAEANHREAGKEAALAEVADEKMLSGLTKDLQRSLPPVMAQNLSIPLAFACLLHLANEKNLKLEGTEDLSDVLVRQGD

SEQ ID NO: 57587 - protein, 182 aa, Homo sapiens
  Payload ID: 11298
  Gene Symbol: NCAPH
  Gene Name: non-SMC condensin I complex, subunit H
  ENSP ID: ENSP00000415162
  MOD_RES (1)..(1): Any amino acid
XLLKMAQGHRVETEHYEEIEDYDYNNPNDTSNFCPGLQTAQQNGDTPEAQGLDITTYGESNLVAEPQKVNKIEIHYAKTAKKMDMKKLKQSMWSLLTALSGKEADAEANHREAGKEAALAEVADEKMLSGLTKDLQRSLPPVMAQNLSIPLAFACLLHLANEKNLKLEGTEDLSDVLVRQGD

SEQ ID NO: 57588 - protein, 75 aa, Homo sapiens
  Payload ID: 11299
  Gene Symbol: NCAPD3
  Gene Name: non-SMC condensin II complex, subunit D3
  ENSP ID: ENSP00000431413
MVALRGLGSGLQPWCPLDLRLEWVDTVWELDFTETEPLDPSIEAEIIETGLAAFTKLYESLLPFATGEHGSMEAV

SEQ ID NO: 57589 - protein, 35 aa, Homo sapiens
  Payload ID: 11299
  Gene Symbol: NCAPD3
  Gene Name: non-SMC condensin II complex, subunit D3
  ENSP ID: ENSP00000431436
MVALRGLGSGLQPWCPLDLRLEWVDTVWELDFTET

SEQ ID NO: 57590 - protein, 832 aa, Homo sapiens
  Payload ID: 11299
  Gene Symbol: NCAPD3
  Gene Name: non-SMC condensin II complex, subunit D3
  ENSP ID: ENSP00000431612
MVALRGLGSGLQPWCPLDLRLEWVDTVWELDFTETEPLDPSIEAEIIETGLAAFTKLYESLLPFATGEHGSMESIWTFFIENNVSHSTLVALFYHFVQIVHKKNVSVQYREYGLHAAGLYFLLLEVPGSVANQVFHPVMFDKCIQTLKKSWPQESNLNRKRKKEQPKSSQANPGRHRKRGKPPRREDIEMDEIIEEQEDENICFSARDLSQIRNAIFHLLKNFLRLLPKFSLKEKPQCVQNCIEVFVSLTNFEPVLHECHVTQARALNQAKYIPELAYYGLYLLCSPIHGEGDKVISCVFHQMLSVILMLEVGEGSHRAPLAVTSQVINCRNQAVQFISALVDELKESIFPVVRILLQHICAKVVDKSEYRTFAAQSLVQLLSKLPCGEYAMFIAWLYKYSRSSKIPHRVFTLDVVLALLELPEREVDNTLSLEHQKFLKHKFLVQEIMFDRCLDKAPTVRSKALSSFAHCLELTVTSASESILELLINSPTFSVIESHPGTLLRNSSAFSYQRQTSNRSEPSGEINIDSSGETVGSGERCVMAMLRRRIRDEKTNVRKSALQVLVSILKHCDVSGMKEDLWILQDQCRDPAVSVRKQALQSLTELLMAQPRCVQIQKAWLRGVVPVVMDCESTVQEKALEFLDQLLLQNIRHHSHFHSGDDSQVLAWALLTLLTTESQELSRYLNKAFHIWSKKEKFSPTFINNVISHTGTEHSAPAWMLLSKIAGSSPRLDYSRIIQSWEKISSQQNPNSNTLGHILCVIGHIAKHLPKSTRDKVTDAVKCKLNGFQWSLEVISSAVDALQRLCRASAETPAEEQHWLEKESCVQRAVRA

SEQ ID NO: 57591 - protein, 194 aa, Homo sapiens
  Payload ID: 11299
  Gene Symbol: NCAPD3
  Gene Name: non-SMC condensin II complex, subunit D3
  ENSP ID: ENSP00000432532
MAPQLWELHLLSGPEHFSEAHVFLSLCLSACFADGILPLDLDASELLSDTFEVLSSKEIKLLAMRSKPDKDLLMEEDDMALANVVMQEAQKKLISQVQKRNFIENIIPIIISLKTVLEKNKIPALRELMHYLREVMQDYRDELKDFFAVDKQLASELEYDMKKYQEQLVQEQELAKHADVAGTAGGAEVAPVAQ

SEQ ID NO: 57592 - protein, 1498 aa, Homo sapiens
  Payload ID: 11299
  Gene Symbol: NCAPD3
  Gene Name: non-SMC condensin II complex, subunit D3
  Uniprot ID: P42695
  ENSP ID: ENSP00000433681
MVALRGLGSGLQPWCPLDLRLEWVDTVWELDFTETEPLDPSIEAEIIETGLAAFTKLYESLLPFATGEHGSMESIWTFFIENNVSHSTLVALFYHFVQIVHKKNVSVQYREYGLHAAGLYFLLLEVPGSVANQVFHPVMFDKCIQTLKKSWPQESNLNRKRKKEQPKSSQANPGRHRKRGKPPRREDIEMDEIIEEQEDENICFSARDLSQIRNAIFHLLKNFLRLLPKFSLKEKPQCVQNCIEVFVSLTNFEPVLHECHVTQARALNQAKYIPELAYYGLYLLCSPIHGEGDKVISCVFHQMLSVILMLEVGEGSHRAPLAVTSQVINCRNQAVQFISALVDELKESIFPVVRILLQHICAKVVDKSEYRTFAAQSLVQLLSKLPCGEYAMFIAWLYKYSRSSKIPHRVFTLDVVLALLELPEREVDNTLSLEHQKFLKHKFLVQEIMFDRCLDKAPTVRSKALSSFAHCLELTVTSASESILELLINSPTFSVIESHPGTLLRNSSAFSYQRQTSNRSEPSGEINIDSSGETVGSGERCVMAMLRRRIRDEKTNVRKSALQVLVSILKHCDVSGMKEDLWILQDQCRDPAVSVRKQALQSLTELLMAQPRCVQIQKAWLRGVVPVVMDCESTVQEKALEFLDQLLLQNIRHHSHFHSGDDSQVLAWALLTLLTTESQELSRYLNKAFHIWSKKEKFSPTFINNVISHTGTEHSAPAWMLLSKIAGSSPRLDYSRIIQSWEKISSQQNPNSNTLGHILCVIGHIAKHLPKSTRDKVTDAVKCKLNGFQWSLEVISSAVDALQRLCRASAETPAEEQELLTQVCGDVLSTCEHRLSNIVLKENGTGNMDEDLLVKYIFTLGDIAQLCPARVEKRIFLLIQSVLASSADADHSPSSQGSSEAPASQPPPQVRGSVMPSVIRAHAIITLGKLCLQHEDLAKKSIPALVRELEVCEDVAVRNNVIIVMCDLCIRYTIMVDKYIPNISMCLKDSDPFIRKQTLILLTNLLQEEFVKWKGSLFFRFVSTLIDSHPDIASFGEFCLAHLLLKRNPVMFFQHFIECIFHFNNYEKHEKYNKFPQSEREKRLFSLKGKSNKERRMKIYKFLLEHFTDEQRFNITSKICLSILACFADGILPLDLDASELLSDTFEVLSSKEIKLLAMRSKPDKDLLMEEDDMALANVVMQEAQKKLISQVQKRNFIENIIPIIISLKTVLEKNKIPALRELMHYLREVMQDYRDELKDFFAVDKQLASELEYDMKKYQEQLVQEQELAKHADVAGTAGGAEVAPVAQVALCLETVPVPAGQENPAMSPAVSQPCTPRASAGHVAVSSPTPETGPLQRLLPKARPMSLSTIAILNSVKKAVESKSRHRSRSLGVLPFTLNSGSPEKTCSQVSSYSLEQESNGEIEHVTKRAISTPEKSISDVTFGAGVSYIGTPRTPSSAKEKIEGRSQGNDILCLSLPDKPPPQPQQWNVRSPARNKDTPACSRRSLRKTPLKTAN

SEQ ID NO: 57593 - protein, 1084 aa, Homo sapiens
  Payload ID: 11299
  Gene Symbol: NCAPD3
  Gene Name: non-SMC condensin II complex, subunit D3
  ENSP ID: ENSP00000434168
MVALRGLGSGLQPWCPLDLRLEWVDTVWELDFTETEPLDPSIEAEIIETGLAAFTKLYESLLPFATGEHGSMESIWTFFIENNVSHSTLVALFYHFVQIVHKKNVSVQYREYGLHAAGLYFLLLEVPGSVANQVFHPVMFDKCIQTLKKSWPQESNLNRKRKKEQPKSSQANPGRHRKRGKPPRREDIEMDEIIEEQEDENICFSARDLSQIRNAIFHLLKNFLRLLPKFSLKEKPQCVQNCIEVFVSLTNFEPVLHECHVTQARALNQAKYIPELAYYGLYLLCSPIHGEGDKVISCVFHQMLSVILMLEVGEGSHRAPLAVTSQVINCRNQAVQFISALVDELKESIFPVVRILLQHICAKVVDKSEYRTFAAQSLVQLLSKLPCGEYAMFIAWLYKYSRSSKIPHRVFTLDVVLALLELPEREVDNTLSLEHQKFLKHKFLVQEIMFDRCLDKAPTVRSKALSSFAHCLELTVTSASESILELLINSPTFSVIESHPGTLLRNSSAFSYQRQTSNRSEPSGEINIDSSGETVGSGERCVMAMLRRRIRDEKTNVRKSALQVLVSILKHCDVSGMKEDLWILQDQCRDPAVSVRKQALQSLTELLMAQPRCVQIQKAWLRGVVPVVMDCESTVQEKALEFLDQLLLQNIRHHSHFHSGDDSQVLAWALLTLLTTESQELSRYLNKAFHIWSKKEKFSPTFINNVISHTGTEHSAPAWMLLSKIAGSSPRLDYSRIIQSWEKISSQQNPNSNTLGHILCVIGHIAKHLPKSTRDKVTDAVKCKLNGFQWSLEVISSAVDALQRLCRASAETPAEEQELLTQVCGDVLSTCEHRLSNIVLKENGTGNMDEDLLVKYIFTLGDIAQLCPARVEKRIFLLIQSVLASSADADHSPSSQGSSEAPASQPPPQVRGSVMPSVIRAHAIITLGKLCLQHEDLAKKSIPALVRELEVCEDVAVRNNVIIVMCDLCIRYTIMVDKYIPNISMCLKDSDPFIRKQTLILLTNLLQEEFVKWKGSLFFRFVSTLIDSHPDIASFGEFCLAHLLLKRNPVMFFQHFIECIFHFNNYEKHEKYNKFPQSERALHR

SEQ ID NO: 57594 - protein, 264 aa, Homo sapiens
  Payload ID: 11299
  Gene Symbol: NCAPD3
  Gene Name: non-SMC condensin II complex, subunit D3
  ENSP ID: ENSP00000435173
MCDLCIRYTIMVDKYIPNISMCLKDSDPFIRKQTLILLTNLLQEEFVKWKGSLFFRFVSTLIDSHPDIASFGEFCLAHLLLKRNPVMFFQHFIECIFHFNNYEKHEKYNKFPQSEREKRLFSLKGKSNKERRMKIYKFLLEHFTDEQRFNITSKICLSILACFADGILPLDLDASELLSDTFEVLSSKEIKLLAMRSKPDKDLLMEEDDMALANVVMQEAQKKLISQVQKRNFIENIIPIIISLKTVLEKNKIPALRELMHYLR

SEQ ID NO: 57595 - protein, 37 aa, Homo sapiens
  Payload ID: 11299
  Gene Symbol: NCAPD3
  Gene Name: non-SMC condensin II complex, subunit D3
  ENSP ID: ENSP00000435586
MVALRGLGSGLQPWCPLDLRLGSTGCLTCRHHQTSHE

SEQ ID NO: 57596 - protein, 33 aa, Homo sapiens
  Payload ID: 11299
  Gene Symbol: NCAPD3
  Gene Name: non-SMC condensin II complex, subunit D3
  ENSP ID: ENSP00000435655
MVALRGLGSGLQPWCPLDLRLGSTGCLTCRHHQ

SEQ ID NO: 57597 - protein, 74 aa, Homo sapiens [sequence omitted]

SEQ ID NO: 57598 - protein, 1143 aa, Homo sapiens
  Payload ID: 11300
  Gene Symbol: NCAPG2
  Gene Name: non-SMC condensin II complex, subunit G2
  Uniprot ID: Q86XI2
  ENSP ID: ENSP00000348657
MEKRETFVQAVSKELVGEFLQFVQLDKEASDPFSLNELLDELSRKQKEELWQRLKNLLTDVLLESPVDGWQVVEAQGEDNMETEHGSKMRKSIEIIYAITSVILASVSVINESENYEALLECVIILNGILYALPESERKLQSSIQDLCVTWWEKGLPAKEDTGKTAFVMLLRRSLETKTGADVCRLWRIHQALYCFDYDLEESGEIKDMLLECFININYIKKEEGRRFLSCLFNWNINFIKMIHGTIKNQLQGLQKSLMVYIAEIYFRAWKKASGKILEAIENDCIQDFMFHGIHLPRRSPVHSKVREVLSYFHHQKKVRQGVEEMLYRLYKPILWRGLKARNSEVRSNAALLFVEAFPIRDPNLHAIEMDSEIQKQFEELYSLLEDPYPMVRSTGILGVCKITSKYWEMMPPTILIDLLKKVTGELAFDTSSADVRCSVFKCLPMILDNKLSHPLLEQLLPALRYSLHDNSEKVRVAFVDMLLKIKAVRAAKFWKICPMEHILVRLETDSRPVSRRLVSLIFNSFLPVNQPEEVWCERCVTLVQMNHAAARRFYQYAHEHTACTNIAKLIHVIRHCLNACIQRAVREPPEDEEEEDGREKENVTVLDKTLSVNDVACMAGLLEIIVILWKSIDRSMENNKEAKLYTINKFASVLPEYLKVFKDDRCKIPLFMLMSFMPASAVPPFSCGVISTLRSREEGAVDKSYCTLLDCLCSWGQVGHILELVDNWLPTEHAQAKSNTASKGRVQIHDTRPVKPELALVYIEYLLTHPKNRECLLSAPRKKLNHLLKALETSKADLESLLQTPGGKPRGFSEAAAPRAFGLHCRLSIHLQHKFCSEGKVYLSMLEDTGFWLESKILSFIQDQEEDYLKLHRVIYQQIIQTYLTVCKDVVMVGLGDHQFQMQLLQRSLGIMQTVKGFFYVSLLLDILKEITGSSLIQKTDSDEEVAMLLDTVQKVFQKMLECIARSFRKQPEEGLRLLYSVQRPLHEFITAVQSRHTDTPVHRGVLSTLIAGPVVEISHQLRKVSDVEELTPPEHLSDLPPFSRCLIGIIIKSSNVVRSFLDELKACVASNDIEGIVCLTAAVHIILVINAGKHKSSKVREVAATVHRKLKTFMEITLEEDSIERFLYESSSRTLGELLNS

SEQ ID NO: 57599 - protein, 1143 aa, Homo sapiens; identical to SEQ ID NO: 57598
  Payload ID: 11300
  Gene Symbol: NCAPG2
  Gene Name: non-SMC condensin II complex, subunit G2
  Uniprot ID: Q86XI2
  ENSP ID: ENSP00000386569

SEQ ID NO: 57600 - protein, 1156 aa, Homo sapiens
  Payload ID: 11300
  Gene Symbol: NCAPG2
  Gene Name: non-SMC condensin II complex, subunit G2
  Uniprot ID: Q86XI2
  ENSP ID: ENSP00000387007
MEKRETFVQAVSKELVGEFLQFVQLDKEASDPFSLNELLDELSRKQKEELWQRLKNLLTDVLLESPVDGWQVVEAQGEDNMETEHGSKMRKSIEIIYAITSVILASVSVINESENYEALLECVIILNGILYALPESERKLQSSIQDLCVTWWEKGLPAKEDTGKTAFVMLLRRSLETKTGADVCRLWRIHQALYCFDYDLEESGEIKDMLLECFININYIKKEEGRRFLSCLFNWNINFIKMIHGTIKNQLQGLQKSLMVYIAEIYFRAWKKASGKILEAIENDCIQDFMFHGIHLPRRSPVHSKVREVLSYFHHQKKVRQGVEEMLYRLYKPILWRGLKARNSEVRSNAALLFVEAFPIRDPNLHAIEMDSEIQKQFEELYSLLEDPYPMVRSTGILGVCKITSKYWEMMPPTILIDLLKKVTGELAFDTSSADVRCSVFKCLPMILDNKLSHPLLEQLLPALRYSLHDNSEKVRVAFVDMLLKIKAVRAAKFWKICPMEHILVRLETDSRPVSRRLVSLIFNSFLPVNQPEEVWCERCVTLVQMNHAAARRFYQYAHEHTACTNIAKLIHVIRHCLNACIQRAVREPPEDEEEEDGREKENVTVLDKTLSVNDVACMAGLLEIIVILWKSIDRSMENNKEAKLYTINKFASVLPEYLKVFKDDRCKIPLFMLMSFMPASAVPPFSCGVISTLRSREEGAVDKSYCTLLDCLCSWGQVGHILELVDNWLPTEHAQAKSNTASKGRVQIHDTRPVKPELALVYIEYLLTHPKNRECLLSAPRKKLNHLLKALETSKADLESLLQTPGGKPRGFSEAAAPRAFGLHCRLSIHLQHKFCSEGKVYLSMLEDTGFWLESKILSFIQDQEEDYLKLHRVIYQQIIQTYLTVCKDVVMVGLGDHQFQMQLLQRSLGIMQTVKGFFYVSLLLDILKEITGSSLIQKTDSDEEVAMLLDTVQKVFQKMLECIARSFRKQPEEGLRLLYSVQRPLHEFITAVQSRHTDTPVHRGVLSTLIAGPVVEISHQLRKVSDVEELTPPEHLSDLPPFSRCLIGIIIKSSNVVRSFLDELKACVASNDIEGIVCLTAAVHIILVINAGKHKSSKVREVAATVHRKLKTFMEITLEEDSIERYEDLLCCPGWALTPGLLDSIYPSASVPIG

SEQ ID NO: 57601 - protein, 898 aa, Homo sapiens
  Payload ID: 11300
  Gene Symbol: NCAPG2
  Gene Name: non-SMC condensin II complex, subunit G2
  ENSP ID: ENSP00000408080
  MOD_RES (1)..(1): Any amino acid
XLEESGEIKDMLLECFININYIKKEEGRRFLSCLFNWNINFIKMIHGTIKNQLQGLQKSLMVYIAEIYFRAWKKASGKILEAIENDCIQDFMFHGIHLPRRSPVHSKVREVLSYFHHQKKVRQGVEEMLYRLYKPILWRGLKARNSEVRSNAALLFVEAFPIRDPNLHAIEMDSEIQKQFEELYSLLEDPYPMVRSTGILGVCKITSKYWEMMPPTILIDLLKKVTGELAFDTSSADVRCSVFKCLPMILDNKLSHPLLEQLLPALRYSLHDNSEKVRVAFVDMLLKIKAVRAAKFWKICPMEHILVRLETDSRPVSRRLVSLIFNSFLPVNQPEEVWCERCVTLVQMNHAAARRFYQYAHEHTACTNIAKLIHVIRHCLNACIQRAVREPPEDEEEEDGREKENVTVLDKTLSVNDVACMAGLLEIIVILWKSIDRSMENNKEAKLYTINKFASVLPEYLKVFKDDRCKIPLFMLMSFMPASAVPPFSCGVISTLRSREEGAVDKSYCTLLDCLCSWGQVGHILELVDNWLPTEHAQAKSNTASKGRVQIHDTRPVKPELALVYIEYLLTHPKNRECLLSAPRKKLNHLLKALETSKADLESLLQTPGGKPRGFSEAAAPRAFGLHCRLSIHLQHKFCSEGKVYLSMLEDTGFWLESKILSFIQDQEEDYLKLHRVIYQQIIQTYLTVCKDVVMVGLGDHQFQMQLLQRSLGIMQTVKGFFYVSLLLDILKEITGSSLIQKTDSDEEVAMLLDTVQKVFQKMLECIARSFRKQPEEGLRVSDVEELTPPEHLSDLPPFSRCLIGIIIKSSNVVRSFLDELKACVASNDIEGIVCLTAAVHIILVINAGKHKSSKVREVAATVHRKLKTFMEITLEEDSIERFLYESSSRTLGELLNS

SEQ ID NO: 57602 - protein, 389 aa, Homo sapiens
  Payload ID: 11300
  Gene Symbol: NCAPG2
  Gene Name: non-SMC condensin II complex, subunit G2
  ENSP ID: ENSP00000414337
MEKRETFVQAVSKELVGEFLQFVQLDKEASDPFSLNELLDELSRKQKEELWQRLKNLLTDVLLESPVDGWQVVEAQGEDNMETEHGSKMRKSIEIIYAITSVILASVSVINESENYEALLECVIILNGILYALPESERKLQSSIQDLCVTWWEKGLPAKEDTGKTAFVMLLRRSLETKTGADVCRLWRIHQALYCFDYDLEESGEIKDMLLECFININYIKKEEGRRFLSCLFNWNINFIKMIHGTIKNQLQGLQKSLMVYIAEIYFRAWKKASGKILEAIENDCIQDFMFHGIHLPRRSPVHSKVREVLSYFHHQKKVRQGVEEMLYRLYKPILWRGLKARNSEVRSNAALLFVEAFPIRDPNLHAIEMDSEIQKQFEELYGSLVFVK

SEQ ID NO: 57603 - protein, 606 aa, Homo sapiens
  Payload ID: 11301
  Gene Symbol: NCAPH2
  Gene Name: non-SMC condensin II complex, subunit H2
  Uniprot ID: Q6IBW4
  ENSP ID: ENSP00000299821
MEDVEARFAHLLQPIRDLTKNWEVDVAAQLGEYLEELDQICISFDEGKTTMNFIEAALLIQGSACVYSKKVEYLYSLVYQALDFISGKRRAKQLSSVQEDRANGVASSGVPQEAENEFLSLDDFPDSRTNVDLKNDQTPSEVLIIPLLPMALVAPDEMEKNNNPLYSRQGEVLASRKDFRMNTCVPHPRGAFMLEPEGMSPMEPAGVSPMPGTQKDTGRTEEQPMEVSVCRSPVPALGFSQEPGPSPEGPMPLGGGEDEDAEEAVELPEASAPKAALEPKESRSPQQSAALPRRYMLREREGAPEPASCVKETPDPWQSLDPFDSLESKPFKKGRPYSVPPCVEEALGQKRKRKGAAKLQDFHQWYLAAYADHADSRRLRRKGPSFADMEVLYWTHVKEQLETLRKLQRREVAEQWLRPAEEDHLEDSLEDLGAAADDFLEPEEYMEPEGADPREAADLDAVPMSLSYEELVRRNVELFIATSQKFVQETELSQRIRDWEDTVQPLLQEQEQHVPFDIHTYGDQLVSRFPQLNEWCPFAELVAGQPAFEVCRSMLASLQLANDYTVEITQQPGLEMAVDTMSLRLLTHQRAHKRFQTYAAPSMAQP

SEQ ID NO: 57604 - protein, 299 aa, Homo sapiens
  Payload ID: 11301
  Gene Symbol: NCAPH2
  Gene Name: non-SMC condensin II complex, subunit H2
  Uniprot ID: Q6IBW4
  ENSP ID: ENSP00000379050
MEDVEARFAHLLQPIRDLTKNWEVDVAAQLGEYLEELDQICISFDEGKTTMNFIEAALLIQGSACVYSKKVEYLYSLVYQALDFISGKRRAKQLSSVQEDRANGVASSGVPQEAENEFLSLDDFPDSRTNVDLKNDQTPSEVLIIPLLPMALVAPDEMEKNNNPLYSRQGEVLASRKDFRMNTCVPHPRGAFMLEPEGMSPMEPAGVSPMPGTQKDTGRTEEQPMEVSVCRSPVPALGFSQEPGPSPEGPMPLGGGEDEDAEEAVELPEASAPKAALEPKESRSPQQVGPTWRPAEPEL

SEQ ID NO: 57605 - protein, 589 aa, Homo sapiens
  Payload ID: 11301
  Gene Symbol: NCAPH2
  Gene Name: non-SMC condensin II complex, subunit H2
  ENSP ID: ENSP00000379053
MEDVEARFAHLLQPIRDLTKNWEVDVAAQLGEYLEELDQICISFDEGKTTMNFIEAALLIQGSACVYSKKVEYLYSLVYQALDFISGKRRAKQLSSVQEDRANGVASSGVPQEAENEFLSLDDFPDSRTNVDLKNDQTPSEVLIIPLLPMALVAPDEMEKNNNPLYSRQGEVLASRKDFRMNTCVPHPRGAFMLEPEGMSPMEPAGVSPMPGTQKDTGRTEEQPMEVSVCRSPVPALGFSQEPGPSPEGPMPLGGGEDEDAEEAVELPEASAPKAALEPKESRSPQQSAALPRRYMLREREGAPEPASCVKETPDPWQSLDPFDSLESKPFKKGRPYSVPPCVEEALGQKRKRKGAAKLQDFHQWYLAAYADHADSRRLRRKGPSFADMEVLYWTHVKEQLETLRKLQRREVAEQWLRPAEEDHLEDSLEDLGAADDFLEPEEYMEPEGADPREAADLDAVPMSLSYEELVRRNVELFIATSQKFVQETELSQRIRDWEDTVQPLLQEQEQHVPFDIHTYGDQLVSRFPQLNEWCPFAELVAGQPAFEVCRSMLASLQLVSSLGYVGGGDGPQTLLMCHPCRPMTTQWR

SEQ ID NO: 57606 - protein, 605 aa, Homo sapiens
  Payload ID: 11301
  Gene Symbol: NCAPH2
  Gene Name: non-SMC condensin II complex, subunit H2
  Uniprot ID: Q6IBW4
  ENSP ID: ENSP00000410088
MEDVEARFAHLLQPIRDLTKNWEVDVAAQLGEYLEELDQICISFDEGKTTMNFIEAALLIQGSACVYSKKVEYLYSLVYQALDFISGKRRAKQLSSVQEDRANGVASSGVPQEAENEFLSLDDFPDSRTNVDLKNDQTPSEVLIIPLLPMALVAPDEMEKNNNPLYSRQGEVLASRKDFRMNTCVPHPRGAFMLEPEGMSPMEPAGVSPMPGTQKDTGRTEEQPMEVSVCRSPVPALGFSQEPGPSPEGPMPLGGGEDEDAEEAVELPEASAPKAALEPKESRSPQQSAALPRRYMLREREGAPEPASCVKETPDPWQSLDPFDSLESKPFKKGRPYSVPPCVEEALGQKRKRKGAAKLQDFHQWYLAAYADHADSRRLRRKGPSFADMEVLYWTHVKEQLETLRKLQRREVAEQWLRPAEEDHLEDSLEDLGAADDFLEPEEYMEPEGADPREAADLDAVPMSLSYEELVRRNVELFIATSQKFVQETELSQRIRDWEDTVQPLLQEQEQHVPFDIHTYGDQLVSRFPQLNEWCPFAELVAGQPAFEVCRSMLASLQLANDYTVEITQQPGLEMAVDTMSLRLLTHQRAHKRFQTYAAPSMAQP

SEQ ID NO: 57607 - protein, 62 aa, Homo sapiens
  Payload ID: 11301
  Gene Symbol: NCAPH2
  Gene Name: non-SMC condensin II complex, subunit H2
  ENSP ID: ENSP00000410480
MEDVEARFAHLLQPIRDLTKNWEVDVAAQLGEYLEECHLLRRNTGDEPALGKMLAGSDLHFF

SEQ ID NO: 57608 - protein, 292 aa, Homo sapiens
  Payload ID: 11301
  Gene Symbol: NCAPH2
  Gene Name: non-SMC condensin II complex, subunit H2
  ENSP ID: ENSP00000429025
MEDVEARFAHLLQPIRDLTKNWEVDVAAQLGEYLEEVEYLYSLVYQALDFISGKRRAKQLSSVQEDRANGVASSGVPQEAENEFLSLDDFPDSRTNVDLKNDQTPSEVLIIPLLPMALVAPDEMEKNNNPLYSRQGEVLASRKDFRMNTCVPHPRGAFMLEPEGMSPMEPAGVSPMPGTQKDTGRTEEQPMEVSVCRSPVPALGFSQEPGPSPEGPMPLGGGEDEDAEEAVELPEASAPKAALEPKESRSPQQSAALPRRYMLREREGAPEPASCVKETPDPWQSLDPFDSL

SEQ ID NO: 57609 - protein, 38 aa, Homo sapiens
  Payload ID: 11301
  Gene Symbol: NCAPH2
  Gene Name: non-SMC condensin II complex, subunit H2
  ENSP ID: ENSP00000429060
MEDVEARFAHLLQPIRDLTKNWEVDVAAQLAGSDLHFF

SEQ ID NO: 57610 - protein, 141 aa, Homo sapiens
  Payload ID: 11301
  Gene Symbol: NCAPH2
  Gene Name: non-SMC condensin II complex, subunit H2
  ENSP ID: ENSP00000430944
  MOD_RES (1)..(1): Any amino acid
XMEPEGADPREAADLDAVPMSLSYEELVRRNVELFIATSQKFVQETELSQRIRDWEDTVQPLLQEQLNEWCPFAELVAGQPAFEVCRSMLASLQLANDYTVEITQQPGLEMAVDTMSLRLLTHQRAHKRFQTYAAPSMAQP

SEQ ID NO: 57611 - protein, 275 aa, Homo sapiens
  Payload ID: 11302
  Gene Symbol: NCCRP1
  Gene Name: non-specific cytotoxic cell receptor protein 1 homolog (zebrafish)
  Uniprot ID: Q6ZVX7
  ENSP ID: ENSP00000342137
MEEVREGHALGGGMEADGPASLQELPPSPRSPSPPPSPPPLPSPPSLPSPAAPEAPELPEPAQPSEAHARQLLLEEWGPLSGGLELPQRLTWKLLLLRRPLYRNLLRSPNPEGINIYEPAPPTGPTQRPLETLGNFRGWYIRTEKLQQNQSWTVKQQCVDLLAEGLWEELLDDEQPAITVMDWFEDSRLDACVYELHVWLLAADRRTVIAQHHVAPRTSGRGPPGRWVQVSHVFRHYGPGVRFIHFLHKAKNRMEPGGLRRTRVTDSSVSVQLRE

SEQ ID NO: 57612 - protein, 64 aa, Homo sapiens
  Payload ID: 11303
  Gene Symbol: NOP10
  Gene Name: NOP10 ribonucleoprotein
  Uniprot ID: Q9NPE3
  ENSP ID: ENSP00000332198
MFLQYYLNEQGDRVYTLKKFDPMGQQTCSAHPARFSPDDKYSRHRITIKKRFKVLMTQQPRPVL

SEQ ID NO: 57613 - protein, 36 aa, Homo sapiens
  Payload ID: 11303
  Gene Symbol: NOP10
  Gene Name: NOP10 ribonucleoprotein
  ENSP ID: ENSP00000453475
MFLQYYLNEQGDRVYTLKMTNTLDTESPSRNASRCS

SEQ ID NO: 57614 - protein, 857 aa, Homo sapiens
  Payload ID: 11304
  Gene Symbol: NOP14
  Gene Name: NOP14 nucleolar protein
  Uniprot ID: P78316
  ENSP ID: ENSP00000315674
MAKAKKVGARRKASGAPAGARGGPAKANSNPFEVKVNRQKFQILGRKTRHDVGLPGVSRARALRKRTQTLLKEYKERDKSNVFRDKRFGEYNSNMSPEEKMMKRFALEQQRHHEKKSIYNLNEDEELTHYGQSLADIEKHNDIVDSDSDAEDRGTLSAELTAAHFGGGGGLLHKKTQQEGEEREKPKSRKELIEELIAKSKQEKRERQAQREDALELTEKLDQDWKEIQTLLSHKTPKSENRDKKEKPKPDAYDMMVRELGFEMKAQPSNRMKTEAELAKEEQEHLRKLEAERLRRMLGKDEDENVKKPKHMSADDLNDGFVLDKDDRRLLSYKDGKMNVEEDVQEEQSKEASDPESNEEEGDSSGGEDTEESDSPDSHLDLESNVESEEENEKPAKEQRQTPGKGLISGKERAGKATRDELPYTFAAPESYEELRSLLLGRSMEEQLLVVERIQKCNHPSLAEGNKAKLEKLFGFLLEYVGDLATDDPPDLTVIDKLVVHLYHLCQMFPESASDAIKFVLRDAMHEMEEMIETKGRAALPGLDVLIYLKITGLLFPTSDFWHPVVTPALVCLSQLLTKCPILSLQDVVKGLFVCCLFLEYVALSQRFIPELINFLLGILYIATPNKASQGSTLVHPFRALGKNSELLVVSAREDVATWQQSSLSLRWASRLRAPTSTEANHIRLSCLAVGLALLKRCVLMYGSLPSFHAIMGPLQALLTDHLADCSHPQELQELCQSTLTEMESQKQLCRPLTCEKSKPVPLKLFTPRLVKVLEFGRKQGSSKEEQERKRLIHKHKREFKGAVREIRKDNQFLARMQLSEIMERDAERKRKVKQLFNSLATQEGEWKALKRKKFKK

SEQ ID NO: 57615 - protein, 806 aa, Homo sapiens
  Payload ID: 11304
  Gene Symbol: NOP14
  Gene Name: NOP14 nucleolar protein
  Uniprot ID: P78316
  ENSP ID: ENSP00000381146
MAKAKKVGARRKASGAPAGARGGPAKANSNPFEVKVNRQKFQILGRKTRHDVGLPGVSRARALRKRTQTLLKEYKERDKSNVFRDKRFGEYNSNMSPEEKMMKRFALEQQRHHEKKSIYNLNEDEELTHYGQSLADIEKHNDIVDSDSDAEDRGTLSAELTAAHFGGGGGLLHKKTQQEGEEREKPKSRKELIEELIAKSKQEKRERQAQREDALELTEKLDQDWKEIQTLLSHKTPKSENRDKKEKPKPDAYDMMVRELGFEMKAQPSNRMKTEAELAKEEQEHLRKLEAERLRRMLGKDEDENVKKPKHMSADDLNDGFVLDKDDRRLLSYKDGKMNVEEDVQEEQSKEASDPESNEEEGDSSGGEDTEESDSPDSHLDLESNVESEEENEKPAKEQRQTPGKGLISGKERAGKATRDELPYTFAAPESYEELRSLLLGRSMEEQLLVVERIQKCNHPSLAEGNKAKLEKLFGFLLEYVGDLATDDPPDLTVIDKLVVHLYHLCQMFPESASDAIKFVLRDAMHEMEEMIETKGRAALPGLDVLIYLKITGLLFPTSDFWHPVVTPALVCLSQLLTKCPILSLQDVVKGLFVCCLFLEYVALSQRFIPELINFLLGILYIATPNKASQGSTLVHPFRALGKNSELLVVSAREDVATWQQSSLSLRWASRLRAPTSTEANHIRLSCLAVGLALLKRCVLMYGSLPSFHAIMGPLQALLTDHLADCSHPQELQELCQSTLTEMESQKQLCRPLTCEKSKPVPLKLFTPRLVSNSRPQVIHLPWPPNYRCEPQHPAKKVIFFRVIML

SEQ ID NO: 57616 - protein, 857 aa, Homo sapiens; identical to SEQ ID NO: 57614
  Payload ID: 11304
  Gene Symbol: NOP14
  Gene Name: NOP14 nucleolar protein
  Uniprot ID: P78316
  ENSP ID: ENSP00000405068

SEQ ID NO: 57617 - protein, 788 aa, Homo sapiens
  Payload ID: 11304
  Gene Symbol: NOP14
  Gene Name: NOP14 nucleolar protein
  ENSP ID: ENSP00000427415
MAKAKKVGARRKASGAPAGARGGPAKANSNPFEVKVNRQKFQILGRKTRHDVGLPGVSRARALRKRTQTLLKEYKERDKSNVFRDKRFGEYNSNMSPEEKMMKRFALEQQRHHEKKSIYNLNEDEELTHYGQSLADIEKHNDIVDSDSDAEDRGTLSAELTAAHFGGGGGLLHKKTQQEGEEREKPKSRKELIEELIAKSKQEKRERQAQREDALELTEKLDQDWKEIQTLLSHKTPKSENRDKKEKPKPDAYDMMVRELGFEMKAQPSNRMKTEAELAKEEQEHLRKLEAERLRRMLGKDEDENVKKPKHMSADDLNDGFVLDKDDRRLLSYKDGKMNVEEDVQEEQSKEASDPESNEEEGDSSGGEDTEESDSPDSHLDLESNVESEEENEKPAKEQRQTPGKGLISGKERAGKATRDELPYTFAAPESYEELRSLLLGRSMEEQLLVVERIQKCNHPSLAEGNKAKLEKLFGFLLEYVGDLATDDPPDLTVIDKLVVHLYHLCQMFPESASDAIKFVLRDAMHEMEEMIETKGRAALPGLDVLIYLKITGLLFPTSDFWHPVVTPALVCLSQLLTKCPILSLQDVVKGLFVCCLFLEYVALSQRFIPELINFLLGILYIATPNKASQGSTLVHPFRALGKNSELLVVSAREDVATWQQSSLSLRWASRLRAPTSTEANHIRLSCLAVGLALLKRCVLMYGSLPSFHAIMGPLQALLTDHLADCSHPQELQELCQSTLTEMESQKQLCRPLTCEKSKPVPLKLFTPRLAGLEFPTSGNPPALAPQL

SEQ ID NO: 57618 - protein, 95 aa, Homo sapiens
  Payload ID: 11305
  Gene Symbol: NOP16
  Gene Name: NOP16 nucleolar protein
  ENSP ID: ENSP00000423835
MPKAKGKTRRQKFGYSVNRKRLNRNARRKAAPRIECSHIRHAWDHAKSVRQNLAEMGLAVDPNRAVPLRKRKILLVSRALFSAGEGHGGGHRGEA

SEQ ID NO: 57619 - protein, 150 aa, Homo sapiens
  Payload ID: 11305
  Gene Symbol: NOP16
  Gene Name: NOP16 nucleolar protein
  ENSP ID: ENSP00000427489
MPKAKGKTRRQKFGYSVNRKRLNRNARRKAAPRIECSHIRHAWDHAKSVRQNLAEMGLAVDPNRAVPLRKRKVKAMEVDIEERPKELVRKPYVLNDLEAEASLPEKKGNTLSRDLIDYVRYMVENHGEDYKVSGSGPVGWLGRRPGPFAA

SEQ ID NO: 57620 - protein, 70 aa, Homo sapiens
  Payload ID: 11305
  Gene Symbol: NOP16
  Gene Name: NOP16 nucleolar protein
  ENSP ID: ENSP00000478283
MPKAKGKTRRQKFGYSVNRKRLNRNARRKAAPRIECRVARLPRFFAEEEDGGGVTGLHHSCPRLRRPPDQ

SEQ ID NO: 57621 - protein, 231 aa, Homo sapiens
  Payload ID: 11305
  Gene Symbol: NOP16
  Gene Name: NOP16 nucleolar protein
  ENSP ID: ENSP00000479445
MPKAKGKTRRQKFGYSVNRKRLNRNARRKAAPRIECSHIRHAWDHAKSVRQNLAEMGLAVDPNRAVPLRKRKVKAMEVDIEERPKELVRKPYVLNDLEAEASLPEKKGNTLSRDLIDYVRYMVENHGEDYKSGKTSSILCRRGRWRWSDWFTSQLPQAEASPGPVKLEPGCKARRCCVAPEELARSHGIRRLHTHVHTPRSGEGTVLRGSNLYSSGGSRKSQNLLFSGWVM

SEQ ID NO: 57622 - protein, 178 aa, Homo sapiens
  Payload ID: 11305
  Gene Symbol: NOP16
  Gene Name: NOP16 nucleolar protein
  Uniprot ID: Q9Y3C1
  ENSP ID: ENSP00000480832
MPKAKGKTRRQKFGYSVNRKRLNRNARRKAAPRIECSHIRHAWDHAKSVRQNLAEMGLAVDPNRAVPLRKRKVKAMEVDIEERPKELVRKPYVLNDLEAEASLPEKKGNTLSRDLIDYVRYMVENHGEDYKAMARDEKNYYQDTPKQIRSKINVYKRFYPAEWQDFLDSLQKRKMEVE

SEQ ID NO: 57623 - protein, 232 aa, Homo sapiens
  Payload ID: 11305
  Gene Symbol: NOP16
  Gene Name: NOP16 nucleolar protein
  Uniprot ID: Q9Y3C1
  ENSP ID: ENSP00000483001
MPKAKGKTRRQKFGYSVNRKRLNRNARRKAAPRIECSHIRHAWDHAKSVRQNLAEMGLAVDPNRAVPLRKRKVKAMEVDIEERPKELVRKPYVLNDLEAEASLPEKKGNTLSRDLIDYVRYMVENHGEDYKQSGKTSSILCRRGRWRWSDWFTSQLPQAEASPGPVKLEPGCKARRCCVAPEELARSHGIRRLHTHVHTPRSGEGTVLRGSNLYSSGGSRKSQNLLFSGWVM

SEQ ID NO: 57624 - protein, 236 aa, Homo sapiens
  Payload ID: 11305
  Gene Symbol: NOP16
  Gene Name: NOP16 nucleolar protein
  ENSP ID: ENSP00000484440
MLDGRQRRGSNAPTSDMPGTTLNRYGRTWPRWGWLWTPTGGALRKRKVKAMEVDIEERPKELVRKPYVLNDLEAEASLPEKKGNTLSRDLIDYVRYMVENHGEDYKAMAVMRRITIKIPQNRFGVRSTSINAFTQQSGKTSSILCRRGRWRWSDWFTSQLPQAEASPGPVKLEPGCKARRCCVAPEELARSHGIRRLHTHVHTPRSGEGTVLRGSNLYSSGGSRKSQNLLFSGWVM

SEQ ID NO: 57625 - protein, 237 aa, Homo sapiens
  Payload ID: 11305
  Gene Symbol: NOP16
  Gene Name: NOP16 nucleolar protein
  ENSP ID: ENSP00000484969
MPKAKGKTRRQKFGYSVNRKRLNRNARRKAAPRIECSHIRHAWDHAKSVRQNLAEMGLAVDPNRAVPLRKRKVKAMEVDIEERPKELVRKPYVLNDLEAEASLPEKKGNTLSRDLIDYVRYMVENHGEDYKQSGKTSSILCRRGRWRWSDWFTSQLPQAEASPGPVKLEPGCKARRCCVAPEELARSHGIRRLHTRAHSPLWGRNCSQRLQFIFIWGFTEKPEPAVFRVGDVNIVCT

SEQ ID NO: 57626 - protein, 812 aa, Homo sapiens
  Payload ID: 11306
  Gene Symbol: NOP2
  Gene Name: NOP2 nucleolar protein
  Uniprot ID: P46087
  ENSP ID: ENSP00000313272
MGRKLDPTKEKRGPGRKARKQKGAETELVRFLPAVSDENSKRLSSRARKRAAKRRLGSVEAPKTNKSPEAKPLPGKLPKGISAGAVQTAGKKGPQSLFNAPRGKKRPAPGSDEEEEEEDSEEDGMVNHGDLWGSEDDADTVDDYGADSNSEDEEEGEALLPIERAARKQKAREAAAGIQWSEEETEDEEEEKEVTPESGPPKVEEADGGLQINVDEEPFVLPPAGEMEQDAQAPDLQRVHKRIQDIVGILRDFGAQREEGRSRSEYLNRLKKDLAIYYSYGDFLLGKLMDLFPLSELVEFLEANEVPRPVTLRTNTLKTRRRDLAQALINRGVNLDPLGKWSKTGLVVYDSSVPIGATPEYLAGHYMLQGASSMLPVMALAPQEHERILDMCCAPGGKTSYMAQLMKNTGVILANDANAERLKSVVGNLHRLGVTNTIISHYDGRQFPKVVGGFDRVLLDAPCSGTGVISKDPAVKTNKDEKDILRCAHLQKELLLSAIDSVNATSKTGGYLVYCTCSITVEENEWVVDYALKKRNVRLVPTGLDFGQEGFTRFRERRFHPSLRSTRRFYPHTHNMDGFFIAKFKKFSNSIPQSQTGNSETATPTNVDLPQVIPKSENSSQPAKKAKGAAKTKQQLQKQQHPKKASFQKLNGISKGADSELSTVPSVTKTQASSSFQDSSQPAGKAEGIREPKVTGKLKQRSPKLQSSKKVAFLRQNAPPKGTDTQTPAVLSPSKTQATLKPKDHHQPLGRAKGVEKQQLPEQPFEKAAFQKQNDTPKGPQPPTVSPIRSSRPPPAKRKKSQSRGNSQLLLS

SEQ ID NO: 57627 - protein, 845 aa, Homo sapiens
  Payload ID: 11306
  Gene Symbol: NOP2
  Gene Name: NOP2 nucleolar protein
  Uniprot ID: P46087
  ENSP ID: ENSP00000371858
MGRKLDPTKEKRGPGRKARKQKGAETELVRFLPAVSDENSKRLSSRARKRAAKRRLGSVEAPKTNKSPEAKPLPGKLPKGISAGAVQTAGKKGPQSLFNAPRGKKRPAPGSDEEEEEEDSEEDGMVNHGDLWGSEDDADTVDDYGADSNSEDEEEGEAAGVQWLGLGSLQPPPPGFKQFSCLSFPSSWDLQLLPIERAARKQKAREAAAGIQWSEEETEDEEEEKEVTPESGPPKVEEADGGLQINVDEEPFVLPPAGEMEQDAQAPDLQRVHKRIQDIVGILRDFGAQREEGRSRSEYLNRLKKDLAIYYSYGDFLLGKLMDLFPLSELVEFLEANEVPRPVTLRTNTLKTRRRDLAQALINRGVNLDPLGKWSKTGLVVYDSSVPIGATPEYLAGHYMLQGASSMLPVMALAPQEHERILDMCCAPGGKTSYMAQLMKNTGVILANDANAERLKSVVGNLHRLGVTNTIISHYDGRQFPKVVGGFDRVLLDAPCSGTGVISKDPAVKTNKDEKDILRCAHLQKELLLSAIDSVNATSKTGGYLVYCTCSITVEENEWVVDYALKKRNVRLVPTGLDFGQEGFTRFRERRFHPSLRSTRRFYPHTHNMDGFFIAKFKKFSNSIPQSQTGNSETATPTNVDLPQVIPKSENSSQPAKKAKGAAKTKQQLQKQQHPKKASFQKLNGISKGADSELSTVPSVTKTQASSSFQDSSQPAGKAEGIREPKVTGKLKQRSPKLQSSKKVAFLRQNAPPKGTDTQTPAVLSPSKTQATLKPKDHHQPLGRAKGVEKQQLPEQPFEKAAFQKQNDTPKGPQPPTVSPIRSSRPPPAKRKKSQSRGNSQLLLS

SEQ ID NO: 57628 - protein, 808 aa, Homo sapiens
  Payload ID: 11306
  Gene Symbol: NOP2
  Gene Name: NOP2 nucleolar protein
  Uniprot ID: P46087
  ENSP ID: ENSP00000382392
MGRKLDPTKEKRGPGRKARKQKGAETELVRFLPAVSDENSKRLSSRARKRAAKRRLGSVEAPKTNKSPEAKPLPGKLPKGAVQTAGKKGPQSLFNAPRGKKRPAPGSDEEEEEEDSEEDGMVNHGDLWGSEDDADTVDDYGADSNSEDEEEGEALLPIERAARKQKAREAAAGIQWSEEETEDEEEEKEVTPESGPPKVEEADGGLQINVDEEPFVLPPAGEMEQDAQAPDLQRVHKRIQDIVGILRDFGAQREEGRSRSEYLNRLKKDLAIYYSYGDFLLGKLMDLFPLSELVEFLEANEVPRPVTLRTNTLKTRRRDLAQALINRGVNLDPLGKWSKTGLVVYDSSVPIGATPEYLAGHYMLQGASSMLPVMALAPQEHERILDMCCAPGGKTSYMAQLMKNTGVILANDANAERLKSVVGNLHRLGVTNTIISHYDGRQFPKVVGGFDRVLLDAPCSGTGVISKDPAVKTNKDEKDILRCAHLQKELLLSAIDSVNATSKTGGYLVYCTCSITVEENEWVVDYALKKRNVRLVPTGLDFGQEGFTRFRERRFHPSLRSTRRFYPHTHNMDGFFIAKFKKFSNSIPQSQTGNSETATPTNVDLPQVIPKSENSSQPAKKAKGAAKTKQQLQKQQHPKKASFQKLNGISKGADSELSTVPSVTKTQASSSFQDSSQPAGKAEGIREPKVTGKLKQRSPKLQSSKKVAFLRQNAPPKGTDTQTPAVLSPSKTQATLKPKDHHQPLGRAKGVEKQQLPEQPFEKAAFQKQNDTPKGPQPPTVSPIRSSRPPPAKRKKSQSRGNSQLLLS

SEQ ID NO: 57629 - protein, 628 aa, Homo sapiens
  Payload ID: 11306
  Gene Symbol: NOP2
  Gene Name: NOP2 nucleolar protein
  Uniprot ID: P46087
  ENSP ID: ENSP00000439422
MGRKLDPTKEKRGPGRKARKQKGAETELVRFLPAVSDENSKRLSSRARKRAAKRRLGSVEAPKTNKSPEAKPLPGKLPKGAVQTAGKKGPQSLFNAPRGKKRPAPGSDEEEEEEDSEEDGMVNHGDLWGSEDDADTVDDYGADSNSEDEEEGEALLPIERAARKQKAREAAAGIQWSEEETEDEEEEKEVTPESGPPKVEEADGGLQINVDEEPFVLPPAGEMEQDAQAPDLQRVHKRIQDIVGILRDFGAQREEGRSRSEYLNRLKKDLAIYYSYGDFLLGKLMDLFPLSELVEFLEANEVPRPVTLRTNTLKTRRRDLAQALINRGVNLDPLGKWSKTGLVVYDSSVPIGATPEYLAGHYMLQGASSMLPVMALAPQEHERILDMCCAPGGKTSYMAQLMKNTGVILANDANAERLKSVVGNLHRLGVTNTIISHYDGRQFPKVVGGFDRVLLDAPCSGTGVISKDPAVKTNKDEKDILRCAHLQKELLLSAIDSVNATSKTGGYLVYCTCSITVEENEWVVDYALKKRNVRLVPTGLDFGQEGFTRFRERRFHPSLRSTRRFYPHTHNMDGFFIAKFKKFSNSIPQSQTDGVLLCRSGWTAVVQSQLIATSTFQVQAILVPQTPK

SEQ ID NO: 57630 - protein, 275 aa, Homo sapiens
  Payload ID: 11306
  Gene Symbol: NOP2
  Gene Name: NOP2 nucleolar protein
  ENSP ID: ENSP00000440754
MVNHGDLWGSEDDADTVDDYGADSNSEDEEEGEALLPIERAARKQKAREAAAGIQWSEEETEDEEEEKEVTPESGPPKVEEADGGLQINVDEEPFVLPPAGEMEQDAQAPDLQRVHKRIQDIVGILRDFGAQREEGRSRSEYLNRLKKDLAIYYSYGDFLLGKLMDLFPLSELVEFLEANEVPRPVTLRTNTLKTRRRDLAQALINRGVNLDPLGKWSKTGLVVYDSSVPIGATPEYLAGHYMLQGASSMLPVMALAPQEHERILDMCCAPGGKT

SEQ ID NO: 57631 - protein, 159 aa, Homo sapiens
  Payload ID: 11306
  Gene Symbol: NOP2
  Gene Name: NOP2 nucleolar protein
  ENSP ID: ENSP00000441923
MGRKLDPTKEKRGPGRKARKQKGAETELVRFLPAVSDENSKRLSSRARKRAAKRRLGSVEAPKTNKSPEAKPLPGKLPKGISAGAVQTAGKKGPQSLFNAPRGKKRPAPGSDEEEEEEDSEEDGMVNHGDLWGSEDDADTVDDYGADSNSEDEEEGEAV

SEQ ID NO: 57632 - protein, 81 aa, Homo sapiens
  Payload ID: 11306
  Gene Symbol: NOP2
  Gene Name: NOP2 nucleolar protein
  ENSP ID: ENSP00000442742
MGRKLDPTKEKRGPGRKARKQKGAETELVRFLPAVSDENSKRLSSRARKRAAKRRLGSVEAPKTNKSPEAKPLPGKLPKGP

SEQ ID NO: 57633 - protein, 176 aa, Homo sapiens
  Payload ID: 11306
  Gene Symbol: NOP2
  Gene Name: NOP2 nucleolar protein
  ENSP ID: ENSP00000442895
MGRKLDPTKEKRGPGRKARKQKGAETELVRFLPAVSDENSKRLSSRARKRAAKRRLGSVEAPKTNKSPEAKPLPGKLPKGISAGAVQTAGKKGPQSLFNAPRGKKRPAPGSDEEEEEEDSEEDGMVNHGDLWGSEDDADTVDDYGADSNSEDEEEGEALLPIERAARKQKAREAAA

SEQ ID NO: 57634 - protein, 250 aa, Homo sapiens
  Payload ID: 11306
  Gene Symbol: NOP2
  Gene Name: NOP2 nucleolar protein
  ENSP ID: ENSP00000443035
MGRKLDPTKEKRGPGRKARKQKGAETELVRFLPAVSDENSKRLSSRARKRAAKRRLGSVEAPKTNKSPEAKPLPGKLPKGAVQTAGKKGPQSLFNAPRGKKRPAPGSDEEEEEEDSEEDGMVNHGDLWGSEDDADTVDDYGADSNSEDEEEGEALLPIERAARKQKAREAAAGIQWSEEETEDEEEEKEVTPESGPPKVEEADGGLQINVDEEPFVLPPAGEMEQDAQAPDLQRVHKRIQDIVGILRDFG

SEQ ID NO: 57635 - protein, 808 aa, Homo sapiens; identical to SEQ ID NO: 57628
  Payload ID: 11306
  Gene Symbol: NOP2
  Gene Name: NOP2 nucleolar protein
  Uniprot ID: P46087
  ENSP ID: ENSP00000443150

SEQ ID NO: 57636 - protein, 98 aa, Homo sapiens
  Payload ID: 11306
  Gene Symbol: NOP2
  Gene Name: NOP2 nucleolar protein
  ENSP ID: ENSP00000443585
MGRKLDPTKEKRGPGRKARKQKGAETELVRFLPAVSDENSKRPNHCLESYQKGSLQELSRQLVRRDPSPYLMLLEARSAQHLAVMRKRRRKTLKKMVW

SEQ ID NO: 57637 - protein, 812 aa, Homo sapiens; identical to SEQ ID NO: 57626
  Payload ID: 11306
  Gene Symbol: NOP2
  Gene Name: NOP2 nucleolar protein
  Uniprot ID: P46087
  ENSP ID: ENSP00000444437

SEQ ID NO: 57638 - protein, 81 aa, Homo sapiens; identical to SEQ ID NO: 57632
  Payload ID: 11306
  Gene Symbol: NOP2
  Gene Name: NOP2 nucleolar protein
  ENSP ID: ENSP00000445402

SEQ ID NO: 57639 - protein, 855 aa, Homo sapiens
  Payload ID: 11306
  Gene Symbol: NOP2
  Gene Name: NOP2 nucleolar protein
  ENSP ID: ENSP00000479236
MGRKLDPTKEKRGPGRKARKQKGAETELVRFLPAVSDENSKRLSSRARKRAAKRRLGSVEAPKTNKSPEAKPLPGKLPKGISAGAVQTAGKKGPQSLFNAPRGKKRPAPGSDEEEEEEDSEEDGMVNHGDLWGSEDDADTVDDYGADSNSEDEEEGEALLPIERAARKQKAREAAAGIQWSEEETEDEEEEKEVTPESGPPKVEEADGGLQINVDEEPFVLPPAGEMEQDAQAPDLQRVHKRIQDIVGILRDFGAQREEGRSRSEYLNRLKKDLAIYYSYGDFLLGKLMDLFPLSELVEFLEANEVPRPVTLRTNTLKTRRRDLAQALINRGVNLDPLGKWSKTGLVVYDSSVPIGATPEYLAGHYMLQGASSMLPVMALAPQEHERILDMCCAPGGKTSYMAQLMKNTGVILANDANAERLKSVVGNLHRLGVTNTIISHYDGRQFPKVVGGFDRVLLDAPCSGTGVISKDPAVKTNKDEKDILRCAHLQKELLLSAIDSVNATSKTGGYLVYCTCSITVEENEWVVDYALKKRNVRLVPTGLDFGQEGFTRFRERRFHPSLRSTRRFYPHTHNMDGFFIAKFKKFSNSIPQSQTGNSETATPTNVDLPQVIPKSENSSQPAKKAKGAAKTKQQLQKQQHPKKASFQKLNGISKGADSELSTVPSVTKTQASSSFQDSSQPAGKAEGIREPKVTGKLKQRSPKLQSSKKVAFLRQNAPPKGTDTQTPAVLSPSKTQATLKPKDHHQPLGRAKGVEKQQLPEQPFEKAAFQKQNDTPKGLSLPLCLPSVPAAPHQQRGRNLSPGATASCCYLRWLKTRRVAHCHCHQVGTLASVRMPSLLCIPMKFNTHFKTSGH

SEQ ID NO: 57640 - protein, 845 aa, Homo sapiens; identical to SEQ ID NO: 57627
  Payload ID: 11306
  Gene Symbol: NOP2
  Gene Name: NOP2 nucleolar protein
  Uniprot ID: P46087
  ENSP ID: ENSP00000479320

SEQ ID NO: 57641 - protein, 628 aa, Homo sapiens; identical to SEQ ID NO: 57629
  Payload ID: 11306
  Gene Symbol: NOP2
  Gene Name: NOP2 nucleolar protein
  Uniprot ID: P46087
  ENSP ID: ENSP00000484384

SEQ ID NO: 57642 - protein, 340 aa, Homo sapiens
  Payload ID: 11307
  Gene Symbol: NSUN3
  Gene Name: NOP2/Sun domain family, member 3
  Uniprot ID: Q9H649
  ENSP ID: ENSP00000318986
MLTQLKAKSEGKLAKQICKVVLDHFEKQYSKELGDAWNTVREILTSPSCWQYAVLLNRFNYPFELEKDLHLKGYHTLSQGSLPNYPKSVKCYLSRTPGRIPSERHQIGNLKKYYLLNAASLLPVLALELRDGEKVLDLCAAPGGKSIALLQCACPGYLHCNEYDSLRLRWLRQTLESFIPQPLINVIKVSELDGRKMGDAQPEMFDKVLVDAPCSNDRSWLFSSDSQKASCRISQRRNLPLLQIELLRSAIKALRPGGILVYSTCTLSKAENQDVISEILNSHGNIMPMDIKGIARTCSHDFTFAPTGQECGLLVIPDKGKAWGPMYVAKLKKSWSTGKW

SEQ ID NO: 57643 - protein, 77 aa, Homo sapiens
  Payload ID: 11307
  Gene Symbol: NSUN3
  Gene Name: NOP2/Sun domain family, member 3
  ENSP ID: ENSP00000419297
MLTQLKAKSEGKLAKQICKVVLDHFEKQYSKELGDAWNTVSVGSGIKGWGEGSGSLCCSWREINSSAAVCLSRLSSL

SEQ ID NO: 57644 - protein, 384 aa, Homo sapiens
  Payload ID: 11308
  Gene Symbol: NSUN4
  Gene Name: NOP2/Sun domain family, member 4
  Uniprot ID: Q96CB9
  ENSP ID: ENSP00000419740
MAALTLRGVRELLKRVDLATVPRRHRYKKKWAATEPKFPAVRLALQNFDMTYSVQFGDLWPSIRVSLLSEQKYGALVNNFAAWDHVSAKLEQLSAKDFVNEAISHWELQSEGGQSAAPSPASWACSPNLRCFTFDRGDISRFPPARPGSLGVMEYYLMDAASLLPVLALGLQPGDIVLDLCAAPGGKTLALLQTGCCRNLAANDLSPSRIARLQKILHSYVPEEIRDGNQVRVTSWDGRKWGELEGDTYDRVLVDVPCTTDRHSLHEEENNIFKRSRKKERQILPVLQVQLLAAGLLATKPGGHVVYSTCSLSHLQNEYVVQGAIELLANQYSIQVQVEDLTHFRRVFMDTFCFFSSCQVGELVIPNLMANFGPMYFCKMRRLT

SEQ ID NO: 57645 - protein, 335 aa, Homo sapiens
  Payload ID: 11308
  Gene Symbol: NSUN4
  Gene Name: NOP2/Sun domain family, member 4
  Uniprot ID: Q96CB9
  ENSP ID: ENSP00000437758
MTYSVQFGDLWPSIRVSLLSEQKYGALVNNFAAWDHVSAKLEQLSAKDFVNEAISHWELQSEGGQSAAPSPASWACSPNLRCFTFDRGDISRFPPARPGSLGVMEYYLMDAASLLPVLALGLQPGDIVLDLCAAPGGKTLALLQTGCCRNLAANDLSPSRIARLQKILHSYVPEEIRDGNQVRVTSWDGRKWGELEGDTYDRVLVDVPCTTDRHSLHEEENNIFKRSRKKERQILPVLQVQLLAAGLLATKPGGHVVYSTCSLSHLQNEYVVQGAIELLANQYSIQVQVEDLTHFRRVFMDTFCFFSSCQVGELVIPNLMANFGPMYFCKMRRLT

SEQ ID NO: 57646 - protein, 151 aa, Homo sapiens
  Payload ID: 11308
  Gene Symbol: NSUN4
  Gene Name: NOP2/Sun domain family, member 4
  ENSP ID: ENSP00000471937
MAALTLRGVRELLKRVDLATVPRRHRYKKKWAATEPKFPAVRLALQNFDMTYSVQFGDLWPSIRVSLLSEQKYGALVNNFAAWDHVSAKLEQLSAKDFVNEAISHWELQSEGGQSAAPSPASWACSPNLRCFTFDRGDISRFPPARQSCCQ

SEQ ID NO: 57647 - protein, 136 aa, Homo sapiens
  Payload ID: 11308
  Gene Symbol: NSUN4
  Gene Name: NOP2/Sun domain family, member 4
  ENSP ID: ENSP00000477553
  MOD_RES (1)..(1): Any amino acid
XVASQGPCKEPLQIPYSCPLPSSKDSSCSTNPSCSSTIISKCQSSDSESRSSHQSQSRSQSKSPHDGRSQSWSKRHHLSRSPSQKSSPYPSRSWGRSSNPQQNTSQGQSESPQLSINEHQGESPQISRGQGKSKSL

SEQ ID NO: 57648 - protein, 652 aa, Homo sapiens
  Payload ID: 11308
  Gene Symbol: NSUN4
  Gene Name: NOP2/Sun domain family, member 4
  ENSP ID: ENSP00000478740
MRRPCLQGTYCDQHTNLCYSSGWPSAFGTSPATSFPLAHQSPGTSPVTSPQLTHVPLETGPMISPPPTHRTPGTCLTISPPLARRPVETSPMASPTLSHRVLETGLMISLPSHWFSGRSYNDPLLSPASSPPTGSFYHGSLKPLDSCEPKPQLDLPLEKNCCGFPLSSQAGMPGSPSSPQEGSYHYSHLSSEAYIPTPGSPCYAICLCPGSTDSPCSPQSQAPRKACIESLLSWEATGNSYLILTPDTTTSGPPCSQEPSRPHGPHSVLSFPSPLGNQFISPPQSLPRRSYNEPPLPTPVSPQPKSPKSPELRQSHTPHKCLSLVNTPQHTPSGQPKPAKAHTCPPPPSCLSGPSCMQPYITTPSNSSPKELPPGTTLLTVVPRALKSVIPTSFPLCLPCDPVSANSYAQSSRHGPSIGPPCNTHICSVVPSTPHPCPLSGSLNHSTGPPPIVPLCDTYSTPRGPPQPRCQPVMPPCSTHIYSFIPLRTPFDPQSLPIVPRVRAYPDTVPCGLHIYPVASQGPCKEPLQIPYSCPLPSSKDSSCSTNPSCSSTIISKCQSSDSESRSSHQSQSRSQSKSPHDGRSQSWSKRHHLSRSPSQKSSPYPSRSWGRSSNPQQNTSQGQSESPQLSINEHQGESPQISRGQGKSKSL

SEQ ID NO: 57649 - protein, 106 aa, Homo sapiens
  Payload ID: 11308
  Gene Symbol: NSUN4
  Gene Name: NOP2/Sun domain family, member 4
  ENSP ID: ENSP00000478949
MAALTLRGVRELLKRVDLATVPRRHRYKKKWPGRPHPSENTIATLPALLGLRRLAGKDSAPSSTSSCLWRPGKVTATTLSILPAQTLAKGCHRAQIPCCSTGFAEF

SEQ ID NO: 57650 - protein, 54 aa, Homo sapiens
  Payload ID: 11308
  Gene Symbol: NSUN4
  Gene Name: NOP2/Sun domain family, member 4
  ENSP ID: ENSP00000483680
MAALTLRGVRELLKRVDLATVPRRHRYKKKWPVLSLLGCHRAQIPCCSTGFAEF

SEQ ID NO: 57651 - protein, 429 aa, Homo sapiens
  Payload ID: 11309
  Gene Symbol: NSUN5
  Gene Name: NOP2/Sun domain family, member 5
  Uniprot ID: Q96P11
  ENSP ID: ENSP00000252594
MGLYAAAAGVLAGVESRQGSIKGLVYSSNFQNVKQLYALVCETQRYSAVLDAVIASAGLLRAEKKLRPHLAKVLVYELLLGKGFRGGGGRWKALLGRHQARLKAELARLKVHRGVSRNEDLLEVGSRPGPASQLPRFVRVNTLKTCSDDVVDYFKRQGFSYQGRASSLDDLRALKGKHFLLDPLMPELLVFPAQTDLHEHPLYRAGHLILQDRASCLPAMLLDPPPGSHVIDACAAPGNKTSHLAALLKNQGKIFAFDLDAKRLASMATLLARAGVSCCELAEEDFLAVSPSDPRYHEVHYILLDPSCSGSGMPSRQLEEPGAGTPSPVRLHALAGFQQRALCHALTFPSLQRLVYSTCSLCQEENEDVVRDALQQNPGAFRLAPALPAWPHRGLSTFPGAEHCLRASPETTLSSGFFVAVIERVEVPR

SEQ ID NO: 57652 - protein, 470 aa, Homo sapiens
  Payload ID: 11309
  Gene Symbol: NSUN5
  Gene Name: NOP2/Sun domain family, member 5
  Uniprot ID: Q96P11
  ENSP ID: ENSP00000309126
MGLYAAAAGVLAGVESRQGSIKGLVYSSNFQNVKQLYALVCETQRYSAVLDAVIASAGLLRAEKKLRPHLAKVLVYELLLGKGFRGGGGRWKALLGRHQARLKAELARLKVHRGVSRNEDLLEVGSRPGPASQLPRFVRVNTLKTCSDDVVDYFKRQGFSYQGRASSLDDLRALKGKHFLLDPLMPELLVFPAQTDLHEHPLYRAGHLILQDRASCLPAMLLDPPPGSHVIDACAAPGNKTSHLAALLKNQGKIFAFDLDAKRLASMATLLARAGVSCCELAEEDFLAVSPSDPRYHEVHYILLDPSCSGSGMPSRQLEEPGAGTPSPVRLHALAGFQQRALCHALTFPSLQRLVYSTCSLCQEENEDVVRDALQQNPGAFRLAPALPAWPHRGLSTFPGAEHCLRASPETTLSSGFFVAVIERVEVPSLTGQSISTRTHTQPSPKEKEETAKSRSRCLHTALHIAEAPG

SEQ ID NO: 57653 - protein, 466 aa, Homo sapiens
  Payload ID: 11309
  Gene Symbol: NSUN5
  Gene Name: NOP2/Sun domain family, member 5
  Uniprot ID: Q96P11
  ENSP ID: ENSP00000388464
MGLYAAAAGVLAGVESRQGSIKGLVYSSNFQNVKQLYALVCETQRYSAVLDAVIASAGLLRAEKKLRPHLAKVLVYELLLGKGFRGGGGRWKALLGRHQARLKAELARLKVHRGVSRNEDLLEVGSRPGPASQLPRFVRVNTLKTCSDDVVDYFKRQGFSYQGRASSLDDLRALKGKHFLLDPLMPELLVFPAQTDLHEHPLYRAGHLILQDRASCLPAMLLDPPPGSHVIDACAAPGNKTSHLAALLKNQGKIFAFDLDAKRLASMATLLARAGVSCCELAEEDFLAVSPSDPRYHEVHYILLDPSCSGSGMPSRQLEEPGAGTPSPVRLHALAGFQQRALCHALTFPSLQRLVYSTCSLCQEENEDVVRDALQQNPGAFRLAPALPAWPHRGLSTFPGAEHCLRASPETTLSSGFFVAVIERVEVPSSASQAKASAPERTPSPAPKRKKRQQRAAAGACTPPCT

SEQ ID NO: 57654 - protein, 391 aa, Homo sapiens
  Payload ID: 11309
  Gene Symbol: NSUN5
  Gene Name: NOP2/Sun domain family, member 5
  Uniprot ID: Q96P11
  ENSP ID: ENSP00000393081
MGLYAAAAGVLAGVESRQGSIKGLVYSSNFQNVKQLYALVCETQRYSAVLDAVIASAGLLRAEKKLRPHLAKVHRGVSRNEDLLEVGSRPGPASQLPRFVRVNTLKTCSDDVVDYFKRQGFSYQGRASSLDDLRALKGKHFLLDPLMPELLVFPAQTDLHEHPLYRAGHLILQDRASCLPAMLLDPPPGSHVIDACAAPGNKTSHLAALLKNQGKIFAFDLDAKRLASMATLLARAGVSCCELAEEDFLAVSPSDPRYHEVHYILLDPSCSGSGMPSRQLEEPGAGTPSPVRLHALAGFQQRALCHALTFPSLQRLVYSTCSLCQEENEDVVRDALQQNPGAFRLAPALPAWPHRGLSTFPGAEHCLRASPETTLSSGFFVAVIERVEVPR

SEQ ID NO: 57655 - protein, 58 aa, Homo sapiens
  Payload ID: 11309
  Gene Symbol: NSUN5
  Gene Name: NOP2/Sun domain family, member 5
  ENSP ID: ENSP00000405757
  MOD_RES (1)..(1): Any amino acid
XREAAVRAGVRNAALLRRAGCCDRQRRPPPCGEEAAAAPGQASMTYEPSRGSIFSWTP

SEQ ID NO: 57656 - protein, 469 aa, Homo sapiens
  Payload ID: 11310
  Gene Symbol: NSUN6
  Gene Name: NOP2/Sun domain family, member 6
  Uniprot ID: Q8TEA1
  ENSP ID: ENSP00000366519
MSIFPKISLRPEVENYLKEGFMNKEIVTALGKQEAERKFETLLKHLSHPPSFTTVRVNTHLASVQHVKNLLLDELQKQFNGLSVPILQHPDLQDVLLIPVIGPRKNIKKQQCEAIVGAQCGNAVLRGAHVYAPGIVSASQFMKAGDVISVYSDIKGKCKKGAKEFDGTKVFLGNGISELSRKEIFSGLPELKGMGIRMTEPVYLSPSFDSVLPRYLFLQNLPSALVSHVLNPQPGEKILDLCAAPGGKTTHIAALMHDQGEVIALDKIFNKVEKIKQNALLLGLNSIRAFCFDGTKAVKLDMVEDTEGEPPFLPESFDRILLDAPCSGMGQRPNMACTWSVKEVASYQPLQRKLFTAAVQLLKPEGVLVYSTCTITLAENEEQVAWALTKFPCLQLQPQEPQIGGEGMRGAGLSCEQLKQLQRFDPSAVPLPDTDMDSLREARREDMLRLANKDSIGFFIAKFVKCKST

SEQ ID NO: 57657 - protein, 149 aa, Homo sapiens
  Payload ID: 11310
  Gene Symbol: NSUN6
  Gene Name: NOP2/Sun domain family, member 6
  ENSP ID: ENSP00000476221
MFHKRGKKNGKFSIVTALGKQEAERKFETLLKHLSHPPSFTTVRVNTHLASVQHVKNLLLDELQKQFNGLSVPILQHPDLQDVLLIPVIGPRKNIKKQQCEAIVGAQCGNAVLRGAHVYAPGIVSASQFMKAGDVISVYSDIKGKCKKG

SEQ ID NO: 57658 - protein, 35 aa, Homo sapiens
  Payload ID: 11310
  Gene Symbol: NSUN6
  Gene Name: NOP2/Sun domain family, member 6
  ENSP ID: ENSP00000486203
MFHKRGKKNGKFSVRYIVLFLEIKMNQSKIDFLFV

SEQ ID NO: 57659 - protein, 475 aa, Homo sapiens
  Payload ID: 11311
  Gene Symbol: NSUN7
  Gene Name: NOP2/Sun domain family, member 7
  Uniprot ID: Q8NE18
  ENSP ID: ENSP00000319127
MLNSTGELEFSNEEDPEIISQLTSLPLSGGKSSAGVPEKTGYPDSVYVMAANIFQGIRIEKSAQKVLIKYGNEPLRSLSESEDQSFQRLSYELAFSALKYQDILETILIDSCIFPSTTIPDHLSSLIIVMLYDFQDRKFQTRVLSDNEEPISEVQEVENLLNSFKIKLAAALARCRIKHDALSIYHILPETVRKQELRASTLPLYAWINTCKISPEEVYNNLKRRGYNKVKSVLHIDDKVFAVDQHCYDVLIFPSHLKNDLINIDLFKDYKLIFQDKSRSLAVHSVKALLNMDDDVLMVNTGSWYTVSHMSILTNNNTSKVFVCGVQSQAKDPDLKTLFTKIGCKNIEILHEKFINIESKDHRLQKVKVILLLPRCSGLGVSNPVEFILNEHEDTEFLKDHSQGGISVDKLHVLAQQQYEQLTHAMKFTKAQAVVYCTCSVFPEENEAVVKKALEFQDLGNKGQPYSGTLLRQCL

SEQ ID NO: 57660 - protein, 718 aa, Homo sapiens
  Payload ID: 11311
  Gene Symbol: NSUN7
  Gene Name: NOP2/Sun domain family, member 7
  Uniprot ID: Q8NE18
  ENSP ID: ENSP00000371201
MLNSTGELEFSNEEDPEIISQLTSLPLSGGKSSAGVPEKTGYPDSVYVMAANIFQGIRIEKSAQKVLIKYGNEPLRSLSESEDQSFQRLSYELAFSALKYQDILETILIDSCIFPSTTIPDHLSSLIIVMLYDFQDRKFQTRVLSDNEEPISEVQEVENLLNSFKIKLAAALARCRIKHDALSIYHILPETVRKQELRASTLPLYAWINTCKISPEEVYNNLKRRGYNKVKSVLHIDDKVFAVDQHCYDVLIFPSHLKNDLINIDLFKDYKLIFQDKSRSLAVHSVKALLNMDDDVLMVNTGSWYTVSHMSILTNNNTSKVFVCGVQSQAKDPDLKTLFTKIGCKNIEILHEKFINIESKDHRLQKVKVILLLPRCSGLGVSNPVEFILNEHEDTEFLKDHSQGGISVDKLHVLAQQQYEQLTHAMKFTKAQAVVYCTCSVFPEENEAVVKKALEFQDLGNKGQPYRLSPPVLPLCSLKEIQLSTDKFFRMEPSEITNGCFLSILTRERDPSETVSVNDVLARAAAKGLLDGIELGKSSKREKKKKKSKTSLTKGATTDNGIQMKIAEFLNRETKASANLSETVTKPPLPQKNTAQVGASSQTRKPNKLAPHPAVPAFVKNTCPSRPRERQTHFLRPRPEDRMVALKPIKIVLPPVFMPFSSPQGIRSRMPTQHLYCRWVAPKALVPTCLPTHSLSRKEEKPKDDTPSSLLRPPRRWL

SEQ ID NO: 57661 - protein, 767 aa, Homo sapiens
  Payload ID: 11312
  Gene Symbol: NSUN2
  Gene Name: NOP2/Sun RNA methyltransferase family, member 2
  Uniprot ID: Q08J23
  ENSP ID: ENSP00000264670
MGRRSRGRRLQQQQRPEDAEDGAEGGGKRGEAGWEGGYPEIVKENKLFEHYYQELKIVPEGEWGQFMDALREPLPATLRITGYKSHAKEILHCLKNKYFKELEDLEVDGQKVEVPQPLSWYPEELAWHTNLSRKILRKSPHLEKFHQFLVSETESGNISRQEAVSMIPPLLLNVRPHHKILDMCAAPGSKTTQLIEMLHADMNVPFPEGFVIANDVDNKRCYLLVHQAKRLSSPCIMVVNHDASSIPRLQIDVDGRKEILFYDRILCDVPCSGDGTMRKNIDVWKKWTTLNSLQLHGLQLRIATRGAEQLAEGGRMVYSTCSLNPIEDEAVIASLLEKSEGALELADVSNELPGLKWMPGITQWKVMTKDGQWFTDWDAVPHSRHTQIRPTMFPPKDPEKLQAMHLERCLRILPHHQNTGGFFVAVLVKKSSMPWNKRQPKLQGKSAETRESTQLSPADLTEGKPTDPSKLESPSFTGTGDTEIAHATEDLENNGSKKDGVCGPPPSKKMKLFGFKEDPFVFIPEDDPLFPPIEKFYALDPSFPRMNLLTRTTEGKKRQLYMVSKELRNVLLNNSEKMKVINTGIKVWCRNNSGEEFDCAFRLAQEGIYTLYPFINSRIITVSMEDVKILLTQENPFFRKLSSETYSQAKDLAKGSIVLKYEPDSANPDALQCPIVLCGWRGKASIRTFVPKNERLHYLRMMGLEVLGEKKKEGVILTNESAASTGQPDNDVTEGQRAGEPNSPDAEEANSPDVTAGCDPAGVHPPR

SEQ ID NO: 57662 - protein, 732 aa, Homo sapiens
  Payload ID: 11312
  Gene Symbol: NSUN2
  Gene Name: NOP2/Sun RNA methyltransferase family, member 2
  Uniprot ID: Q08J23
  ENSP ID: ENSP00000420957
MGRRSRGRRLQQQQRPEDAEDGAEGGGKRGEAGWEGGYPEIVKENKLFEHYYQELKIVPEGEWGQFMDALREPLPATLRITGYKRYPEELAWHTNLSRKILRKSPHLEKFHQFLVSETESGNISRQEAVSMIPPLLLNVRPHHKILDMCAAPGSKTTQLIEMLHADMNVPFPEGFVIANDVDNKRCYLLVHQAKRLSSPCIMVVNHDASSIPRLQIDVDGRKEILFYDRILCDVPCSGDGTMRKNIDVWKKWTTLNSLQLHGLQLRIATRGAEQLAEGGRMVYSTCSLNPIEDEAVIASLLEKSEGALELADVSNELPGLKWMPGITQWKVMTKDGQWFTDWDAVPHSRHTQIRPTMFPPKDPEKLQAMHLERCLRILPHHQNTGGFFVAVLVKKSSMPWNKRQPKLQGKSAETRESTQLSPADLTEGKPTDPSKLESPSFTGTGDTEIAHATEDLENNGSKKDGVCGPPPSKKMKLFGFKEDPFVFIPEDDPLFPPIEKFYALDPSFPRMNLLTRTTEGKKRQLYMVSKELRNVLLNNSEKMKVINTGIKVWCRNNSGEEFDCAFRLAQEGIYTLYPFINSRIITVSMEDVKILLTQENPFFRKLSSETYSQAKDLAKGSIVLKYEPDSANPDALQCPIVLCGWRGKASIRTFVPKNERLHYLRMMGLEVLGEKKKEGVILTNESAASTGQPDNDVTEGQRAGEPNSPDAEEANSPDVTAGCDPAGVHPPR

SEQ ID NO: 57663 - protein, 202 aa, Homo sapiens
  Payload ID: 11312
  Gene Symbol: NSUN2
  Gene Name: NOP2/Sun RNA methyltransferase family, member 2
  ENSP ID: ENSP00000421783
MGRRSRGRRLQQQQRPEDAEDGAEGGGKRGEAGWEGGYPEIVKENKLFEHYYQELKIVPEGEWGQFMDALREPLPATLRITGYKSHAKEILHCLKNKYFKELEDLEVDGQKVEVPQPLSWYPEELAWHTNLSRKILRKSPHLEKFHQFLVSETESGNISRQEAVSMIPPLLLNVRPHHKRDLLLRMMWTTSAATCSSIKPRG

SEQ ID NO: 57664 - protein, 102 aa, Homo sapiens
  Payload ID: 11312
  Gene Symbol: NSUN2
  Gene Name: NOP2/Sun RNA methyltransferase family, member 2
  ENSP ID: ENSP00000426459
  MOD_RES (1)..(1): Any amino acid
XAHATEDLENNGSKKDGVCGPPPSKKMKLFGFKEDPFVFIPEDDPLFPPIELLTRGSKSGVEITAVKSLTVLSGWHRREYIHCIHLLTQELLLYQWKMLRYC

SEQ ID NO: 57665 - protein, 594 aa, Homo sapiens
  Payload ID: 11313
  Gene Symbol: NOP56
  Gene Name: NOP56 ribonucleoprotein
  Uniprot ID: O00567
  ENSP ID: ENSP00000370589
MVLLHVLFEHAVGYALLALKEVEEISLLQPQVEESVLNLGKFHSIVRLVAFCPFASSQVALENANAVSEGVVHEDLRLLLETHLPSKKKKVLLGVGDPKIGAAIQEELGYNCQTGGVIAEILRGVRLHFHNLVKGLTDLSACKAQLGLGHSYSRAKVKFNVNRVDNMIIQSISLLDQLDKDINTFSMRVREWYGYHFPELVKIINDNATYCRLAQFIGNRRELNEDKLEKLEELTMDGAKAKAILDASRSSMGMDISAIDLINIESFSSRVVSLSEYRQSLHTYLRSKMSQVAPSLSALIGEAVGARLIAHAGSLTNLAKYPASTVQILGAEKALFRALKTRGNTPKYGLIFHSTFIGRAAAKNKGRISRYLANKCSIASRIDCFSEVPTSVFGEKLREQVEERLSFYETGEIPRKNLDVMKEAMVQAEEAAAEITRKLEKQEKKRLKKEKKRLAALALASSENSSSTPEECEEMSEKPKKKKKQKPQEVPQENGMEDPSISFSKPKKKKSFSKEELMSSDLEETAGSTSIPKRKKSTPKEETVNDPEEAGHRSGSKKKRKFSKEEPVSSGPEEAVGKSSSKKKKKFHKASQED

SEQ ID NO: 57666 - protein, 281 aa, Homo sapiens
  Payload ID: 11313
  Gene Symbol: NOP56
  Gene Name: NOP56 ribonucleoprotein
  ENSP ID: ENSP00000388497
MVLLHVLFEHAVGYALLALKEVEEISLLQPQVEESVLNLGKFHSIVRLVAFCPFASSQVALENANAVSEGVVHEDLRLLLETHLPSKKKKVLLGVGDPKIGAAIQEELGYNCQTGGVIAEILRGVRLHFHNLVKGLTDLSACKAQLGLGHSYSRAKVKFNVNRVDNMIIQSISLLDQLDKDINTFSMRVRQSRCGEGKAVALWFLMKQLGQGVTVALCREWYGYHFPELVKIINDNATYCRLAQFIGNRRELNEDKLEKLEELTMDGAKAKAILDASRSSM

SEQ ID NO: 57667 - protein, 219 aa, Homo sapiens
  Payload ID: 11313
  Gene Symbol: NOP56
  Gene Name: NOP56 ribonucleoprotein
  ENSP ID: ENSP00000403199
  MOD_RES (1)..(1): Any amino acid
XLINIESFSSRVVSLSEYRQSLHTYLRSKMSQVAPSLSALIGEAVGARLIAHAGSLTNLAKYPASTVQILGAEKALFRALKTRGNTPKYGLIFHSTFIGRAAAKNKGRISRYLANKCSIASRIDCFSEVPTSVFGEKLREQVEERLSFYETGEIPRKNLDVMKEAMVQAEEAAAEITRKLEKQEKKRLKKEKKRLAALALASSENSSSTPEECEEGDRC

SEQ ID NO: 57668 - protein, 252 aa, Homo sapiens
  Payload ID: 11313
  Gene Symbol: NOP56
  Gene Name: NOP56 ribonucleoprotein
  ENSP ID: ENSP00000434317
  MOD_RES (1)..(1): Any amino acid
XLEKLEELTMDGAKAKAILDASRSSMGMDISAIDLINIESFSSRVVSLSEYRQSLHTYLRSKMSQVAPSLSALIGEAVGARLIAHAGSLTNLAKYPASTVQILGAEKALFRALKTRGNTPKYGLIFHSTFIGRAAAKNKGRISRYLANKCSIASRIDCFSEVPTSVFGEKLREQVEERLSFYETGEIPRKNLDVMKEAMVQAEEAAAEITRKLEKQEKKRLKKEKKRLAALALASSENSSSTPEECEEGDRC

SEQ ID NO: 57669 - protein, 529 aa, Homo sapiens
  Payload ID: 11314
  Gene Symbol: NOP58
  Gene Name: NOP58 ribonucleoprotein
  Uniprot ID: Q9Y2X3
  ENSP ID: ENSP00000264279
MLVLFETSVGYAIFKVLNEKKLQEVDSLWKEFETPEKANKIVKLKHFEKFQDTAEALAAFTALMEGKINKQLKKVLKKIVKEAHEPLAVADAKLGGVIKEKLNLSCIHSPVVNELMRGIRSQMDGLIPGVEPREMAAMCLGLAHSLSRYRLKFSADKVDTMIVQAISLLDDLDKELNNYIMRCREWYGWHFPELGKIISDNLTYCKCLQKVGDRKNYASAKLSELLPEEVEAEVKAAAEISMGTEVSEEDICNILHLCTQVIEISEYRTQLYEYLQNRMMAIAPNVTVMVGELVGARLIAHAGSLLNLAKHAASTVQILGAEKALFRALKSRRDTPKYGLIYHASLVGQTSPKHKGKISRMLAAKTVLAIRYDAFGEDSSSAMGVENRAKLEARLRTLEDRGIRKISGTGKALAKTEKYEHKSEVKTYDPSGDSTLPTCSKKRKIEQVDKEDEITEKKAKKAKIKVKVEEEEEEKVAEEEETSVKKKKKRGKKKHIKEEPLSEEEPCTSTAIASPEKKKKKKKKRENED

SEQ ID NO: 57670 - protein, 187 aa, Homo sapiens
  Payload ID: 11314
  Gene Symbol: NOP58
  Gene Name: NOP58 ribonucleoprotein
  ENSP ID: ENSP00000388126
EPREMAAMCLGLAHSLSRYRLKFSADKVDTMIVQAISLLDDLDKELNNYIMRCREWYGWHFPELGKIISDNLTYCKCLQKVGDRKNYASAKLSELLPEEVEAEVKAAAEISMGTEVSEEDICNILHLCTQVIEISEYRTQLYEYLQNRMMAIAPNVTVMVGELVGARLIAHADFSNAGSQNRFGYPL

SEQ ID NO: 57671 - protein, 68 aa, Homo sapiens
  Payload ID: 11314
  Gene Symbol: NOP58
  Gene Name: NOP58 ribonucleoprotein
  ENSP ID: ENSP00000388905
MLVLFETSVGYAIFKVLNEKKLQEVDSLWKEFETPEKANKIVKLKHFEKFQDTAEALAGLVFPMCEER

SEQ ID NO: 57672 - protein, 636 aa, Homo sapiens
  Payload ID: 11315
  Gene Symbol: NOP9
  Gene Name: NOP9 nucleolar protein
  Uniprot ID: Q86U38
  ENSP ID: ENSP00000267425
MGQGPRSPHKVGRRFPAGGKRGRGAKGSGRPLPGRKRQPWPPPDGRSEPAPDSHPHLSPEALGYFRRALSALKEAPETGEERDLMVHNIMKEVETQALALSTNRTGSEMLQELLGFSPLKPLCRVWAALRSNLRTVACHRCGVHVLQSALLQLPRLLGSAAEEEEEEEEDGKDGPTETLEELVLGLAAEVCDDFLVYCGDTHGSFVVRTLLQVLGGTILESERARPRGSQSSEAQKTPAQECKPADFEVPETFLNRLQDLSSSFLKDIAVFITDKISSFCLQVALQVLHRKLPQFCAHLCNAVIGYLSTRGSSVDGSPLLLFLRDQTSSRLLEQVLLVLEPPRLQSLFEEHLQGQLQTLAAHPIANFPLQRLLDAVTTPELLSPVFEELSPVLEAVLAQGHPGVVIALVGACRRVGAYQAKVLQLLLEAFHCAEPSSRQVACVPLFATLMAYEVYYGLTEEEGAVPAEHQVAMAAARALGDVTVLGSLLLQHLLHFSTPGLVLRSLGALTGPQLLSLAQSPAGSHVLDAILTSPSVTRKLRRRVLQNLKGQYVALACSRHGSRVLDAIWSGAALRARKEIAAELGEQNQELIRDPFGHHVARNVALTTFLKRREAWEQQQGAVAKRRRALNSILED

SEQ ID NO: 57673 - protein, 535 aa, Homo sapiens
  Payload ID: 11315
  Gene Symbol: NOP9
  Gene Name: NOP9 nucleolar protein
  Uniprot ID: Q86U38
  ENSP ID: ENSP00000380020
MGQGPRSPHKVGRRFPAGGKRGRGAKGSGRPLPGRKRQPWPPPDGRSEPAPDSHPHLSPEALGYFRRALSALKEAPETGEERDLMVHNIMKEVETQALALSTNRTGSEMLQELLGFSPLKPLCRVWAALRSNLRTVACHRCGVHVLQSALLQLPRLLGSAAEEEEEEEEDGKDGPTETLEELVLGLAAEVCDDFLVYCGDTHGSFVVRTLLQVLGGTILESERARPRGSQSSEAQKTPAQECKPADFEVPETFLNRLQDLSSSFLKDIAVFITDKISSFCLQVALQVLHRKLPQFCAHLCNAVIGYLSTRGSSVDGSPLLLFLRDQTSSRLLEQVLLVLEPPRLQSLFEEHLQGQLQTLAAHPIANFPLQRLLDAVTTPELLSPVFEELSPVLEAVLAQGHPGVVIALVGACRRVGAYQAKVLQLLLEAFHCAEPSSRQVACVPLFATLMAYEVYYGLTEEEGAVPAEHQVAMAAARALGDVTVLGSLLLQHLLHFSTPGLVLRSLGALTGPQLLSLAQRPGRKLLLSLGSRTRS

SEQ ID NO: 57674 - protein, 97 aa, Homo sapiens
  Payload ID: 11315
  Gene Symbol: NOP9
  Gene Name: NOP9 nucleolar protein
  ENSP ID: ENSP00000451905
  MOD_RES (1)..(1): Any amino acid
XVTTPELLSPVFEELSPVLEAVLAQGHPGVVIALVGACRRVGAYQAKVLQLLLEAFHCAEPSSRQVACVPLFATLMAYEVYYGLTEEEGAVPAEHQG

SEQ ID NO: 57675 - protein, 133 aa, Homo sapiens
  Payload ID: 11316
  Gene Symbol: NDP
  Gene Name: Norrie disease (pseudoglioma)
  Uniprot ID: Q00604
  ENSP ID: ENSP00000367301
MRKHVLAASFSMLSLLVIMGDTDSKTDSSFIMDSDPRRCMRHHYVDSISHPLYKCSSKMVLLARCEGHCSQASRSEPLVSFSTVLKQPFRSSCHCCRPQTSKLKALRLRCSGGMRLTATYRYILSCHCEECNS

SEQ ID NO: 57676 - protein, 2555 aa, Homo sapiens
  Payload ID: 11317
  Gene Symbol: NOTCH1
  Gene Name: notch 1
  Uniprot ID: P46531
  ENSP ID: ENSP00000277541
MPPLLAPLLCLALLPALAARGPRCSQPGETCLNGGKCEAANGTEACVCGGAFVGPRCQDPNPCLSTPCKNAGTCHVVDRRGVADYACSCALGFSGPLCLTPLDNACLTNPCRNGGTCDLLTLTEYKCRCPPGWSGKSCQQADPCASNPCANGGQCLPFEASYICHCPPSFHGPTCRQDVNECGQKPGLCRHGGTCHNEVGSYRCVCRATHTGPNCERPYVPCSPSPCQNGGTCRPTGDVTHECACLPGFTGQNCEENIDDCPGNNCKNGGACVDGVNTYNCRCPPEWTGQYCTEDVDECQLMPNACQNGGTCHNTHGGYNCVCVNGWTGEDCSENIDDCASAACFHGATCHDRVASFYCECPHGRTGLLCHLNDACISNPCNEGSNCDTNPVNGKAICTCPSGYTGPACSQDVDECSLGANPCEHAGKCINTLGSFECQCLQGYTGPRCEIDVNECVSNPCQNDATCLDQIGEFQCICMPGYEGVHCEVNTDECASSPCLHNGRCLDKINEFQCECPTGFTGHLCQYDVDECASTPCKNGAKCLDGPNTYTCVCTEGYTGTHCEVDIDECDPDPCHYGSCKDGVATFTCLCRPGYTGHHCETNINECSSQPCRHGGTCQDRDNAYLCFCLKGTTGPNCEINLDDCASSPCDSGTCLDKIDGYECACEPGYTGSMCNINIDECAGNPCHNGGTCEDGINGFTCRCPEGYHDPTCLSEVNECNSNPCVHGACRDSLNGYKCDCDPGWSGTNCDINNNECESNPCVNGGTCKDMTSGYVCTCREGFSGPNCQTNINECASNPCLNQGTCIDDVAGYKCNCLLPYTGATCEVVLAPCAPSPCRNGGECRQSEDYESFSCVCPTGWQGQTCEVDINECVLSPCRHGASCQNTHGGYRCHCQAGYSGRNCETDIDDCRPNPCHNGGSCTDGINTAFCDCLPGFRGTFCEEDINECASDPCRNGANCTDCVDSYTCTCPAGFSGIHCENNTPDCTESSCFNGGTCVDGINSFTCLCPPGFTGSYCQHDVNECDSQPCLHGGTCQDGCGSYRCTCPQGYTGPNCQNLVHWCDSSPCKNGGKCWQTHTQYRCECPSGWTGLYCDVPSVSCEVAAQRQGVDVARLCQHGGLCVDAGNTHHCRCQAGYTGSYCEDLVDECSPSPCQNGATCTDYLGGYSCKCVAGYHGVNCSEEIDECLSHPCQNGGTCLDLPNTYKCSCPRGTQGVHCEINVDDCNPPVDPVSRSPKCFNNGTCVDQVGGYSCTCPPGFVGERCEGDVNECLSNPCDARGTQNCVQRVNDFHCECRAGHTGRRCESVINGCKGKPCKNGGTCAVASNTARGFICKCPAGFEGATCENDARTCGSLRCLNGGTCISGPRSPTCLCLGPFTGPECQFPASSPCLGGNPCYNQGTCEPTSESPFYRCLCPAKFNGLLCHILDYSFGGGAGRDIPPPLIEEACELPECQEDAGNKVCSLQCNNHACGWDGGDCSLNFNDPWKNCTQSLQCWKYFSDGHCDSQCNSAGCLFDGFDCQRAEGQCNPLYDQYCKDHFSDGHCDQGCNSAECEWDGLDCAEHVPERLAAGTLVVVVLMPPEQLRNSSFHFLRELSRVLHTNVVFKRDAHGQQMIFPYYGREEELRKHPIKRAAEGWAAPDALLGQVKASLLPGGSEGGRRRRELDPMDVRGSIVYLEIDNRQCVQASSQCFQSATDVAAFLGALASLGSLNIPYKIEAVQSETVEPPPPAQLHFMYVAAAAFVLLFFVGCGVLLSRKRRRQHGQLWFPEGFKVSEASKKKRREPLGEDSVGLKPLKNASDGALMDDNQNEWGDEDLETKKFRFEEPVVLPDLDDQTDHRQWTQQHLDAADLRMSAMAPTPPQGEVDADCMDVNVRGPDGFTPLMIASCSGGGLETGNSEEEEDAPAVISDFIYQGASLHNQTDRTGETALHLAARYSRSDAAKRLLEASADANIQDNMGRTPLHAAVSADAQGVFQILIRNRATDLDARMHDGTTPLILAARLAVEGMLEDLINSHADVNAVDDLGKSALHWAAAVNNVDAAVVLLKNGANKDMQNNREETPLFLAAREGSYETAKVLLDHFANRDITDHMDRLPRDIAQERMHHDIVRLLDEYNLVRSPQLHGAPLGGTPTLSPPLCSPNGYLGSLKPGVQGKKVRKPSSKGLACGSKEAKDLKARRKKSQDGKGCLLDSSGMLSPVDSLESPHGYLSDVASPPLLPSPFQQSPSVPLNHLPGMPDTHLGIGHLNVAAKPEMAALGGGGRLAFETGPPRLSHLPVASGTSTVLGSSSGGALNFTVGGSTSLNGQCEWLSRLQSGMVPNQYNPLRGSVAPGPLSTQAPSLQHGMVGPLHSSLAASALSQMMSYQGLPSTRLATQPHLVQTQQVQPQNLQMQQQNLQPANIQQQQSLQPPPPPPQPHLGVSSAASGHLGRSFLSGEPSQADVQPLGPSSLAVHTILPQESPALPTSLPSSLVPPVTAAQFLTPPSQHSYSSPVDNTPSHQLQVPEHPFLTPSPESPDQWSSSSPHSNVSDWSEGVSSPPTSMQSQIARIPEAFK

SEQ ID NO: 57677 - protein, 2471 aa, Homo sapiens
  Payload ID: 11318
  Gene Symbol: NOTCH2
  Gene Name: notch 2
  Uniprot ID: Q04721
  ENSP ID: ENSP00000256646
MPALRPALLWALLALWLCCAAPAHALQCRDGYEPCVNEGMCVTYHNGTGYCKCPEGFLGEYCQHRDPCEKNRCQNGGTCVAQAMLGKATCRCASGFTGEDCQYSTSHPCFVSRPCLNGGTCHMLSRDTYECTCQVGFTGKECQWTDACLSHPCANGSTCTTVANQFSCKCLTGFTGQKCETDVNECDIPGHCQHGGTCLNLPGSYQCQCPQGFTGQYCDSLYVPCAPSPCVNGGTCRQTGDFTFECNCLPGFEGSTCERNIDDCPNHRCQNGGVCVDGVNTYNCRCPPQWTGQFCTEDVDECLLQPNACQNGGTCANRNGGYGCVCVNGWSGDDCSENIDDCAFASCTPGSTCIDRVASFSCMCPEGKAGLLCHLDDACISNPCHKGALCDTNPLNGQYICTCPQGYKGADCTEDVDECAMANSNPCEHAGKCVNTDGAFHCECLKGYAGPRCEMDINECHSDPCQNDATCLDKIGGFTCLCMPGFKGVHCELEINECQSNPCVNNGQCVDKVNRFQCLCPPGFTGPVCQIDIDDCSSTPCLNGAKCIDHPNGYECQCATGFTGVLCEENIDNCDPDPCHHGQCQDGIDSYTCICNPGYMGAICSDQIDECYSSPCLNDGRCIDLVNGYQCNCQPGTSGVNCEINFDDCASNPCIHGICMDGINRYSCVCSPGFTGQRCNIDIDECASNPCRKGATCINGVNGFRCICPEGPHHPSCYSQVNECLSNPCIHGNCTGGLSGYKCLCDAGWVGINCEVDKNECLSNPCQNGGTCDNLVNGYRCTCKKGFKGYNCQVNIDECASNPCLNQGTCFDDISGYTCHCVLPYTGKNCQTVLAPCSPNPCENAAVCKESPNFESYTCLCAPGWQGQRCTIDIDECISKPCMNHGLCHNTQGSYMCECPPGFSGMDCEEDIDDCLANPCQNGGSCMDGVNTFSCLCLPGFTGDKCQTDMNECLSEPCKNGGTCSDYVNSYTCKCQAGFDGVHCENNINECTESSCFNGGTCVDGINSFSCLCPVGFTGSFCLHEINECSSHPCLNEGTCVDGLGTYRCSCPLGYTGKNCQTLVNLCSRSPCKNKGTCVQKKAESQCLCPSGWAGAYCDVPNVSCDIAASRRGVLVEHLCQHSGVCINAGNTHYCQCPLGYTGSYCEEQLDECASNPCQHGATCSDFIGGYRCECVPGYQGVNCEYEVDECQNQPCQNGGTCIDLVNHFKCSCPPGTRGLLCEENIDDCARGPHCLNGGQCMDRIGGYSCRCLPGFAGERCEGDINECLSNPCSSEGSLDCIQLTNDYLCVCRSAFTGRHCETFVDVCPQMPCLNGGTCAVASNMPDGFICRCPPGFSGARCQSSCGQVKCRKGEQCVHTASGPRCFCPSPRDCESGCASSPCQHGGSCHPQRQPPYYSCQCAPPFSGSRCELYTAPPSTPPATCLSQYCADKARDGVCDEACNSHACQWDGGDCSLTMENPWANCSSPLPCWDYINNQCDELCNTVECLFDNFECQGNSKTCKYDKYCADHFKDNHCDQGCNSEECGWDGLDCAADQPENLAEGTLVIVVLMPPEQLLQDARSFLRALGTLLHTNLRIKRDSQGELMVYPYYGEKSAAMKKQRMTRRSLPGEQEQEVAGSKVFLEIDNRQCVQDSDHCFKNTDAAAALLASHAIQGTLSYPLVSVVSESLTPERTQLLYLLAVAVVIILFIILLGVIMAKRKRKHGSLWLPEGFTLRRDASNHKRREPVGQDAVGLKNLSVQVSEANLIGTGTSEHWVDDEGPQPKKVKAEDEALLSEEDDPIDRRPWTQQHLEAADIRRTPSLALTPPQAEQEVDVLDVNVRGPDGCTPLMLASLRGGSSDLSDEDEDAEDSSANIITDLVYQGASLQAQTDRTGEMALHLAARYSRADAAKRLLDAGADANAQDNMGRCPLHAAVAADAQGVFQILIRNRVTDLDARMNDGTTPLILAARLAVEGMVAELINCQADVNAVDDHGKSALHWAAAVNNVEATLLLLKNGANRDMQDNKEETPLFLAAREGSYEAAKILLDHFANRDITDHMDRLPRDVARDRMHHDIVRLLDEYNVTPSPPGTVLTSALSPVICGPNRSFLSLKHTPMGKKSRRPSAKSTMPTSLPNLAKEAKDAKGSRRKKSLSEKVQLSESSVTLSPVDSLESPHTYVSDTTSSPMITSPGILQASPNPMLATAAPPAPVHAQHALSFSNLHEMQPLAHGASTVLPSVSQLLSHHHIVSPGSGSAGSLSRLHPVPVPADWMNRMEVNETQYNEMFGMVLAPAEGTHPGIAPQSRPPEGKHITTPREPLPPIVTFQLIPKGSIAQPAGAPQPQSTCPPAVAGPLPTMYQIPEMARLPSVAFPTAMMPQQDGQVAQTILPAYHPFPASVGKYPTPPSQHSYASSNAAERTPSHSGHLQGEHPYLTPSPESPDQWSSSSPHSASDWSDVTTSPTPGGAGGGQRGPGTHMSEPPHNNMQVYA

SEQ ID NO: 57678 - protein, 235 aa, Homo sapiens
  Payload ID: 11318
  Gene Symbol: NOTCH2
  Gene Name: notch 2
  ENSP ID: ENSP00000473427
MCVTYHNGTGYCKCPEGFLGEYCQHRDPCEKNRCQNGGTCVAQAMLGKATCRCASGFTGEDCQYSTSHPCFVSRPCLNGGTCHMLSRDTYECTCQVGFTGKECQWTDACLSHPCANGSTCTTVANQFSCKCLTGFTGQKCETDVNECDIPGHCQHGGTCLNLPGSYQCQCPQGFTGQYCDSLYVPCAPSPCVNGGTCRQTGDFTFECNCLPETVRNKRNRALGKGQASLEWKRTR

SEQ ID NO: 57679 - protein, 863 aa, Homo sapiens [sequence omitted]

SEQ ID NO: 57680 - protein, 236 aa, Homo sapiens [sequence omitted]

SEQ ID NO: 57681 - protein, 236 aa, Homo sapiens; identical to SEQ ID NO: 56289
  Payload ID: 11319
  Gene Symbol: NOTCH2NL
  Gene Name: notch 2 N-terminal like
  Uniprot ID: Q7Z3S9
  ENSP ID: ENSP00000354929

SEQ ID NO: 57682 - protein, 236 aa, Homo sapiens; identical to SEQ ID NO: 56289
  Payload ID: 11319
  Gene Symbol: NOTCH2NL
  Gene Name: notch 2 N-terminal like
  Uniprot ID: Q7Z3S9
  ENSP ID: ENSP00000464060

SEQ ID NO: 57683 - protein, 230 aa, Homo sapiens
  Payload ID: 11319
  Gene Symbol: NOTCH2NL
  Gene Name: notch 2 N-terminal like
  Uniprot ID: Q7Z3S9
  ENSP ID: ENSP00000476330
MCVTYHNGTGYCKCPEGFLGEYCQHRDPCEKNRCQNGGTCVAQAMLGKATCRCASGFTGEDCQYSTSHPCFVSRPCLNGGTCHMLSRDTYECTCQVGFTGKECQWTDACLSHPCANGSTCTTVANQFSCKCLTGFTGQKCETDVNECDIPGHCQHGGTCLNLPGSYQCQCLQGFTGQYCDSLYVPCAPSPCVNGGTCRQTGDFTFECNCLPATWPIFPKLLSLQEKESYC

SEQ ID NO: 57684 - protein, 2321 aa, Homo sapiens
  Payload ID: 11320
  Gene Symbol: NOTCH3
  Gene Name: notch 3
  Uniprot ID: Q9UM47
  ENSP ID: ENSP00000263388
MGPGARGRRRRRRPMSPPPPPPPVRALPLLLLLAGPGAAAPPCLDGSPCANGGRCTQLPSREAACLCPPGWVGERCQLEDPCHSGPCAGRGVCQSSVVAGTARFSCRCPRGFRGPDCSLPDPCLSSPCAHGARCSVGPDGRFLCSCPPGYQGRSCRSDVDECRVGEPCRHGGTCLNTPGSFRCQCPAGYTGPLCENPAVPCAPSPCRNGGTCRQSGDLTYDCACLPGFEGQNCEVNVDDCPGHRCLNGGTCVDGVNTYNCQCPPEWTGQFCTEDVDECQLQPNACHNGGTCFNTLGGHSCVCVNGWTGESCSQNIDDCATAVCFHGATCHDRVASFYCACPMGKTGLLCHLDDACVSNPCHEDAICDTNPVNGRAICTCPPGFTGGACDQDVDECSIGANPCEHLGRCVNTQGSFLCQCGRGYTGPRCETDVNECLSGPCRNQATCLDRIGQFTCICMAGFTGTYCEVDIDECQSSPCVNGGVCKDRVNGFSCTCPSGFSGSTCQLDVDECASTPCRNGAKCVDQPDGYECRCAEGFEGTLCDRNVDDCSPDPCHHGRCVDGIASFSCACAPGYTGTRCESQVDECRSQPCRHGGKCLDLVDKYLCRCPSGTTGVNCEVNIDDCASNPCTFGVCRDGINRYDCVCQPGFTGPLCNVEINECASSPCGEGGSCVDGENGFRCLCPPGSLPPLCLPPSHPCAHEPCSHGICYDAPGGFRCVCEPGWSGPRCSQSLARDACESQPCRAGGTCSSDGMGFHCTCPPGVQGRQCELLSPCTPNPCEHGGRCESAPGQLPVCSCPQGWQGPRCQQDVDECAGPAPCGPHGICTNLAGSFSCTCHGGYTGPSCDQDINDCDPNPCLNGGSCQDGVGSFSCSCLPGFAGPRCARDVDECLSNPCGPGTCTDHVASFTCTCPPGYGGFHCEQDLPDCSPSSCFNGGTCVDGVNSFSCLCRPGYTGAHCQHEADPCLSRPCLHGGVCSAAHPGFRCTCLESFTGPQCQTLVDWCSRQPCQNGGRCVQTGAYCLCPPGWSGRLCDIRSLPCREAAAQIGVRLEQLCQAGGQCVDEDSSHYCVCPEGRTGSHCEQEVDPCLAQPCQHGGTCRGYMGGYMCECLPGYNGDNCEDDVDECASQPCQHGGSCIDLVARYLCSCPPGTLGVLCEINEDDCGPGPPLDSGPRCLHNGTCVDLVGGFRCTCPPGYTGLRCEADINECRSGACHAAHTRDCLQDPGGGFRCLCHAGFSGPRCQTVLSPCESQPCQHGGQCRPSPGPGGGLTFTCHCAQPFWGPRCERVARSCRELQCPVGVPCQQTPRGPRCACPPGLSGPSCRSFPGSPPGASNASCAAAPCLHGGSCRPAPLAPFFRCACAQGWTGPRCEAPAAAPEVSEEPRCPRAACQAKRGDQRCDRECNSPGCGWDGGDCSLSVGDPWRQCEALQCWRLFNNSRCDPACSSPACLYDNFDCHAGGRERTCNPVYEKYCADHFADGRCDQGCNTEECGWDGLDCASEVPALLARGVLVLTVLLPPEELLRSSADFLQRLSAILRTSLRFRLDAHGQAMVFPYHRPSPGSEPRARRELAPEVIGSVVMLEIDNRLCLQSPENDHCFPDAQSAADYLGALSAVERLDFPYPLRDVRGEPLEPPEPSVPLLPLLVAGAVLLLVILVLGVMVARRKREHSTLWFPEGFSLHKDVASGHKGRREPVGQDALGMKNMAKGESLMGEVATDWMDTECPEAKRLKVEEPGMGAEEAVDCRQWTQHHLVAADIRVAPAMALTPPQGDADADGMDVNVRGPDGFTPLMLASFCGGALEPMPTEEDEADDTSASIISDLICQGAQLGARTDRTGETALHLAARYARADAAKRLLDAGADTNAQDHSGRTPLHTAVTADAQGVFQILIRNRSTDLDARMADGSTALILAARLAVEGMVEELIASHADVNAVDELGKSALHWAAAVNNVEATLALLKNGANKDMQDSKEETPLFLAAREGSYEAAKLLLDHFANREITDHLDRLPRDVAQERLHQDIVRLLDQPSGPRSPPGPHGLGPLLCPPGAFLPGLKAAQSGSKKSRRPPGKAGLGPQGPRGRGKKLTLACPGPLADSSVTLSPVDSLDSPRPFGGPPASPGGFPLEGPYAAATATAVSLAQLGGPGRAGLGRQPPGGCVLSLGLLNPVAVPLDWARLPPPAPPGPSFLLPLAPGPQLLNPGTPVSPQERPPPYLAVPGHGEEYPAAGAHSSPPKARFLRVPSEHPYLTPSPESPEHWASPSPPSLSDWSESTPSPATATGAMATTTGALPAQPLPLSVPSSLAQAQTQLGPQPEVTPKRQVLA

SEQ ID NO: 57685 - protein, 177 aa, Homo sapiens
  Payload ID: 11320
  Gene Symbol: NOTCH3
  Gene Name: notch 3
  ENSP ID: ENSP00000468879
  MOD_RES (1)..(1): Any amino acid
XQLGARTDRTGETALHLAARYARADAAKRLLDAGADTNAQDHSGRTPLHTAVTADAQGVFQILIRNRSTDLDARMADGSTALILAARLAVEGMVEELIASHADVNAVDELGKSALHWAAAVNNVEATLALLKNGANKDMQDSKVSPSPWSTGCQQWHSAIAIQPGQQSETLSKNKTK

SEQ ID NO: 57686 - protein, 117 aa, Homo sapiens
  Payload ID: 11320
  Gene Symbol: NOTCH3
  Gene Name: notch 3
  ENSP ID: ENSP00000470661
  MOD_RES (1)..(1): Any amino acid
XLMGEVATDWMDTECPEAKRLKVEEPGMGAEEAVDCRQWTQHHLVAADIRVAPAMALTPPQGDADADGMDVNVRGPDSHPKPLYRLGCPHGRWLNGTDPGGPPGSRGHGGRAHRQPC

SEQ ID NO: 57687 - protein, 1286 aa, Homo sapiens
  Payload ID: 11320
  Gene Symbol: NOTCH3
  Gene Name: notch 3
  ENSP ID: ENSP00000473138
GPGARGRRRRRRPMSPPPPPPPVRALPLLLLLAGPGAAAPPCLDGSPCANGGRCTQLPSREAACLCPPGWVGERCQLEDPCHSGPCAGRGVCQSSVVAGTARFSCRCPRGFRGPDCSLPDPCLSSPCAHGARCSVGPDGRFLCSCPPGYQGRSCRSDVDECRVGEPCRHGGTCLNTPGSFRCQCPAGYTGPLCENPAVPCAPSPCRNGGTCRQSGDLTYDCACLPGFEGQNCEVNVDDCPGHRCLNGGTCVDGVNTYNCQCPPEWTGQFCTEDVDECQLQPNACHNGGTCFNTLGGHSCVCVNGWTGESCSQNIDDCATAVCFHGATCHDRVASFYCACPMGKTGLLCHLDDACVSNPCHEDAICDTNPVNGRAICTCPPGFTGGACDQDVDECSIGANPCEHLGRCVNTQGSFLCQCGRGYTGPRCETDVNECLSGPCRNQATCLDRIGQFTCICMAGFTGTYCEVDIDECQSSPCVNGGVCKDRVNGFSCTCPSGFSGSTCQLDVDECASTPCRNGAKCVDQPDGYECRCAEGFEGTLCDRNVDDCSPDPCHHGRCVDGIASFSCACAPGYTGTRCESQVDECRSQPCRHGGKCLDLVDKYLCRCPSGTTGVNCEVNIDDCASNPCTFGVCRDGINRYDCVCQPGFTGPLCNVEINECASSPCGEGGSCVDGENGFRCLCPPGSLPPLCLPPSHPCAHEPCSHGICYDAPGGFRCVCEPGWSGPRCSQSLARDACESQPCRAGGTCSSDGMGFHCTCPPGVQGRQCELLSPCTPNPCEHGGRCESAPGQLPVCSCPQGWQDPCLNGGSCQDGVGSFSCSCLPGFAGPRCARDVDECLSNPCGPGTCTDHVASFTCTCPPGYGGFHCEQDLPDCSPSSCFNGGTCVDGVNSFSCLCRPGYTGAHCQHEADPCLSRPCLHGGVCSAAHPGFRCTCLESFTGPQCQTLVDWCSRQPCQNGGRCVQTGAYCLCPPGWSGRLCDIRSLPCREAAAQIGVRLEQLCQAGGQCVDEDSSHYCVCPEGRTGSHCEQEVDPCLAQPCQHGGTCRGYMGGYMCECLPGYNGDNCEDDVDECASQPCQHGGSCIDLVARYLCSCPPGTLGVLCEINEDDCGPGPPLDSGPRCLHNGTCVDLVGGFRCTCPPGYTGLRCEADINECRSGACHAAHTRDCLQDPGGGFRCLCHAGFSGPRCQTVLSPCESQPCQHGGQCRPSPGPGGGLTFTCHCAQPFWGPRCERVARSCRELQCPVGVPCQQTPRGPRCACPPGLSGPSCRSFPGSPPGASNASC

SEQ ID NO: 57688 - protein, 2003 aa, Homo sapiens
  Payload ID: 11321
  Gene Symbol: NOTCH4
  Gene Name: notch 4
  Uniprot ID: Q99466
  ENSP ID: ENSP00000364163
MQPPSLLLLLLLLLLLCVSVVRPRGLLCGSFPEPCANGGTCLSLSLGQGTCQCAPGFLGETCQFPDPCQNAQLCQNGGSCQALLPAPLGLPSSPSPLTPSFLCTCLPGFTGERCQAKLEDPCPPSFCSKRGRCHIQASGRPQCSCMPGWTGEQCQLRDFCSANPCVNGGVCLATYPQIQCHCPPGFEGHACERDVNECFQDPGPCPKGTSCHNTLGSFQCLCPVGQEGPRCELRAGPCPPRGCSNGGTCQLMPEKDSTFHLCLCPPGFIGPDCEVNPDNCVSHQCQNGGTCQDGLDTYTCLCPETWTGWDCSEDVDECETQGPPHCRNGGTCQNSAGSFHCVCVSGWGGTSCEENLDDCIAATCAPGSTCIDRVGSFSCLCPPGRTGLLCHLEDMCLSQPCHGDAQCSTNPLTGSTLCLCQPGYSGPTCHQDLDECLMAQQGPSPCEHGGSCLNTPGSFNCLCPPGYTGSRCEADHNECLSQPCHPGSTCLDLLATFHCLCPPGLEGQLCEVETNECASAPCLNHADCHDLLNGFQCICLPGFSGTRCEEDIDECRSSPCANGGQCQDQPGAFHCKCLPGFEGPRCQTEVDECLSDPCPVGASCLDLPGAFFCLCPSGFTGQLCEVPLCAPNLCQPKQICKDQKDKANCLCPDGSPGCAPPEDNCTCHHGHCQRSSCVCDVGWTGPECEAELGGCISAPCAHGGTCYPQPSGYNCTCPTGYTGPTCSEEMTACHSGPCLNGGSCNPSPGGYYCTCPPSHTGPQCQTSTDYCVSAPCFNGGTCVNRPGTFSCLCAMGFQGPRCEGKLRPSCADSPCRNRATCQDSPQGPRCLCPTGYTGGSCQTLMDLCAQKPCPRNSHCLQTGPSFHCLCLQGWTGPLCNLPLSSCQKAALSQGIDVSSLCHNGGLCVDSGPSYFCHCPPGFQGSLCQDHVNPCESRPCQNGATCMAQPSGYLCQCAPGYDGQNCSKELDACQSQPCHNHGTCTPKPGGFHCACPPGFVGLRCEGDVDECLDQPCHPTGTAACHSLANAFYCQCLPGHTGQWCEVEIDPCHSQPCFHGGTCEATAGSPLGFICHCPKGFEGPTCSHRAPSCGFHHCHHGGLCLPSPKPGFPPRCACLSGYGGPDCLTPPAPKGCGPPSPCLYNGSCSETTGLGGPGFRCSCPHSSPGPRCQKPGAKGCEGRSGDGACDAGCSGPGGNWDGGDCSLGVPDPWKGCPSHSRCWLLFRDGQCHPQCDSEECLFDGYDCETPPACTPAYDQYCHDHFHNGHCEKGCNTAECGWDGGDCRPEDGDPEWGPSLALLVVLSPPALDQQLFALARVLSLTLRVGLWVRKDRDGRDMVYPYPGARAEEKLGGTRDPTYQERAAPQTQPLGKETDSLSAGFVVVMGVDLSRCGPDHPASRCPWDPGLLLRFLAAMAAVGALEPLLPGPLLAVHPHAGTAPPANQLPWPVLCSPVAGVILLALGALLVLQLIRRRRREHGALWLPPGFTRRPRTQSAPHRRRPPLGEDSIGLKALKPKAEVDEDGVVMCSGPEEGEEVGQAEETGPPSTCQLWSLSGGCGALPQAAMLTPPQESEMEAPDLDTRGPDGVTPLMSAVCCGEVQSGTFQGAWLGCPEPWEPLLDGGACPQAHTVGTGETPLHLAARFSRPTAARRLLEAGANPNQPDRAGRTPLHAAVAADAREVCQLLLRSRQTAVDARTEDGTTPLMLAARLAVEDLVEELIAAQADVGARDKWGKTALHWAAAVNNARAARSLLQAGADKDAQDNREQTPLFLAAREGAVEVAQLLLGLGAARELRDQAGLAPADVAHQRNHWDLLTLLEGAGPPEARHKATPGREAGPFPRARTVSVSVPPHGGGALPRCRTLSAGAGPRGGGACLQARTWSVDLAARGGGAYSHCRSLSGVGAGGGPTPRGRRFSAGMRGPRPNPAIMRGRYGVAAGRGGRVSTDDWPCDWVALGACGSASNIPIPPPCLTPSPERGSPQLDCGPPALQEMPINQGGEGKK

SEQ ID NO: 57689 - protein, 2003 aa, Homo sapiens
  Payload ID: 11321
  Gene Symbol: NOTCH4
  Gene Name: notch 4
  ENSP ID: ENSP00000372751
MQPPSLLLLLLLLLLLCVSVVRPRGLLCGSFPEPCANGGTCLSLSLGQGTCQCAPGFLGETCQFPDPCQNAQLCQNGGSCQALLPAPLGLPSSPSPLTPSFLCTCLPGFTGERCQAKLEDPCPPSFCSKRGRCHIQASGRPQCSCMPGWTGEQCQLRDFCSANPCVNGGVCLATYPQIQCHCPPGFEGHACERDVNECFQDPGPCPKGTSCHNTLGSFQCLCPVGQEGPRCELRAGPCPPRGCSNGGTCQLMPEKDSTFHLCLCPPGFIGPDCEVNPDNCVSHQCQNGGTCQDGLDTYTCLCPETWTGWDCSEDVDECETQGPPHCRNGGTCQNSAGSFHCVCVSGWGGTSCEENLDDCIAATCAPGSTCIDRVGSFSCLCPPGRTGLLCHLEDMCLSQPCHGDAQCSTNPLTGSTLCLCQPGYSGPTCHQDLDECLMAQQGPSPCEHGGSCLNTPGSFNCLCPPGYTGSRCEADHNECLSQPCHPGSTCLDLLATFHCLCPPGLEGQLCEVETNECASAPCLNHADCHDLLNGFQCICLPGFSGTRCEEDIDECRSSPCANGGQCQDQPGAFHCKCLPGFEGPRCQTEVDECLSDPCPVGASCLDLPGAFFCLCPSGFTGQLCEVPLCAPNLCQPKQICKDQKDKANCLCPDGSPGCAPPEDNCTCHHGHCQRSSCVCDVGWTGPECEAELGGCISAPCAHGGTCYPQPSGYNCTCPTGYTGPTCSEEMTACHSGPCLNGGSCNPSPGGYYCTCPPSHTGPQCQTSTDYCVSAPCFNGGTCVNRPGTFSCLCAMGFQGPRCEGKLRPSCADSPCRNRATCQDSPQGPRCLCPTVYTGGSCQTLMDLCAQKPCPRNSHCLQTGPSFHCLCLQGWTGPLCNLPLSSCQKAALSQGIDVSSLCHNGGLCVDSGPSYFCHCPPGFQGSLCQDHVNPCESRPCQNGATCMAQPSGYLCQCAPGYDGQNCSKELDACQSQPCHNHGTCTPKPGGFHCACPPGFVGLRCEGDVDECLDQPCHPTGTAACHSLANAFYCQCLPGHTGQWCEVEIDPCHSQPCFHGGTCEATAGSPLGFICHCPKGFEGPTCSHRAPSCGFHHCHHGGLCLPSPKPGFPPRCACLSGYGGPDCLTPPAPKGCGPPSPCLYNGSCSETTGLGGPGFRCSCPHSSPGPRCQKPGAKGCEGRSGDGACDAGCSGPGGNWDGGDCSLGVPDPWKGCPSHSRCWLLFRDGQCHPQCDSEECLFDGYDCETPPACTPAYDQYCHDHFHNGHCEKGCNTAECGWDGGDCRPEDGDPEWGPSLALLVVLSPPALDQQLFALARVLSLTLRVGLWVRKDRDGRDMVYPYPGARAEEKLGGTRDPTYQERAAPQTQPLGKETDSLSAGFVVVMGVDLSRCGPDHPASRCPWDPGLLLRFLAAMAAVGALEPLLPGPLLAVHPHAGTAPPANQLPWPVLCSPVAGVILLALGALLVLQLIRRRRREHGALWLPPGFTRRPRTQSAPHRRRPPLGEDSIGLKALKPKAEVDEDGVVMCSGPEEGEEVGQAEETGPPSTCQLWSLSGGCGALPQAAMLTPPQESEMEAPDLDTRGPDGVTPLMSAVCCGEVQSGTFQGAWLGCPEPWEPLLDGGACPQAHTVGTGETPLHLAARFSRPTAARRLLEAGANPNQPDRAGRTPLHAAVAADAREVCQLLLRSRQTAVDARTEDGTTPLMLAARLAVEDLVEELIAAQADVGARDKWGKTALHWAAAVNNARAARSLLQAGADKDAQDNREQTPLFLAAREGAVEVAQLLLGLGAARELRDQAGLAPADVAHQRNHWDLLTLLEGAGPPEARHKATPGREAGPFPRARTVSVSVPPHGGGALPRCRTLSAGAGPRGGGACLQARTWSVDLAARGGGAYSHCRSLSGVGAGGGPTPRGRRFSAGMRGPRPNPAIMRGRYGVAAGRGGRVSTDDWPCDWVALGACGSASNIPIPPPCLTPSPERGSPQLDCGPPALQEMPINQGGEGKK

SEQ ID NO: 57690 - protein, 2002 aa, Homo sapiens
  Payload ID: 11321
  Gene Symbol: NOTCH4
  Gene Name: notch 4
  ENSP ID: ENSP00000389207
MQPPSLLLLLLLLLLCVSVVRPRGLLCGSFPEPCANGGTCLSLSLGQGTCQCAPGFLGETCQFPDPCQNAQLCQNGGSCQALLPAPLGLPSSPSPLTPSFLCTCLPGFTGERCQAQLEDPCPPSFCSKRGRCHIQASGRPQCSCMPGWTGEQCQLRDFCSANPCVNGGVCLATYPQIQCHCPPGFEGHACERDVNECFQDPGPCPKGTSCHNTLGSFQCLCPVGQEGPRCELRAGPCPPRGCSNGGTCQLMPEKDSTFHLCLCPPGFIGPDCEVNPDNCVSHQCQNGGTCQDGLDTYTCLCPETWTGWDCSEDVDECETQGPPHCRNGGTCQNSAGSFHCVCVSGWGGTSCEENLDDCIAATCAPGSTCIDRVGSFSCLCPPGRTGLLCHLEDMCLSQPCHGDAQCSTNPLTGSTLCLCQPGYSGPTCHQDLDECLMAQQGPSPCEHGGSCLNTPGSFNCLCPPGYTGSRCEADHNECLSQPCHPGSTCLDLLATFHCLCPPGLEGQLCEVETNECASAPCLNHADCHDLLNGFQCICLPGFSGTRCEEDIDECRSSPCANGGQCQDQPGAFHCKCLPGFEGPRCQTEVDECLSDPCPVGASCLDLPGAFFCLCPSGFTGQLCEVPLCAPNLCQPKQICKDQKDKANCLCPDGSPGCAPPEDNCTCHHGHCQRSSCVCDVGWTGPECEAELGGCISAPCAHGGTCYPQPSGYNCTCPTGYTGPTCSEEMTACHSGPCLNGGSCNPSPGGYYCTCPPSHTGPQCQTSTDYCVSAPCFNGGTCVNRPGTFSCLCAMGFQGPRCEGKLRPSCADSPCRNRATCQDSPQGPRCLCPTGYTGGSCQTLMDLCAQKPCPRNSHCLQTGPSFHCLCLQGWTGPLCNLPLSSCQKAALSQGIDVSSLCHNGGLCVDSGPSYFCHCPPGFQGSLCQDHVNPCESRPCQNGATCMAQPSGYLCQCAPGYDGQNCSKELDACQSQPCHNHGTCTPKPGGFHCACPPGFVGLRCEGDVDECLDQPCHPTGTAACHSLANAFYCQCLPGHTGQWCEVEIDPCHSQPCFHGGTCEATAGSPLGFICHCPKGFEGPTCSHRAPSCGFHHCHHGGLCLPSPKPGFPPRCACLSGYGGPDCLTPPAPKGCGPPSPCLYNGSCSETTGLGGPGFRCSCPHSSPGPRCQKPGAKGCEGRSGDGACDAGCSGPGGNWDGGDCSLGVPDPWKGCPSHSRCWLLFRDGQCHPQCDSEECLFDGYDCETPPACTPAYDQYCHDHFHNGHCEKGCNTAECGWDGGDCRPEDGDPEWGPSLALLVVLSPPALDQQLFALARVLSLTLRVGLWVRKDRDGRDMVYPYPGARAEEKLGGTRDPTYQERAAPQTQPLGKETDSLSAGFVVVMGVDLSRCGPDHPASRCPWDPGLLLRFLAAMAAVGALEPLLPGPLLAVHPHAGTAPPANQLPWPVLCSPVAGVILLALGALLVLQLIRRRRREHGALWLPPGFTRRPRTQSAPHRRRPPLGEDSIGLKALKPKAEVDEDGVVMCSGPEEGEEVGQAEETGPPSTCQLWSLSGGCGALPQAAMLTPPQESEMEAPDLDTRGPDGVTPLMSAVCCGEVQSGTFQGAWLGCPEPWEPLLDGGACPQAHTVGTGETPLHLAARFSRPTAARRLLEAGANPNQPDRAGRTPLHAAVAADAREVCQLLLRSRQTAVDARTEDGTTPLMLAARLAVEDLVEELIAAQADVGARDKWGKTALHWAAAVNNARAARSLLQAGADKDAQDNREQTPLFLAAREGAVEVAQLLLGLGAARELRDQAGLAPADVAHQRNHWDLLTLLEGAGPPEARHKATPGREAGPFPRARTVSVSVPPHGGGALPRCRTLSAGAGPRGGGACLQARTWSVDLAARGGGAYSHCRSLSGVGAGGGPTPRGRRFSAGMRGPRPNPAIMRGRYGVAAGRGGRVSTDDWPCDWVALGACGSASNIPIPPPCLTPSPERGSPQLDCGPPALQEMPINQGGEGKK

SEQ ID NO: 57691 - protein, 1048 aa, Homo sapiens
  Payload ID: 11321
  Gene Symbol: NOTCH4
  Gene Name: notch 4
  Uniprot ID: Q99466
  ENSP ID: ENSP00000401321
CAPGYDGQNCSKELDACQSQPCHNHGTCTPKPGGFHCACPPGFVGLRCEGDVDECLDQPCHPTGTAACHSLANAFYCQCLPGHTGQWCEVEIDPCHSQPCFHGGTCEATAGSPLGFICHCPKGFEGPTCSHRAPSCGFHHCHHGGLCLPSPKPGFPPRCACLSGYGGPDCLTPPAPKGCGPPSPCLYNGSCSETTGLGGPGFRCSCPHSSPGPRCQKPGAKGCEGRSGDGACDAGCSGPGGNWDGGDCSLGVPDPWKGCPSHSRCWLLFRDGQCHPQCDSEECLFDGYDCETPPACTPAYDQYCHDHFHNGHCEKGCNTAECGWDGGDCRPEDGDPEWGPSLALLVVLSPPALDQQLFALARVLSLTLRVGLWVRKDRDGRDMVYPYPGARAEEKLGGTRDPTYQERAAPQTQPLGKETDSLSAGFVVVMGVDLSRCGPDHPASRCPWDPGLLLRFLAAMAAVGALEPLLPGPLLAVHPHAGTAPPANQLPWPVLCSPVAGVILLALGALLVLQLIRRRRREHGALWLPPGFTRRPRTQSAPHRRRPPLGEDSIGLKALKPKAEVDEDGVVMCSGPEEGEEVGQAEETGPPSTCQLWSLSGGCGALPQAAMLTPPQESEMEAPDLDTRGPDGVTPLMSAVCCGEVQSGTFQGAWLGCPEPWEPLLDGGACPQAHTVGTGETPLHLAARFSRPTAARRLLEAGANPNQPDRAGRTPLHAAVAADAREVCQLLLRSRQTAVDARTEDGTTPLMLAARLAVEDLVEELIAAQADVGARDKWGKTALHWAAAVNNARAARSLLQAGADKDAQDNREQTPLFLAAREGAVEVAQLLLGLGAARELRDQAGLAPADVAHQRNHWDLLTLLEGAGPPEARHKATPGREAGPFPRARTVSVSVPPHGGGALPRCRTLSAGAGPRGGGACLQARTWSVDLAARGGGAYSHCRSLSGVGAGGGPTPRGRRFSAGMRGPRPNPAIMRGRYGVAAGRGGRVSTDDWPCDWVALGACGSASNIPIPPPCLTPSPERGSPQLDCGPPALQEMPINQGGEGKK

SEQ ID NO: 57692 - protein, 2003 aa, Homo sapiens; identical to SEQ ID NO: 57688
  Payload ID: 11321
  Gene Symbol: NOTCH4
  Gene Name: notch 4
  Uniprot ID: Q99466
  ENSP ID: ENSP00000403447

SEQ ID NO: 57693 - protein, 2003 aa, Homo sapiens
  Payload ID: 11321
  Gene Symbol: NOTCH4
  Gene Name: notch 4
  Uniprot ID: Q99466
  ENSP ID: ENSP00000408335
MQPPSLLLLLLLLLLLCVSVVRPRGLLCGSFPEPCANGGTCLSLSLGQGTCQCAPGFLGETCQFPDPCQNAQLCQNGGSCQALLPAPLGLPSSPSPLTPSFLCTCLPGFTGERCQAQLEDPCPPSFCSKRGRCHIQASGRPQCSCMPGWTGEQCQLRDFCSANPCVNGGVCLATYPQIQCHCPPGFEGHACERDVNECFQDPGPCPKGTSCHNTLGSFQCLCPVGQEGPRCELRAGPCPPRGCSNGGTCQLMPEKDSTFHLCLCPPGFIGPDCEVNPDNCVSHQCQNGGTCQDGLDTYTCLCPETWTGWDCSEDVDECETQGPPHCRNGGTCQNSAGSFHCVCVSGWGGTSCEENLDDCIAATCAPGSTCIDRVGSFSCLCPPGRTGLLCHLEDMCLSQPCHGDAQCSTNPLTGSTLCLCQPGYSGPTCHQDLDECLMAQQGPSPCEHGGSCLNTPGSFNCLCPPGYTGSRCEADHNECLSQPCHPGSTCLDLLATFHCLCPPGLEGQLCEVETNECASAPCLNHADCHDLLNGFQCICLPGFSGTRCEEDIDECRSSPCANGGQCQDQPGAFHCKCLPGFEGPRCQTEVDECLSDPCPVGASCLDLPGAFFCLCPSGFTGQLCEVPLCAPNLCQPKQICKDQKDKANCLCPDGSPGCAPPEDNCTCHHGHCQRSSCVCDVGWTGPECEAELGGCISAPCAHGGTCYPQPSGYNCTCPTGYTGPTCSEEMTACHSGPCLNGGSCNPSPGGYYCTCPPSHTGPQCQTSTDYCVSAPCFNGGTCVNRPGTFSCLCAMGFQGPRCEGKLRPSCADSPCRNRATCQDSPQGPRCLCPTGYTGGSCQTLMDLCAQKPCPRNSHCLQTGPSFHCLCLQGWTGPLCNLPLSSCQKAALSQGIDVSSLCHNGGLCVDSGPSYFCHCPPGFQGSLCQDHVNPCESRPCQNGATCMAQPSGYLCQCAPGYDGQNCSKELDACQSQPCHNHGTCTPKPGGFHCACPPGFVGLRCEGDVDECLDQPCHPTGTAACHSLANAFYCQCLPGHTGQWCEVEIDPCHSQPCFHGGTCEATAGSPLGFICHCPKGFEGPTCSHRAPSCGFHHCHHGGLCLPSPKPGFPPRCACLSGYGGPDCLTPPAPKGCGPPSPCLYNGSCSETTGLGGPGFRCSCPHSSPGPRCQKPGAKGCEGRSGDGACDAGCSGPGGNWDGGDCSLGVPDPWKGCPSHSRCWLLFRDGQCHPQCDSEECLFDGYDCETPPACTPAYDQYCHDHFHNGHCEKGCNTAECGWDGGDCRPEDGDPEWGPSLALLVVLSPPALDQQLFALARVLSLTLRVGLWVRKDRDGRDMVYPYPGARAEEKLGGTRDPTYQERAAPQTQPLGKETDSLSAGFVVVMGVDLSRCGPDHPASRCPWDPGLLLRFLAAMAAVGALEPLLPGPLLAVHPHAGTAPPANQLPWPVLCSPVAGVILLALGALLVLQLIRRRRREHGALWLPPGFTRRPRTQSAPHRRRPPLGEDSIGLKALKPKAEVDEDGVVMCSGPEEGEEVGQAEETGPPSTCQLWSLSGGCGALPQAAMLTPPQESEMEAPDLDTRGPDGVTPLMSAVCCGEVQSGTFQGAWLGCPEPWEPLLDGGACPQAHTVGTGETPLHLAARFSRPTAARRLLEAGANPNQPDRAGRTPLHAAVAADAREVCQLLLRSRQTAVDARTEDGTTPLMLAARLAVEDLVEELIAAQADVGARDKWGKTALHWAAAVNNARAARSLLQAGADKDAQDNREQTPLFLAAREGAVEVAQLLLGLGAARELRDQAGLAPADVAHQRNHWDLLTLLEGAGPPEARHKATPGREAGPFPRARTVSVSVPPHGGGALPRCRTLSAGAGPRGGGACLQARTWSVDLAARGGGAYSHCRSLSGVGAGGGPTPRGRRFSAGMRGPRPNPAIMRGRYGVAAGRGGRVSTDDWPCDWVALGACGSASNIPIPPPCLTPSPERGSPQLDCGPPALQEMPINQGGEGKK

SEQ ID NO: 57694 - protein, 2005 aa, Homo sapiens
  Payload ID: 11321
  Gene Symbol: NOTCH4
  Gene Name: notch 4
  ENSP ID: ENSP00000410674
MQPPSLLLLLLLLLLLLLCVSVVRPRGLLCGSFPEPCANGGTCLSLSLGQGTCQCAPGFLGETCQFPDPCQNAQLCQNGGSCQALLPAPLGLPSSPSPLTPSFLCTCLPGFTGERCQAQLEDPCPPSFCSKRGRCHIQASGRPQCSCMPGWTGEQCQLRDFCSANPCVNGGVCLATYPQIQCHCPPGFEGHACERDVNECFQDPGPCPKGTSCHNTLGSFQCLCPVGQEGPRCELRAGPCPPRGCSNGGTCQLMPEKDSTFHLCLCPPGFIGPDCEVNPDNCVSHQCQNGGTCQDGLDTYTCLCPETWTGWDCSEDVDECEAQGPPHCRNGGTCQNSAGSFHCVCVSGWGGTSCEENLDDCIAATCAPGSTCIDRVGSFSCLCPPGRTGLLCHLEDMCLSQPCHGDAQCSTNPLTGSTLCLCQPGYSGPTCHQDLDECLMAQQGPSPCEHGGSCLNTPGSFNCLCPPGYTGSRCEADHNECLSQPCHPGSTCLDLLATFHCLCPPGLEGQLCEVETNECASAPCLNHADCHDLLNGFQCICLPGFSGTRCEEDIDECRSSPCANGGQCQDQPGAFHCKCLPGFEGPRCQTEVDECLSDPCPVGASCLDLPGAFFCLCPSGFTGQLCEVPLCAPNLCQPKQICKDQKDKANCLCPDGSPGCAPPEDNCTCHHGHCQRSSCVCDVGWTGPECEAELGGCISAPCAHGGTCYPQPSGYNCTCPTGYTGPTCSEEMTACHSGPCLNGGSCNPSPGGYYCTCPPSHTGPQCQTSTDYCVSAPCFNGGTCVNRPGTFSCLCAMGFQGPRCEGKLRPSCADSPCRNRATCQDSPQGPRCLCPTGYTGGSCQTLMDLCAQKPCPRNSHCLQTGPSFHCLCLQGWTGPLCNLPLSSCQKAALSQGIDVSSLCHNGGLCVDSGPSYFCHCPPGFQGSLCQDHVNPCESRPCQNGATCMAQPSGYLCQCAPGYDGQNCSKELDACQSQPCHNHGTCTPKPGGFHCACPPGFVGLRCEGDVDECLDQPCHPTGTAACHSLANAFYCQCLPGHTGQWCEVEIDPCHSQPCFHGGTCEATAGSPLGFICHCPKGFEGPTCSHRAPSCGFHHCHHGGLCLPSPKPGFPPRCACLSGYGGPDCLTPPAPKGCGPPSPCLYNGSCSETTGLGGPGFRCSCPHSSPGPRCQKPGAKGCEGRSGDGACDAGCSGPGGNWDGGDCSLGVPDPWKGCPSHSRCWLLFRDGQCHPQCDSEECLFDGYDCETPPACTPAYDQYCHDHFHNGHCEKGCNTAECGWDGGDCRPEDGDPEWGPSLALLVVLSPPALDQQLFALARVLSLTLRVGLWVRKDRDGRDMVYPYPGARAEEKLGGTRDPTYQERAAPQTQPLGKETDSLSAGFVVVMGVDLSRCGPDHPASRCPWDPGLLLRFLAAMAAVGALEPLLPGPLLAVHPHAGTAPPANQLPWPVLCSPVAGVILLALGALLVLQLIRRRRREHGALWLPPGFTRRPRTQSAPHRRRPPLGEDSIGLKALKPKAEVDEDGVVMCSGPEEGEEVGQAEETGPPSTCQLWSLSGGCGALPQAAMLTPPQESEMEAPDLDTRGPDGVTPLMSAVCCGEVQSGTFQGAWLGCPEPWEPLLDGGACPQAHTVGTGETPLHLAARFSRPTAARRLLEAGANPNQPDRAGRTPLHAAVAADAREVCQLLLRSRQTAVDARTEDGTTPLMLAARLAVEDLVEELIAAQADVGARDKWGKTALHWAAAVNNARAARSLLQAGADKDAQDNREQTPLFLAAREGAVEVAQLLLGLGAARELRDQAGLAPADVAHQRNHWDLLTLLEGAGPPEARHKATPGREAGPFPRARTVSVSVPPHGGGALPRCRTLSAGAGPRGGGACLQARTWSVDLAARGGGAYSHCRSLSGVGAGGGPTPRGRRFSAGMRGPRPNPAIMRGRYGVAAGRGGRVSTDDWPCDWVALGACGSASNIPIPPPCLTPSPERGSPQLDCGPPALQEMPINQGGEGKK

SEQ ID NO: 57695 - protein, 443 aa, Homo sapiens
  Payload ID: 11322
  Gene Symbol: NLE1
  Gene Name: notchless homolog 1 (Drosophila)
  ENSP ID: ENSP00000354075
MAAAVPDEAVARDVQRLLVQFQDEGGQLLGSPFDVPVDITPDRLQLVCNALLAQEDPLPLAFFVHDAEIVSSLGKTLESQAVETEKVLDIIYQPQAIFRVRAVTRCTSSLEGHSEAVISVAFSPTGKYLASGSGDTTILLWDPSTGKQVGRTLAGHSKWITGLSWEPLHANPECRYVASSSKDGSVRIWDTTAGRCERILTGHTQSVTCLRWGGDGLLYSASQDRTIKVWRAHDGVLCRTLQGHGHWVNTMALSTDYALRTGAFEPAEASVNPQDLQGSLQELKERALSRYNLVRGQGPERLVSGSDDFTLFLWSPAEDKKPLTRMTGHQALINQVLFSPDSRIVASASFDKSIKLWDGRTGKYLASLRGHVAAVYQIAWSADSRLLVSGSSDSTLKVWDVKAQKLAMDLPGHADEVYAVDWSPDGQRVASGGKDKCLRIWRR

SEQ ID NO: 57696 - protein, 485 aa, Homo sapiens
  Payload ID: 11322
  Gene Symbol: NLE1
  Gene Name: notchless homolog 1 (Drosophila)
  Uniprot ID: Q9NVX2
  ENSP ID: ENSP00000413572
MAAAVPDEAVARDVQRLLVQFQDEGGQLLGSPFDVPVDITPDRLQLVCNALLAQEDPLPLAFFVHDAEIVSSLGKTLESQAVETEKVLDIIYQPQAIFRVRAVTRCTSSLEGHSEAVISVAFSPTGKYLASGSGDTTVRFWDLSTETPHFTCKGHRHWVLSISWSPDGRKLASGCKNGQILLWDPSTGKQVGRTLAGHSKWITGLSWEPLHANPECRYVASSSKDGSVRIWDTTAGRCERILTGHTQSVTCLRWGGDGLLYSASQDRTIKVWRAHDGVLCRTLQGHGHWVNTMALSTDYALRTGAFEPAEASVNPQDLQGSLQELKERALSRYNLVRGQGPERLVSGSDDFTLFLWSPAEDKKPLTRMTGHQALINQVLFSPDSRIVASASFDKSIKLWDGRTGKYLASLRGHVAAVYQIAWSADSRLLVSGSSDSTLKVWDVKAQKLAMDLPGHADEVYAVDWSPDGQRVASGGKDKCLRIWRR

SEQ ID NO: 57697 - protein, 87 aa, Homo sapiens
  Payload ID: 11322
  Gene Symbol: NLE1
  Gene Name: notchless homolog 1 (Drosophila)
  ENSP ID: ENSP00000465420
MAAAVPDEAVARDVQRLLVQFQDEGGQLLGSPFDVPVDITPDRLQLVCNALLAQVPGQWLWRHHRALLGSQHRDTTFHMQGTQTLGP

SEQ ID NO: 57698 - protein, 193 aa, Homo sapiens
  Payload ID: 11322
  Gene Symbol: NLE1
  Gene Name: notchless homolog 1 (Drosophila)
  Uniprot ID: Q9NVX2
  ENSP ID: ENSP00000466588
MALSTDYALRTGAFEPAEASVNPQDLQGSLQELKERALSRYNLVRGQGPERLVSGSDDFTLFLWSPAEDKKPLTRMTGHQALINQVLFSPDSRIVASASFDKSIKLWDGRTGKYLASLRGHVAAVYQIAWSADSRLLVSGSSDSTLKVWDVKAQKLAMDLPGHADEVYAVDWSPDGQRVASGGKDKCLRIWRR

SEQ ID NO: 57699 - protein, 304 aa, Homo sapiens
  Payload ID: 11322
  Gene Symbol: NLE1
  Gene Name: notchless homolog 1 (Drosophila)
  ENSP ID: ENSP00000466764
  MOD_RES (1)..(1): Any amino acid
XSSKDGSVRIWDTTAGRCERILTGHTQSVTCLRWGGDGLLYSASQDRTIKVWRAHDGVLCRTLQGHGHWVNTMALSTDYALRTGAFEPAEASVNPQDLQGSLQELKERALSRYNLVRGQGPERLVSGSDDFTLFLWSPAEDKKPLTRMTGHQALINQVLFSPDSRIVASASFDKSIKLWDGRTGKDDFHSVTWCSSGSSAAARSWLITTSASWVQVILLPQPPRYLASLRGHVAAVYQIAWSADSRLLVSGSSDSTLKVWDVKAQKLAMDLPGHADEVYAVDWSPDGQRVASGGKDKCLRIWRR

SEQ ID NO: 57700 - protein, 127 aa, Homo sapiens
  Payload ID: 11322
  Gene Symbol: NLE1
  Gene Name: notchless homolog 1 (Drosophila)
  ENSP ID: ENSP00000468339
MAAAVPDEAVARDVQRLLVQFQDEGGQLLGSPFDVPVDITPDRLQLVCNALLAQEDPLPLAFFVHDAEIVSSLGKTLESQAVETEKVLDIIYQPQAIFRVRAVTRCTSSLEGHSEAVISVAFSPTGK

SEQ ID NO: 57701 - protein, 114 aa, Homo sapiens
  Payload ID: 11323
  Gene Symbol: NRARP
  Gene Name: NOTCH-regulated ankyrin repeat protein
  Uniprot ID: Q7Z6K4
  ENSP ID: ENSP00000349041
MSQAELSTCSAPQTQRIFQEAVRKGNTQELQSLLQNMTNCEFNVNSFGPEGQTALHQSVIDGNLELVKLLVKFGADIRLANRDGWSALHIAAFGGHQDIVLYLITKAKYAASGR

SEQ ID NO: 57702 - protein, 251 aa, Homo sapiens
  Payload ID: 11324
  Gene Symbol: NOTO
  Gene Name: notochord homeobox
  Uniprot ID: A8MTQ0
  ENSP ID: ENSP00000381486
MPSPRPRGSPPPAPSGSRVRPPRSGRSPAPRSPTGPNTPRAPGRFESPFSVEAILARPDPCAPAASQPSGSACVHPAFWTAASLCATGGLPWACPTSWLPAYLSVGFYPVPGPRVAPVCGLLGFGVTGLELAHCSGLWAFPDWAPTEDLQDTERQQKRVRTMFNLEQLEELEKVFAKQHNLVGKKRAQLAARLKLTENQVRVWFQNRRVKYQKQQKLRAAVTSAEAASLDEPSSSSIASIQSDDAESGVDG

SEQ ID NO: 57703 - protein, 496 aa, Homo sapiens
  Payload ID: 11325
  Gene Symbol: NOTUM
  Gene Name: notum pectinacetylesterase homolog (Drosophila)
  Uniprot ID: Q6P988
  ENSP ID: ENSP00000387310
MGRGVRVLLLLSLLHCAGGSEGRKTWRRRGQQPPPPPRTEAAPAAGQPVESFPLDFTAVEGNMDSFMAQVKSLAQSLYPCSAQQLNEDLRLHLLLNTSVTCNDGSPAGYYLKESRGSRRWLLFLEGGWYCFNRENCDSRYDTMRRLMSSRDWPRTRTGTGILSSQPEENPYWWNANMVFIPYCSSDVWSGASSKSEKNEYAFMGALIIQEVVRELLGRGLSGAKVLLLAGSSAGGTGVLLNVDRVAEQLEKLGYPAIQVRGLADSGWFLDNKQYRHTDCVDTITCAPTEAIRRGIRYWNGVVPERCRRQFQEGEEWNCFFGYKVYPTLRCPVFVVQWLFDEAQLTVDNVHLTGQPVQEGLRLYIQNLGRELRHTLKDVPASFAPACLSHEIIIRSHWTDVQVKGTSLPRALHCWDRSLHDSHKASKTPLKGCPVHLVDSCPWPHCNPSCPTVRDQFTGQEMNVAQFLMHMGFDMQTVAQPQGLEPSELLGMLSNGS

SEQ ID NO: 57704 - protein, 295 aa, Homo sapiens
  Payload ID: 11325
  Gene Symbol: NOTUM
  Gene Name: notum pectinacetylesterase homolog (Drosophila)
  ENSP ID: ENSP00000407905
MGRGVRVLLLLSLLHCAGGSEGRKTWRRRGQQPPPPPRTEAAPAAGQPVESFPLDFTAVEGNMDSFMAQVKSLAQSLYPCSAQQLNEDLRLHLLLNTSVTCNDGSPAGYYLKESRGSRRWLLFLEGGWYCFNRENCDSRYDTMRRLMSSRDWPRTRTGTGILSSQPEENPYWWNANMVFIPYCSSDVWSGASSKSEKNEYAFMGALIIQEVVRELLGRGLSGAKVLLLAGSSAGGTGVLLNVDRVAEQLEKLGYPAIQVRGLADSGWFLDNKQYRHTDCVDTITCAPTEAIRRGI

SEQ ID NO: 57705 - protein, 197 aa, Homo sapiens
  Payload ID: 11325
  Gene Symbol: NOTUM
  Gene Name: notum pectinacetylesterase homolog (Drosophila)
  ENSP ID: ENSP00000464734
MRRLMSSRDWPRTRTGTGILSSQPEENPYWWNANMVFIPYCSSDVWSGASSKSEKNEYAFMGALIIQEVVRELLGRGLSGAKVLLLAGSSAGGTGVLLNVDRVAEQLEKLGYPAIQVRGLADSGWFLDNKQYRHTDCVDTITCAPTEAIRRGIRYWNGVVPERCRRQFQEGEEWNCFFGYKVYPTLRCPVFVVQWLF

SEQ ID NO: 57706 - protein, 1359 aa, Homo sapiens
  Payload ID: 11326
  Gene Symbol: NPC1L1
  Gene Name: NPC1-like 1
  Uniprot ID: Q9UHC9
  ENSP ID: ENSP00000289547
MAEAGLRGWLLWALLLRLAQSEPYTTIHQPGYCAFYDECGKNPELSGSLMTLSNVSCLSNTPARKITGDHLILLQKICPRLYTGPNTQACCSAKQLVSLEASLSITKALLTRCPACSDNFVNLHCHNTCSPNQSLFINVTRVAQLGAGQLPAVVAYEAFYQHSFAEQSYDSCSRVRVPAAATLAVGTMCGVYGSALCNAQRWLNFQGDTGNGLAPLDITFHLLEPGQAVGSGIQPLNEGVARCNESQGDDVATCSCQDCAASCPAIARPQALDSTFYLGQMPGSLVLIIILCSVFAVVTILLVGFRVAPARDKSKMVDPKKGTSLSDKLSFSTHTLLGQFFQGWGTWVASWPLTILVLSVIPVVALAAGLVFTELTTDPVELWSAPNSQARSEKAFHDQHFGPFFRTNQVILTAPNRSSYRYDSLLLGPKNFSGILDLDLLLELLELQERLRHLQVWSPEAQRNISLQDICYAPLNPDNTSLYDCCINSLLQYFQNNRTLLLLTANQTLMGQTSQVDWKDHFLYCANAPLTFKDGTALALSCMADYGAPVFPFLAIGGYKGKDYSEAEALIMTFSLNNYPAGDPRLAQAKLWEEAFLEEMRAFQRRMAGMFQVTFMAERSLEDEINRTTAEDLPIFATSYIVIFLYISLALGSYSSWSRVMVDSKATLGLGGVAVVLGAVMAAMGFFSYLGIRSSLVILQVVPFLVLSVGADNIFIFVLEYQRLPRRPGEPREVHIGRALGRVAPSMLLCSLSEAICFFLGALTPMPAVRTFALTSGLAVILDFLLQMSAFVALLSLDSKRQEASRLDVCCCVKPQELPPPGQGEGLLLGFFQKAYAPFLLHWITRGVVLLLFLALFGVSLYSMCHISVGLDQELALPKDSYLLDYFLFLNRYFEVGAPVYFVTTLGYNFSSEAGMNAICSSAGCNNFSFTQKIQYATEFPEQSYLAIPASSWVDDFIDWLTPSSCCRLYISGPNKDKFCPSTVNSLNCLKNCMSITMGSVRPSVEQFHKYLPWFLNDRPNIKCPKGGLAAYSTSVNLTSDGQVLDTVAILSPRLEYSGTISAHCNLYLLDSTSRFMAYHKPLKNSQDYTEALRAARELAANITADLRKVPGTDPAFEVFPYTITNVFYEQYLTILPEGLFMLSLCLVPTFAVSCLLLGLDLRSGLLNLLSIVMILVDTVGFMALWGISYNAVSLINLVSAVGMSVEFVSHITRSFAISTKPTWLERAKEATISMGSAVFAGVAMTNLPGILVLGLAKAQLIQIFFFRLNLLITLLGLLHGLVFLPVILSYVGPDVNPALALEQKRAEEAVAAVMVASCPNHPSRVSTADNIYVNHSFEGSIKGAGAISNFLPNNGRQF

SEQ ID NO: 57707 - protein, 1332 aa, Homo sapiens
  Payload ID: 11326
  Gene Symbol: NPC1L1
  Gene Name: NPC1-like 1
  ENSP ID: ENSP00000370552
MAEAGLRGWLLWALLLRLAQSEPYTTIHQPGYCAFYDECGKNPELSGSLMTLSNVSCLSNTPARKITGDHLILLQKICPRLYTGPNTQACCSAKQLVSLEASLSITKALLTRCPACSDNFVNLHCHNTCSPNQSLFINVTRVAQLGAGQLPAVVAYEAFYQHSFAEQSYDSCSRVRVPAAATLAVGTMCGVYGSALCNAQRWLNFQGDTGNGLAPLDITFHLLEPGQAVGSGIQPLNEGVARCNESQGDDVATCSCQDCAASCPAIARPQALDSTFYLGQMPGSLVLIIILCSVFAVVTILLVGFRVAPARDKSKMVDPKKGTSLSDKLSFSTHTLLGQFFQGWGTWVASWPLTILVLSVIPVVALAAGLVFTELTTDPVELWSAPNSQARSEKAFHDQHFGPFFRTNQVILTAPNRSSYRYDSLLLGPKNFSGILDLDLLLELLELQERLRHLQVWSPEAQRNISLQDICYAPLNPDNTSLYDCCINSLLQYFQNNRTLLLLTANQTLMGQTSQVDWKDHFLYCANAPLTFKDGTALALSCMADYGAPVFPFLAIGGYKGKDYSEAEALIMTFSLNNYPAGDPRLAQAKLWEEAFLEEMRAFQRRMAGMFQVTFMAERSLEDEINRTTAEDLPIFATSYIVIFLYISLALGSYSSWSRVMVDSKATLGLGGVAVVLGAVMAAMGFFSYLGIRSSLVILQVVPFLVLSVGADNIFIFVLEYQRLPRRPGEPREVHIGRALGRVAPSMLLCSLSEAICFFLGALTPMPAVRTFALTSGLAVILDFLLQMSAFVALLSLDSKRQEASRLDVCCCVKPQELPPPGQGEGLLLGFFQKAYAPFLLHWITRGVVLLLFLALFGVSLYSMCHISVGLDQELALPKDSYLLDYFLFLNRYFEVGAPVYFVTTLGYNFSSEAGMNAICSSAGCNNFSFTQKIQYATEFPEQSYLAIPASSWVDDFIDWLTPSSCCRLYISGPNKDKFCPSTVNSLNCLKNCMSITMGSVRPSVEQFHKYLPWFLNDRPNIKCPKGGLAAYSTSVNLTSDGQVLASRFMAYHKPLKNSQDYTEALRAARELAANITADLRKVPGTDPAFEVFPYTITNVFYEQYLTILPEGLFMLSLCLVPTFAVSCLLLGLDLRSGLLNLLSIVMILVDTVGFMALWGISYNAVSLINLVSAVGMSVEFVSHITRSFAISTKPTWLERAKEATISMGSAVFAGVAMTNLPGILVLGLAKAQLIQIFFFRLNLLITLLGLLHGLVFLPVILSYVGPDVNPALALEQKRAEEAVAAVMVASCPNHPSRVSTADNIYVNHSFEGSIKGAGAISNFLPNNGRQF

SEQ ID NO: 57708 - protein, 724 aa, Homo sapiens
  Payload ID: 11326
  Gene Symbol: NPC1L1
  Gene Name: NPC1-like 1
  Uniprot ID: Q9UHC9
  ENSP ID: ENSP00000404670
MAEAGLRGWLLWALLLRLAQSEPYTTIHQPGYCAFYDECGKNPELSGSLMTLSNVSCLSNTPARKITGDHLILLQKICPRLYTGPNTQACCSAKQLVSLEASLSITKALLTRCPACSDNFVNLHCHNTCSPNQSLFINVTRVAQLGAGQLPAVVAYEAFYQHSFAEQSYDSCSRVRVPAAATLAVGTMCGVYGSALCNAQRWLNFQGDTGNGLAPLDITFHLLEPGQAVGSGIQPLNEGVARCNESQGDDVATCSCQDCAASCPAIARPQALDSTFYLGQMPGSLVLIIILCSVFAVVTILLVGFRVAPARDKSKMVDPKKGTSLSDKLSFSTHTLLGQFFQGWGTWVASWPLTILVLSVIPVVALAAGLVFTELTTDPVELWSAPNSQARSEKAFHDQHFGPFFRTNQVILTAPNRSSYRYDSLLLGPKNFSGILDLDLLLELLELQERLRHLQVWSPEAQRNISLQDICYAPLNPDNTSLYDCCINSLLQYFQNNRTLLLLTANQTLMGQTSQVDWKDHFLYCANAPLTFKDGTALALSCMADYGAPVFPFLAIGGYKGKDYSEAEALIMTFSLNNYPAGDPRLAQAKLWEEAFLEEMRAFQRRMAGMFQVTFMAERSLEDEINRTTAEDLPIFATSYIVIFLYISLALGSYSSWSRVMVDSKATLGLGGVAVVLGAVMAAMGFFSYLGIRSSLVILQVVPFLVLSVGADNIFIFVLEYQGP

SEQ ID NO: 57709 - protein, 1286 aa, Homo sapiens
  Payload ID: 11326
  Gene Symbol: NPC1L1
  Gene Name: NPC1-like 1
  ENSP ID: ENSP00000438033
MAEAGLRGWLLWALLLRLAQSEPYTTIHQPGYCAFYDECGKNPELSGSLMTLSNVSCLSNTPARKITGDHLILLQKICPRLYTGPNTQACCSAKQLVSLEASLSITKALLTRCPACSDNFVNLHCHNTCSPNQSLFINVTRVAQLGAGQLPAVVAYEAFYQHSFAEQSYDSCSRVRVPAAATLAVGTMCGVYGSALCNAQRWLNFQGDTGNGLAPLDITFHLLEPGQAVGSGIQPLNEGVARCNESQGDDVATCSCQDCAASCPAIARPQALDSTFYLGQMPGSLVLIIILCSVFAVVTILLVGFRVAPARDKSKMVDPKKGTSLSDKLSFSTHTLLGQFFQGWGTWVASWPLTILVLSVIPVVALAAGLVFTELTTDPVELWSAPNSQARSEKAFHDQHFGPFFRTNQVILTAPNRSSYRYDSLLLGPKNFSGILDLDLLLELLELQERLRHLQVWSPEAQRNISLQDICYAPLNPDNTSLYDCCINSLLQYFQNNRTLLLLTANQTLMGQTSQVDWKDHFLYCANAPLTFKDGTALALSCMADYGAPVFPFLAIGGYKGKDYSEAEALIMTFSLNNYPAGDPRLAQAKLWEEAFLEEMRAFQRRMAGMFQVTFMAERSLEDEINRTTAEDLPIFATSYIVIFLYISLALGSYSSWSRVMVDSKATLGLGGVAVVLGAVMAAMGFFSYLGIRSSLVILQVVPFLVLSVGADNIFIFVLEYQRLPRRPGEPREVHIGRALGRVAPSMLLCSLSEAICFFLGALTPMPAVRTFALTSGLAVILDFLLQMSAFVALLSLDSKRQEASRLDVCCCVKPQELPPPGQGEGLLLGFFQKAYAPFLLHWITRGVVVGAPVYFVTTLGYNFSSEAGMNAICSSAGCNNFSFTQKIQYATEFPEQSYLAIPASSWVDDFIDWLTPSSCCRLYISGPNKDKFCPSTVNSLNCLKNCMSITMGSVRPSVEQFHKYLPWFLNDRPNIKCPKGGLAAYSTSVNLTSDGQVLASRFMAYHKPLKNSQDYTEALRAARELAANITADLRKVPGTDPAFEVFPYTITNVFYEQYLTILPEGLFMLSLCLVPTFAVSCLLLGLDLRSGLLNLLSIVMILVDTVGFMALWGISYNAVSLINLVSAVGMSVEFVSHITRSFAISTKPTWLERAKEATISMGSAVFAGVAMTNLPGILVLGLAKAQLIQIFFFRLNLLITLLGLLHGLVFLPVILSYVGPDVNPALALEQKRAEEAVAAVMVASCPNHPSRVSTADNIYVNHSFEGSIKGAGAISNFLPNNGRQF

SEQ ID NO: 57710 - protein, 150 aa, Homo sapiens
  Payload ID: 11327
  Gene Symbol: NPHP3-ACAD11
  Gene Name: NPHP3-ACAD11 readthrough (NMD candidate)
  ENSP ID: ENSP00000372769
MGTASSLVSPAGGEVIEDTYGAGGGEACEIPVEVKPKARLLRNSFRRGAGAAAGAGPGSLPRGVGAGGLLGASFKSTGSSVPELEYAAAEYERLRKEYEIFRVSKNQELLSMGRREAKLDTENKRLRAELQGLAAVARSRLTATWNSWAQ

SEQ ID NO: 57711 - protein, 636 aa, Homo sapiens
  Payload ID: 11327
  Gene Symbol: NPHP3-ACAD11
  Gene Name: NPHP3-ACAD11 readthrough (NMD candidate)
  ENSP ID: ENSP00000419763
MGTASSLVSPAGGEVIEDTYGAGGGEACEIPVEVKPKARLLRNSFRRGAGAAAGAGPGSLPRGVGAGGLLGASFKSTGSSVPELEYAAAEYERLRKEYEIFRVSKNQELLSMGRREAKLDTENKRLRAELQALQKTYQKILREKESALEAKYQAMERAATFEHDRDKVKRQFKIFRETKENEIQDLLRAKRELESKLQRLQAQGIQVFDPGESDSDDNCTDVTAAGTQCEYWTGGALGSEPSIGSMIQLQQSFRGPEFAHSSIDVEGPFANVNRDDWDIAVASLLQVTPLFSHSLWSNTVRCYLIYTDETQPEMDLFLKDYSPKLKRMCETMGYFFHAVYFPIDVENQYLTVRKWEIEKSSLVILFIHLTLPSLLLEDCEEAFLKNPEGKPRLIFHRLEDGKVSSDSVQQLIDQVSNLNKTSKAKIIDHSGDPAEGVYKTYICVEKIIKQDILGFENTDLETKDLGSEDSIPEEDDFGDVLWDIHDEQEQMETFQQASNSAHELGFEKYYQRLNDLVAAPAPIPPLLVSGGPGSGKSLLLSKWIQLQQKNSPNTLILSHFVGRPMSTSSESSLIIKRLTLKLMQHSWSVSALTLDPAKLLEEFPRWLEKLSARHQGSIIIVIDSIDQVQVVAYTSS

SEQ ID NO: 57712 - protein, 232 aa, Homo sapiens
  Payload ID: 11327
  Gene Symbol: NPHP3-ACAD11
  Gene Name: NPHP3-ACAD11 readthrough (NMD candidate)
  ENSP ID: ENSP00000488520
  MOD_RES (1)..(1): Any amino acid
XSLEMRERVLGPDHPDCAQSLNNLAALCNEKKQYDKAEELYERALDIRRRALAPDHPSLAYTVKHLAILYKKMGKLDKAVPLYELAVEIRQKSFGPKHPSVATALVNLAVLYSQMKKHVEALPLYERALKIYEDSLGRMHPRVGETLKNLAVLSYEGGDFEKAAELYKRAMEIKEAETSLLGGKAPSRHSSSGDTFSLKTAHSPNVFLQQGQRAGKSNPTFYLQKGFQTYVL

SEQ ID NO: 57713 - protein, 608 aa, Homo sapiens
  Payload ID: 11328
  Gene Symbol: NPLOC4
  Gene Name: NPL4 homolog, ubiquitin recognition factor
  Uniprot ID: Q8TAT6
  ENSP ID: ENSP00000331487
MAESIIIRVQSPDGVKRITATKRETAATFLKKVAKEFGFQNNGFSVYINRNKTGEITASSNKSLNLLKIKHGDLLFLFPSSLAGPSSEMETSVPPGFKVFGAPNVVEDEIDQYLSKQDGKIYRSRDPQLCRHGPLGKCVHCVPLEPFDEDYLNHLEPPVKHMSFHAYIRKLTGGADKGKFVALENISCKIKSGCEGHLPWPNGICTKCQPSAITLNRQKYRHVDNIMFENHTVADRFLDFWRKTGNQHFGYLYGRYTEHKDIPLGIRAEVAAIYEPPQIGTQNSLELLEDPKAEVVDEIAAKLGLRKVGWIFTDLVSEDTRKGTVRYSRNKDTYFLSSEECITAGDFQNKHPNMCRLSPDGHFGSKFVTAVATGGPDNQVHFEGYQVSNQCMALVRDECLLPCKDAPELGYAKESSSEQYVPDVFYKDVDKFGNEITQLARPLPVEYLIIDITTTFPKDPVYTFSISQNPFPIENRDVLGETQDFHSLATYLSQNTSSVFLDTISDFHLLLFLVTNEVMPLQDSISLLLEAVRTRNEELAQTWKRSEQWATIEQLCSTVGGQLPGLHEYGAVGGSTHTATAAMWACQHCTFMNQPGTGHCEMCSLPRT

SEQ ID NO: 57714 - protein, 617 aa, Homo sapiens
  Payload ID: 11328
  Gene Symbol: NPLOC4
  Gene Name: NPL4 homolog, ubiquitin recognition factor
  Uniprot ID: Q8TAT6
  ENSP ID: ENSP00000363879
MAESIIIRVQSPDGVKRITATKRETAATFLKKVAKEFGFQNNGFSVYINRNKTGEITASSNKSLNLLKIKHGDLLFLFPSSLAGPSSEMETSVPPGFKVFGAPNVVEDEIDQYLSKQDGKIYRSRDPQLCRHGPLGKCVHCVPLEPFDEDYLNHLEPPVKHMSFHAYIRKLTGGADKGKFVALENISCKIKSGCEGHLPWPNGICTKCQPSAITLNRQKYRHVDNIMFENHTVADRFLDFWRKTGNQHFGYLYGRYTEHKDIPLGIRAEVAAIYEPPQIGTQNSLELLEDPKAEVVDEIAAKLGLRKVGWIFTDLVSEDTRKGTVRYSRNKDTYFLSSEECITAGDFQNKHPNMCRLSPDGHFGSKFVTAVATGGPDNQVHFEGYQVSNQCMALVRDECLLPCKDAPELGYAKESSSEQYVPDVFYKDVDKFGNEITQLARPLPVEYLIIDITTTFPKDPVYTFSISQNPFPIENRDVLGETQDFHSLATYLSQNTSSVFLDTISDFHLLLFLVTNEVMPLQDSISLLLEAVRTRNEELAQTWKRSEQWATIEQLCSEYPHPLPRHPVAGAGEQPTLHSSPLPVVPWIPHPAASWQVPSAMQRVETRPPCQARGRLR

SEQ ID NO: 57715 - protein, 172 aa, Homo sapiens
  Payload ID: 11328
  Gene Symbol: NPLOC4
  Gene Name: NPL4 homolog, ubiquitin recognition factor
  ENSP ID: ENSP00000458384
  MOD_RES (1)..(1): Any amino acid
XYTFSISQNPFPIENRDVLGETQTESHSITQAGVQWCDLGSLQPPPPGFKRFFCFSLLSSWDYRTSIAWPPICLRIPHLCSWIPSQISTSCCSWSPMKLCLCRTASACCWRPCGPEMRSSPRHGRGLSSGPPSSSCAAQLAGSSQVSMSTAPSGAPHTRPLQPCGPVSTARS

SEQ ID NO: 57716 - protein, 145 aa, Homo sapiens
  Payload ID: 11328
  Gene Symbol: NPLOC4
  Gene Name: NPL4 homolog, ubiquitin recognition factor
  ENSP ID: ENSP00000459457
  MOD_RES (1)..(1): Any amino acid
XQNPFPIENRDVLGETQDFHSLATYLSQNTSSVFLDTISDFHLLLFLVTNEVMPLQDSISLLLEAVRTRNEELAQTWKRSEQWATIEQLCTSRVAGITDVYHHTWRCHLYAQLAGSSQVSMSTAPSGAPHTRPLQPCGPVSTARS

SEQ ID NO: 57717 - protein, 110 aa, Homo sapiens
  Payload ID: 11328
  Gene Symbol: NPLOC4
  Gene Name: NPL4 homolog, ubiquitin recognition factor
  ENSP ID: ENSP00000459462
TFPKDPVYTFSISQNPFPIENRDVLGETQDFHSLATYLSQNTSSVFLDTISDFHLLLFLVTNEVMPLQDSISLLLEAVRTRNEELAQTWKRSEQWATIEQLCKTGFHSVA

SEQ ID NO: 57718 - protein, 182 aa, Homo sapiens
  Payload ID: 11328
  Gene Symbol: NPLOC4
  Gene Name: NPL4 homolog, ubiquitin recognition factor
  ENSP ID: ENSP00000460465
GNEITQLARPLPVEYLIIDITTTFPKDPVYTFSISQNPFPIENRDVLGETQDFHSLATYLSQNTSSVFLDTISDFHLLLFLVTNEVMPLQDSISLLLEAVRTRNEELAQTWKRSEQWATIEQLCSSRHSPSSAFLVAGITGAHHHPQAQLAGSSQVSMSTAPSGAPHTRPLQPCGPVSTARS

SEQ ID NO: 57719 - protein, 58 aa, Homo sapiens
  Payload ID: 11328
  Gene Symbol: NPLOC4
  Gene Name: NPL4 homolog, ubiquitin recognition factor
  ENSP ID: ENSP00000461478
  MOD_RES (1)..(1): Any amino acid
XAPNVVEDEIDQYLSKQDGKIYRSRDPQLCRHGPLGKCVHCVPLEGEVCCPGEHQLQD

SEQ ID NO: 57720 - protein, 135 aa, Homo sapiens
  Payload ID: 11328
  Gene Symbol: NPLOC4
  Gene Name: NPL4 homolog, ubiquitin recognition factor
  ENSP ID: ENSP00000461543
MAESIIIRVQSPDGVKRITATKRETAATFLKKVAKEFGFQNNGFSVYINRNKTGEITASSNKSLNLLKIKHGDLLFLFPSSLAGPSSEMETSVPPGFKVFGAPNVVEDEIDQYLSKQDGKIYRSRDPQLHSMRTI

SEQ ID NO: 57721 - protein, 56 aa, Homo sapiens
  Payload ID: 11328
  Gene Symbol: NPLOC4
  Gene Name: NPL4 homolog, ubiquitin recognition factor
  ENSP ID: ENSP00000465247
MRSSPRHGRGLSSGPPSSSCAAQLAGSSQVSMSTAPSGAPHTRPLQPCGPVSTARS

SEQ ID NO: 57722 - protein, 56 aa, Homo sapiens; identical to SEQ ID NO: 57721
  Payload ID: 11328
  Gene Symbol: NPLOC4
  Gene Name: NPL4 homolog, ubiquitin recognition factor
  ENSP ID: ENSP00000467400

SEQ ID NO: 57723 - protein, 134 aa, Homo sapiens
  Payload ID: 11328
  Gene Symbol: NPLOC4
  Gene Name: NPL4 homolog, ubiquitin recognition factor
  ENSP ID: ENSP00000486640
MEAVIIRVQSPDGVKRITATKRETAATFLKKVAKEFGFQNNGFSVYINRNKTGEITASSNKSLNLLKIKHGDLLFLFPSSLAGPSSEMETSVPPGFKVFGAPNVVEDEIDQYLSKQDGKIYRSRDPQLHSMRTI

SEQ ID NO: 57724 - protein, 380 aa, Homo sapiens
  Payload ID: 11329
  Gene Symbol: NPRL2
  Gene Name: NPR2-like, GATOR1 complex subunit
  Uniprot ID: Q8WTW4
  ENSP ID: ENSP00000232501
MGSGCRIECIFFSEFHPTLGPKITYQVPEDFISRELFDTVQVYIITKPELQNKLITVTAMEKKLIGCPVCIEHKKYSRNALLFNLGFVCDAQAKTCALEPIVKKLAGYLTTLELESSFVSMEESKQKLVPIMTILLEELNASGRCTLPIDESNTIHLKVIEQRPDPPVAQEYDVPVFTKDKEDFFNSQWDLTTQQILPYIDGFRHIQKISAEADVELNLVRIAIQNLLYYGVVTLVSILQYSNVYCPTPKVQDLVDDKSLQEACLSYVTKQGHKRASLRDVFQLYCSLSPGTTVRDLIGRHPQQLQHVDERKLIQFGLMKNLIRRLQKYPVRVTREEQSHPARLYTGCHSYDEICCKTGMSYHELDERLENDPNIIICWK

SEQ ID NO: 57725 - protein, 87 aa, Homo sapiens
  Payload ID: 11329
  Gene Symbol: NPRL2
  Gene Name: NPR2-like, GATOR1 complex subunit
  ENSP ID: ENSP00000388019
MGSGCRIECIFFSEFHPTLGPKITYQVPEDFISRELFDTVQVYIITKPELQNKLITVYGKEADRLSCVHRTQEVQPQCSPLQPGLRV

SEQ ID NO: 57726 - protein, 87 aa, Homo sapiens; identical to SEQ ID NO: 57725
  Payload ID: 11329
  Gene Symbol: NPRL2
  Gene Name: NPR2-like, GATOR1 complex subunit
  ENSP ID: ENSP00000388358

SEQ ID NO: 57727 - protein, 87 aa, Homo sapiens; identical to SEQ ID NO: 57725
  Payload ID: 11329
  Gene Symbol: NPRL2
  Gene Name: NPR2-like, GATOR1 complex subunit
  ENSP ID: ENSP00000389429

SEQ ID NO: 57728 - protein, 87 aa, Homo sapiens; identical to SEQ ID NO: 57725
  Payload ID: 11329
  Gene Symbol: NPRL2
  Gene Name: NPR2-like, GATOR1 complex subunit
  ENSP ID: ENSP00000396172

SEQ ID NO: 57729 - protein, 57 aa, Homo sapiens
  Payload ID: 11329
  Gene Symbol: NPRL2
  Gene Name: NPR2-like, GATOR1 complex subunit
  ENSP ID: ENSP00000412779
MGSGCRIECIFFSEFHPTLGPKITYQVPEDFISRELFDTVQVYIITKPELQNKLITV

SEQ ID NO: 57730 - protein, 57 aa, Homo sapiens; identical to SEQ ID NO: 57729
  Payload ID: 11329
  Gene Symbol: NPRL2
  Gene Name: NPR2-like, GATOR1 complex subunit
  ENSP ID: ENSP00000415045

SEQ ID NO: 57731 - protein, 544 aa, Homo sapiens
  Payload ID: 11330
  Gene Symbol: NPRL3
  Gene Name: NPR3-like, GATOR1 complex subunit
  ENSP ID: ENSP00000382834
MRDNTSPISVILVSSGSRGNKLLFRYPFQRSQEHPASQTSKPRSRYAASNTGDHADEQDGDSRFSDVILATILATKSEMCGQKFELKIDNVRFVGHPTLLQHALGQANADPSVINCLHNLSRRIATVLQHEERRCQYLTREAKLILALQDEVSAMADGNEGPQSPFHHILPKCKLARDLKEAYDSLCTSGVVRLHINSWLEVSFCLPHKIHYAASSLIPPEAIERSLKAIRPYHALLLLSDEKSLLGELPIDCSPALVRVIKTTSAVKNLQQLAQDADLALLQVFQLAAHLVYWGKAIIIYPLCENNVYMLSPNASVCLYSPLAEQFSHQFPSHDLPSVLAKFSLPVSLSEFRNPLAPAVQETQLIQMVVWMLQRRLLIQLHTYVCLMASPSEEEPRPREDDVPFTARVGGRSLSTPNALSFGSPTSSDDMTLTSPSMDNSSAELLPSGDSPLNQRMTENLLASLSEHERAAILSVPAAQNPEDLRMFARLLHYFRGRHHLEEIMYNENTRRSQLLMLFDKFRSVLVVTTHEDPVIAVFQALLP

SEQ ID NO: 57732 - protein, 69 aa, Homo sapiens
  Payload ID: 11330
  Gene Symbol: NPRL3
  Gene Name: NPR3-like, GATOR1 complex subunit
  ENSP ID: ENSP00000395288
MRDNTSPISVILANADPSVINCLHNLSRRIATVLQHEERRCQYLTREAKLILALQDEVSAMADACARRA

SEQ ID NO: 57733 - protein, 182 aa, Homo sapiens
  Payload ID: 11330
  Gene Symbol: NPRL3
  Gene Name: NPR3-like, GATOR1 complex subunit
  ENSP ID: ENSP00000399894
MRDNTSPISVILVSSGSRGNKLLFRYPFQRSQEHPASQTSKPRSRYAASNTGDHADEQDGDSSEPCPPTDEQLVAGFSDVILATILATKSEMCGQKFELKIDNVRFVGHPTLLQHALGQISKTDPSPKREAPTMILFNVVFALRANADPSVINCLHNLSRRIATVLQHEERRCQYLTREAKL

SEQ ID NO: 57734 - protein, 86 aa, Homo sapiens
  Payload ID: 11330
  Gene Symbol: NPRL3
  Gene Name: NPR3-like, GATOR1 complex subunit
  ENSP ID: ENSP00000401529
MRDNTSPISVILVSSGSRGNKLLFRYPFQRSQEHPASQTSKPRSRYAASNTGDHADEQDGDSRQSFTLSPKAGVQWCDLGLLQPHL

SEQ ID NO: 57735 - protein, 58 aa, Homo sapiens
  Payload ID: 11330
  Gene Symbol: NPRL3
  Gene Name: NPR3-like, GATOR1 complex subunit
  ENSP ID: ENSP00000405942
MRDNTSPISVILVSRVADTLPATRATMLMSRTAIPGFQMLFWQQFWQPSLKCVAKNLN

SEQ ID NO: 57736 - protein, 62 aa, Homo sapiens
  Payload ID: 11330
  Gene Symbol: NPRL3
  Gene Name: NPR3-like, GATOR1 complex subunit
  ENSP ID: ENSP00000418475
MRDNTSPISVILVSSGSRGNKLLFRYPFQRSQEHPASQTSFQMLFWQQFWQPSLKCVAKNLN

SEQ ID NO: 57737 - protein, 201 aa, Homo sapiens
  Payload ID: 11330
  Gene Symbol: NPRL3
  Gene Name: NPR3-like, GATOR1 complex subunit
  ENSP ID: ENSP00000477764
MCGQKFELKIDNVRFVGHPTLLQHALGQISKTDPSPKREAPTMILFNVVFALRANADPSVINCLHNLSRRIATVLQHEERRCQYLTREAKLILALQDEVSAMADGNEGPQSPFHHILPKCKLARDLKEAYDSLCTSGVVRLHINSWLEVSFCLPHKIHYAASSLIPPEAIERSLKAIRPYHALLLLSDEKSLLGELPIDCS

SEQ ID NO: 57738 - protein, 69 aa, Homo sapiens
  Payload ID: 11330
  Gene Symbol: NPRL3
  Gene Name: NPR3-like, GATOR1 complex subunit
  ENSP ID: ENSP00000477801
MRDNTSPISVILVSSGSRGNKLLFRYPFQRSQEHPASQTSKPRSRYAASNTGDHADEQDGDSRPTQTRQ

SEQ ID NO: 57739 - protein, 77 aa, Homo sapiens
  Payload ID: 11330
  Gene Symbol: NPRL3
  Gene Name: NPR3-like, GATOR1 complex subunit
  ENSP ID: ENSP00000478045
MRDNTSPISVILVSSGSRGNKLLFRYPFQRSQEHPASQTSKPRSRYAASNTGDHADEQDGDSRSPKQILPRRGKHLL

SEQ ID NO: 57740 - protein, 569 aa, Homo sapiens
  Payload ID: 11330
  Gene Symbol: NPRL3
  Gene Name: NPR3-like, GATOR1 complex subunit
  Uniprot ID: Q12980
  ENSP ID: ENSP00000478273
MRDNTSPISVILVSSGSRGNKLLFRYPFQRSQEHPASQTSKPRSRYAASNTGDHADEQDGDSRFSDVILATILATKSEMCGQKFELKIDNVRFVGHPTLLQHALGQISKTDPSPKREAPTMILFNVVFALRANADPSVINCLHNLSRRIATVLQHEERRCQYLTREAKLILALQDEVSAMADGNEGPQSPFHHILPKCKLARDLKEAYDSLCTSGVVRLHINSWLEVSFCLPHKIHYAASSLIPPEAIERSLKAIRPYHALLLLSDEKSLLGELPIDCSPALVRVIKTTSAVKNLQQLAQDADLALLQVFQLAAHLVYWGKAIIIYPLCENNVYMLSPNASVCLYSPLAEQFSHQFPSHDLPSVLAKFSLPVSLSEFRNPLAPAVQETQLIQMVVWMLQRRLLIQLHTYVCLMASPSEEEPRPREDDVPFTARVGGRSLSTPNALSFGSPTSSDDMTLTSPSMDNSSAELLPSGDSPLNQRMTENLLASLSEHERAAILSVPAAQNPEDLRMFARLLHYFRGRHHLEEIMYNENTRRSQLLMLFDKFRSVLVVTTHEDPVIAVFQALLP

SEQ ID NO: 57741 - protein, 569 aa, Homo sapiens; identical to SEQ ID NO: 57740
  Payload ID: 11330
  Gene Symbol: NPRL3
  Gene Name: NPR3-like, GATOR1 complex subunit
  Uniprot ID: Q12980
  ENSP ID: ENSP00000483814

SEQ ID NO: 57742 - protein, 1164 aa, Homo sapiens
  Payload ID: 11331
  Gene Symbol: NRDE2
  Gene Name: NRDE-2, necessary for RNA interference, domain containing
  Uniprot ID: Q9H7Z3
  ENSP ID: ENSP00000346335
MALFPAFAGLSEAPDGGSSRKELDWLSNPSFCVGSITSLSQQTEAAPAHVSEGLPLTRSHLKSESSDESDTNKKLKQTSRKKKKEKKKKRKHQHHKKTKRKHGPSSSSRSETDTDSEKDKPSRGVGGSKKESEEPNQGNNAAADTGHRFVWLEDIQAVTGETFRTDKKPDPANWEYKSLYRGDIARYKRKGDSCLGINPKKQCISWEGTSTEKKHSRKQVERYFTKKSVGLMNIDGVAISSKTEPPSSEPISFIPVKDLEDAAPVTTWLNPLGIYDQSTTHWLQGQGPPEQESKQPDAQPDSESAALKAKVEEFNRRVRENPRDTQLWMAFVAFQDEVMKSPGLYAIEEGEQEKRKRSLKLILEKKLAILERAIESNQSSVDLKLAKLKLCTEFWEPSTLVKEWQKLIFLHPNNTALWQKYLLFCQSQFSTFSISKIHSLYGKCLSTLSAVKDGSILSHPALPGTEEAMFALFLQQCHFLRQAGHSEKAISLFQAMVDFTFFKPDSVKDLPTKGQVEFFEPFWDSGEPRAGEKGARGWKAWMHQQERGGWVVINPDEDDDEPEEDDQEIKDKTLPRWQIWLAAERSRDQRHWRPWRPDKTKKQTEEDCEDPERQVLFDDIGQSLIRLSSHDLQFQLVEAFLQFLGVPSGFTPPASCLYLAMDENSIFDNGLYDEKPLTFFNPLFSGASCVGRMDRLGYPRWTRGQNREGEEFIRNVFHLVMPLFSGKEKSQLCFSWLQYEIAKVIWCLHTKNKKRLKSQGKNCKKLAKNLLKEPENCNNFCLWKQYAHLEWLLGNTEDARKVFDTALGMAGSRELKDSDLCELSLLYAELEVELSPEVRRAATARAVHILTKLTESSPYGPYTGQVLAVHILKARKAYEHALQDCLGDSCVSNPAPTDSCSRLISLAKCFMLFQYLTIGIDAAVQIYEQVFAKLNSSVFPEGSGEGDSASSQSWTSVLEAITLMHTSLLRFHMKVSVYPLAPLREALSQALKLYPGNQVLWRSYVQIQNKSHSASKTRRFFDTITRSAKPLEPWLFAIEAEKLRKRLVETVQRLDGREIHATIPETGLMHRIQALFENAMRSDSGSQCPLLWRMYLNFLVSLGNKERSKGVFYKALQNCPWAKVLYLDAVEYFPDEMQEILDLMTEKELRVRLPLEELELLLED

SEQ ID NO: 57743 - protein, 43 aa, Homo sapiens
  Payload ID: 11331
  Gene Symbol: NRDE2
  Gene Name: NRDE-2, necessary for RNA interference, domain containing
  ENSP ID: ENSP00000451025
MALFPAFAGLSEAPDGGSSRKVKEIMLQLILDIALFGLRTFRL

SEQ ID NO: 57744 - protein, 204 aa, Homo sapiens
  Payload ID: 11331
  Gene Symbol: NRDE2
  Gene Name: NRDE-2, necessary for RNA interference, domain containing
  ENSP ID: ENSP00000452071
FSISKIHSLYGKCLSTLSAVKDGSILSHPALPGTEEAMFADSEHRMKVAALFLQQCHFLRQAGHSEKAISLFQAMVDFTFFKPDSVKDLPTKGQVEFFEPFWDSGEPRAGEKGARGWKAWMHQQERGGWVVINPDEDDDEPEEDDQEIKDKTLPRWQIWLAAERSRDQRHWRPWRPDKTKKQTEEDCEDPERQVLFDDIGQSLI

SEQ ID NO: 57745 - protein, 227 aa, Homo sapiens
  Payload ID: 11331
  Gene Symbol: NRDE2
  Gene Name: NRDE-2, necessary for RNA interference, domain containing
  ENSP ID: ENSP00000452107
  MOD_RES (1)..(1): Any amino acid
XGHRFVWLEDIQAVTGETFRTDKKPDPANWEYKSLYRGDIARYKRKGDSCLGINPKKQCISWEGTSTEKKHSRKQVERYFTKKSVGLMNIDGVAISSKTEPPSSEPISFIPVKDLEDAAPVTTWLNPLGIYDQSTTHWLQGQGPPEQESKQPDAQPDSESAALKAKVEEFNRRVRENPRDTQLWMAFVAFQHSFFSSATFCGRLATLRRPSHCSRPWWTSPSSNPTA

SEQ ID NO: 57746 - protein, 43 aa, Homo sapiens; identical to SEQ ID NO: 57743
  Payload ID: 11331
  Gene Symbol: NRDE2
  Gene Name: NRDE-2, necessary for RNA interference, domain containing
  ENSP ID: ENSP00000486385

SEQ ID NO: 57747 - protein, 189 aa, Homo sapiens
  Payload ID: 11332
  Gene Symbol: NSA2
  Gene Name: NSA2 ribosome biogenesis homolog
  ENSP ID: ENSP00000296802
MPQNEYIELHRKRYGYRLDYHEKKRKKESREAHERSKKAKKMIGLKAKLYHKQRHAEKIQMKKTIKMHEKRNTKQKNDEKTPQGAVPAYLLDREGQSRAKVLSNMIKQKRKEKAGKWEVPLPKVRAQGETEVLKVIRTGKRKKKAWKRMVTKVCFVGDGFTRKPPKYERFIRPMENMPRLPTILKMMDV

SEQ ID NO: 57748 - protein, 98 aa, Homo sapiens
  Payload ID: 11332
  Gene Symbol: NSA2
  Gene Name: NSA2 ribosome biogenesis homolog
  ENSP ID: ENSP00000427266
  MOD_RES (1)..(1): Any amino acid
XREGQSRAKVLSNMIKQKRKEKAGKWEVPLPKVRAQGETEVLKVIRTGKRKKKAWKRMVTKVCFVGDGFTRKPPKYERFIRPMENMPRLPTILKMMDV

SEQ ID NO: 57749 - protein, 260 aa, Homo sapiens
  Payload ID: 11332
  Gene Symbol: NSA2
  Gene Name: NSA2 ribosome biogenesis homolog
  Uniprot ID: O95478
  ENSP ID: ENSP00000483484
MPQNEYIELHRKRYGYRLDYHEKKRKKESREAHERSKKAKKMIGLKAKLYHKQRHAEKIQMKKTIKMHEKRNTKQKNDEKTPQGAVPAYLLDREGQSRAKVLSNMIKQKRKEKAGKWEVPLPKVRAQGETEVLKVIRTGKRKKKAWKRMVTKVCFVGDGFTRKPPKYERFIRPMGLRFKKAHVTHPELKATFCLPILGVKKNPSSPLYTTLGVITKGTVIEVNVSELGLVTQGGKVIWGKYAQVTNNPENDGCINAVLLV

SEQ ID NO: 57750 - protein, 266 aa, Homo sapiens
  Payload ID: 11333
  Gene Symbol: NSMCE1
  Gene Name: NSE1 homolog, SMC5-SMC6 complex component
  Uniprot ID: Q8WV22
  ENSP ID: ENSP00000355077
MQGSTRRMGVMTDVHRRFLQLLMTHGVLEEWDVKRLQTHCYKVHDRNATVDKLEDFINNINSVLESLYIEIKRGVTEDDGRPIYALVNLATTSISKMATDFAENELDLFRKALELIIDSETGFASSTNILNLVDQLKGKKMRKKEAEQVLQKFVQNKWLIEKEGEFTLHGRAILEMEQYIRETYPDAVKICNICHSLLIQGQSCETCGIRMHLPCVAKYFQSNAEPRCPHCNDYWPHEIPKVFDPEKERESGVLKSNKKSLRSRQH

SEQ ID NO: 57751 - protein, 73 aa, Homo sapiens
  Payload ID: 11333
  Gene Symbol: NSMCE1
  Gene Name: NSE1 homolog, SMC5-SMC6 complex component
  ENSP ID: ENSP00000454726
MQGSTRRMGVMTDVHRRFLQLLMTHGVLEEWDVKRLQTHCYKVHDRNATVDKLEDFINNINSVLESLYIEIKR

SEQ ID NO: 57752 - protein, 70 aa, Homo sapiens
  Payload ID: 11333
  Gene Symbol: NSMCE1
  Gene Name: NSE1 homolog, SMC5-SMC6 complex component
  ENSP ID: ENSP00000455237
MQGSTRRMGVMTDVHRRFLQLLMTHGVLEEWDVKRLQTHCYKVHDRMSFISLTSEKEKQRSFLARLCIGC

SEQ ID NO: 57753 - protein, 70 aa, Homo sapiens; identical to SEQ ID NO: 57752
  Payload ID: 11333
  Gene Symbol: NSMCE1
  Gene Name: NSE1 homolog, SMC5-SMC6 complex component
  ENSP ID: ENSP00000456053

SEQ ID NO: 57754 - protein, 144 aa, Homo sapiens
  Payload ID: 11333
  Gene Symbol: NSMCE1
  Gene Name: NSE1 homolog, SMC5-SMC6 complex component
  ENSP ID: ENSP00000456103
MQGSTRRMGVMTDVHRRFLQLLMTHGVLEEWDVKRLQTHCYKVHDRNATVDKLEDFINNINSVLESLYIEIKRGVTEDDGRPIYALVNLATTSISKMATDFAENELDLFRKALELIIDSETGFASSTNILNLVDQLKGKKMRKK

SEQ ID NO: 57755 - protein, 138 aa, Homo sapiens
  Payload ID: 11333
  Gene Symbol: NSMCE1
  Gene Name: NSE1 homolog, SMC5-SMC6 complex component
  ENSP ID: ENSP00000456754
MQGSTRRMGVMTDVHRRFLQLLMTHGVLEEWDVKRLQTHCYKVHDRNATVDKLEDFINNINSVLESLYIEIKRGVTEDDGRPIYALVNLATTSISKMATDFAENELDLFRKALELIIDSETGFASSTNILNLVDQLKG

SEQ ID NO: 57756 - protein, 78 aa, Homo sapiens
  Payload ID: 11333
  Gene Symbol: NSMCE1
  Gene Name: NSE1 homolog, SMC5-SMC6 complex component
  ENSP ID: ENSP00000457893
LKGKKMRKKEAEQVLQKFVQNKWLIEKEGEFTLHGRAILEMEQYIRETYPDAVKICNICHSLLIQKSSTLRRRGSLVS

SEQ ID NO: 57757 - protein, 193 aa, Homo sapiens
  Payload ID: 11333
  Gene Symbol: NSMCE1
  Gene Name: NSE1 homolog, SMC5-SMC6 complex component
  ENSP ID: ENSP00000458859
MQGSTRRMGVMTDVHRRFLQLLMTHGVLEEWDVKRLQTHCYKVHDRNATVDKLEDFINNINSVLESLYIEIKRGVTEDDGRPIYALVNLATTSISKMATDFAENELDLFRKALELIIDSETGFASSTNILNLVDQLKGKKMRKKEAEQVLQKFVQNKWLIEEGEFTLHGRAILEMEQYIRETYPDAVKICNIC

SEQ ID NO: 57758 - protein, 247 aa, Homo sapiens
  Payload ID: 11334
  Gene Symbol: NSMCE2
  Gene Name: NSE2/MMS21 homolog, SMC5-SMC6 complex SUMO ligase
  Uniprot ID: Q96MF7
  ENSP ID: ENSP00000287437
MPGRSSSNSGSTGFISFSGVESALSSLKNFQACINSGMDTASSVALDLVESQTEVSSEYSMDKAMVEFATLDRQLNHYVKAVQSTINHVKEERPEKIPDLKLLVEKKFLALQSKNSDADFQNNEKFVQFKQQLKELKKQCGLQADREADGTEGVDEDIIVTQSQTNFTCPITKEEMKKPVKNKVCGHTYEEDAIVRMIESRQKRKKKAYCPQIGCSHTDIRKSDLIQDEALRRAIENHNKKRHRHSE

SEQ ID NO: 57759 - protein, 187 aa, Homo sapiens
  Payload ID: 11334
  Gene Symbol: NSMCE2
  Gene Name: NSE2/MMS21 homolog, SMC5-SMC6 complex SUMO ligase
  ENSP ID: ENSP00000428846
MDKAMVEFATLDRQLNHYVKAVQSTINHVKEERPEKIPDLKLLVEKKFLALQSKNSDADFQNNEKFVQFKQQLKELKKQCGLQADREADGTEGVDEDIIVTQSQTNFTCPITKEEMKKPVKNKVCGHTYEEDAIVRMIESRQKRKKKAYCPQIGCSHTDIRKSDLIQDEALRRAIENHNKKRHRHSE

SEQ ID NO: 57760 - protein, 94 aa, Homo sapiens
  Payload ID: 11334
  Gene Symbol: NSMCE2
  Gene Name: NSE2/MMS21 homolog, SMC5-SMC6 complex SUMO ligase
  ENSP ID: ENSP00000429014
GSTGFISFSGVESALSSLKNFQACINSGMDTASSVALDLVESQTEVSSEYSMDKAMVEFATLDRQLNHYVKAVQSTINHLGVVAHACSSSYLGG

SEQ ID NO: 57761 - protein, 139 aa, Homo sapiens
  Payload ID: 11334
  Gene Symbol: NSMCE2
  Gene Name: NSE2/MMS21 homolog, SMC5-SMC6 complex SUMO ligase
  ENSP ID: ENSP00000429383
MPGRSSSNSGSTGFISFSGVESALSSLKNFQACINSGMDTASSVALDLVESQTEVSSEYSMDKAMVEFATLDRQLNHYVKAVQSTINHVKEERPEKIPDLKLLVEKKFLALQSKNSDADFQNNEKFVQFKQQLKELKKQ

SEQ ID NO: 57762 - protein, 193 aa, Homo sapiens
  Payload ID: 11334
  Gene Symbol: NSMCE2
  Gene Name: NSE2/MMS21 homolog, SMC5-SMC6 complex SUMO ligase
  ENSP ID: ENSP00000429612
MPGRSSSNSGSTGFISFSGVESALSSLKNFQACINSGMDTASSVALDLVESQTEVSSEYSMDKAMVEFATLDRQLNHYVKAVQSTINHVKEERPEKIPDLKLLVEKKFLALQSKNSDADFQNNEKFVQFKQQLKELKKQCGLQADREADGTEGVDEDIIVTQSQTNFTCPITKEEMKKPVKNKVCGHTYEEDA

SEQ ID NO: 57763 - protein, 80 aa, Homo sapiens
  Payload ID: 11334
  Gene Symbol: NSMCE2
  Gene Name: NSE2/MMS21 homolog, SMC5-SMC6 complex SUMO ligase
  ENSP ID: ENSP00000430313
MPGRSSSNSGSTGFISFSGVESALSSLKNFQACINSGMDTASSVALDLVESQSFWEEEHRGQGPFSSRHIKASASHQHDQ

SEQ ID NO: 57764 - protein, 247 aa, Homo sapiens; identical to SEQ ID NO: 57758
  Payload ID: 11334
  Gene Symbol: NSMCE2
  Gene Name: NSE2/MMS21 homolog, SMC5-SMC6 complex SUMO ligase
  Uniprot ID: Q96MF7
  ENSP ID: ENSP00000430668

SEQ ID NO: 57765 - protein, 44 aa, Homo sapiens
  Payload ID: 11334
  Gene Symbol: NSMCE2
  Gene Name: NSE2/MMS21 homolog, SMC5-SMC6 complex SUMO ligase
  ENSP ID: ENSP00000431002
MPGRSSSNSGSTGFISFSGVESALSSLKNFQACINSGMDTASSV

SEQ ID NO: 57766 - protein, 157 aa, Homo sapiens
  Payload ID: 11334
  Gene Symbol: NSMCE2
  Gene Name: NSE2/MMS21 homolog, SMC5-SMC6 complex SUMO ligase
  ENSP ID: ENSP00000478256
MPGRSSSNSGSTGFISFSGVESALSSLKNFQACINSGMDTASSVALDLVESQTEVSSEYSMDKAMVEFATLDRQLNHYVKAVQSTINHVKEERPEKIPDLKLLVEKKFLALQSKNSDADFQNNEKFVQFKQQLKELKKQCKSTCFALVRLFEIRELT

SEQ ID NO: 57767 - protein, 157 aa, Homo sapiens; identical to SEQ ID NO: 57766
  Payload ID: 11334
  Gene Symbol: NSMCE2
  Gene Name: NSE2/MMS21 homolog, SMC5-SMC6 complex SUMO ligase
  ENSP ID: ENSP00000481615

SEQ ID NO: 57768 - protein, 316 aa, Homo sapiens
  Payload ID: 11335
  Gene Symbol: NSMCE4A
  Gene Name: NSE4 homolog A, SMC5-SMC6 complex component
  Uniprot ID: Q9NXX6
  ENSP ID: ENSP00000358013
MSGDSSGRGPEGRGRGRDPHRDRTRSRSRSRSPLSPRSRRGSARERREAPERPSLEDTEPSDSGDEMMDPASLEAEADQGLCRQIRHQYRALINSVQQNREDILNAGDKLTEVLEEANTLFNEVSRAREAVLDAHFLVLASDLGKEKAKQLRSDLSSFDMLRYVETLLTHMGVNPLEAEELIRDEDSPDFEFIVYDSWKITGRTAENTFNKTHTFHFLLGSIYGECPVPKPRVDRPRKVPVIQEERAMPAQLRRMEESHQEATEKEVERILGLLQTYFREDRDSLTLSPRLECSGTISTHCNLHLLDSSNSPASAS

SEQ ID NO: 57769 - protein, 385 aa, Homo sapiens
  Payload ID: 11335
  Gene Symbol: NSMCE4A
  Gene Name: NSE4 homolog A, SMC5-SMC6 complex component
  Uniprot ID: Q9NXX6
  ENSP ID: ENSP00000358019
MSGDSSGRGPEGRGRGRDPHRDRTRSRSRSRSPLSPRSRRGSARERREAPERPSLEDTEPSDSGDEMMDPASLEAEADQGLCRQIRHQYRALINSVQQNREDILNAGDKLTEVLEEANTLFNEVSRAREAVLDAHFLVLASDLGKEKAKQLRSDLSSFDMLRYVETLLTHMGVNPLEAEELIRDEDSPDFEFIVYDSWKITGRTAENTFNKTHTFHFLLGSIYGECPVPKPRVDRPRKVPVIQEERAMPAQLRRMEESHQEATEKEVERILGLLQTYFREDPDTPMSFFDFVVDPHSFPRTVENIFHVSFIIRDGFARIRLDQDRLPVIEPVSINEENEGFEHNTQVRNQGIIALSYRDWEEIVKTFEISEPVITPSQRQQKPSA

SEQ ID NO: 57770 - protein, 370 aa, Homo sapiens
  Payload ID: 11336
  Gene Symbol: NSFL1C
  Gene Name: NSFL1 (p97) cofactor (p47)
  Uniprot ID: Q9UNZ2
  ENSP ID: ENSP00000216879
MAAERQEALREFVAVTGAEEDRARFFLESAGWDLQIALASFYEDGGDEDIVTISQATPSSVSRGTAPSDNRVTSFRDLIHDQDEDEEEEEGQRFYAGGSERSGQQIVGPPRKKSPNELVDDLFKGAKEHGAVAVERVTKSPGETSKPRPFAGGGYRLGAAPEEESAYVAGEKRQHSSQDVHVVLKLWKSGFSLDNGELRSYQDPSNAQFLESIRRGEVPAELRRLAHGGQVNLDMEDHRDEDFVKPKGAFKAFTGEGQKLGSTAPQVLSTSSPAQQAENEAKASSSILIDESEPTTNIQIRLADGGRLVQKFNHSHRISDIRLFIVDARPAMAATSFILMTTFPNKELADESQTLKEANLLNAVIVQRLT

SEQ ID NO: 57771 - protein, 339 aa, Homo sapiens
  Payload ID: 11336
  Gene Symbol: NSFL1C
  Gene Name: NSFL1 (p97) cofactor (p47)
  Uniprot ID: Q9UNZ2
  ENSP ID: ENSP00000338643
MAAERQEALREFVAVTGAEEDRARFFLESAGWDLQIALASFYEDGGDEDIVTISQATPSSVSRGTAPSDNRVTSFRDLIHDQDEDEEEEEGQRFYAGGSERSGQQIVGPPRKKSPNELVDDLFKGAKEHGAVAVERVTKSPGETSKPRVHVVLKLWKSGFSLDNGELRSYQDPSNAQFLESIRRGEVPAELRRLAHGGQVNLDMEDHRDEDFVKPKGAFKAFTGEGQKLGSTAPQVLSTSSPAQQAENEAKASSSILIDESEPTTNIQIRLADGGRLVQKFNHSHRISDIRLFIVDARPAMAATSFILMTTFPNKELADESQTLKEANLLNAVIVQRLT

SEQ ID NO: 57772 - protein, 372 aa, Homo sapiens
  Payload ID: 11336
  Gene Symbol: NSFL1C
  Gene Name: NSFL1 (p97) cofactor (p47)
  Uniprot ID: Q9UNZ2
  ENSP ID: ENSP00000418529
MAAERQEALREFVAVTGAEEDRARFFLESAGWDLQIALASFYEDGGDEDIVTISQATPSSVSRGTAPSDNRVTSFRDLIHDQDEDEEEEEGQRSRFYAGGSERSGQQIVGPPRKKSPNELVDDLFKGAKEHGAVAVERVTKSPGETSKPRPFAGGGYRLGAAPEEESAYVAGEKRQHSSQDVHVVLKLWKSGFSLDNGELRSYQDPSNAQFLESIRRGEVPAELRRLAHGGQVNLDMEDHRDEDFVKPKGAFKAFTGEGQKLGSTAPQVLSTSSPAQQAENEAKASSSILIDESEPTTNIQIRLADGGRLVQKFNHSHRISDIRLFIVDARPAMAATSFILMTTFPNKELADESQTLKEANLLNAVIVQRLT

SEQ ID NO: 57773 - protein, 274 aa, Homo sapiens
  Payload ID: 11336
  Gene Symbol: NSFL1C
  Gene Name: NSFL1 (p97) cofactor (p47)
  ENSP ID: ENSP00000434067
MAAERQEALREFVAVTGAEEDRARFFLESAGWDLQIALASFYEDGGDEDIVTISQATPSSVSRGTAPSDNRVTSFRDLIHDQDEDEEEEEGQRFYAGGSERSGQQIVGPPRKKSPNELVDDLFKGAKEHGAVAVERVTKSPGETSKPRPFAGGGYRLGAAPEEESAYVAGEKRQHSSQDVHVVLKLWKSGFSLDNGELRSYQDPSNAQFLESIRRGEVPAELRRLAHGGQVNLDMEDHRDEDFVKPKGAFKAFTGEGQKLGRLSCFPPFKPLFS

SEQ ID NO: 57774 - protein, 35 aa, Homo sapiens
  Payload ID: 11336
  Gene Symbol: NSFL1C
  Gene Name: NSFL1 (p97) cofactor (p47)
  ENSP ID: ENSP00000451675
MAAERQEALREFVAVTGAEEDRARFFLESAGWDLQ

SEQ ID NO: 57775 - protein, 35 aa, Homo sapiens; identical to SEQ ID NO: 57774
  Payload ID: 11336
  Gene Symbol: NSFL1C
  Gene Name: NSFL1 (p97) cofactor (p47)
  ENSP ID: ENSP00000452019

SEQ ID NO: 57776 - protein, 71 aa, Homo sapiens
  Payload ID: 11336
  Gene Symbol: NSFL1C
  Gene Name: NSFL1 (p97) cofactor (p47)
  ENSP ID: ENSP00000473400
MAAERQEALREFVAVTGAEEDRARFFLESAGWDLQIALASFYEDGGDEDIVTISQATPSSVSRGTAPREKR

SEQ ID NO: 57777 - protein, 105 aa, Homo sapiens
  Payload ID: 11336
  Gene Symbol: NSFL1C
  Gene Name: NSFL1 (p97) cofactor (p47)
  ENSP ID: ENSP00000473616
MAAERQEALREFVAVTGAEEDRARFFLESAGWDLQIALASFYEDGGDEDIVTISQATPSSVSRGTAPSDNRVTSFRDLIHDQDEDEEEEEGQRGHSVCHMNGKVR

SEQ ID NO: 57778 - protein, 172 aa, Homo sapiens
  Payload ID: 11337
  Gene Symbol: NSL1
  Gene Name: NSL1, MIS12 kinetochore complex component
  ENSP ID: ENSP00000355943
MAGSPELVVLDPPWDKELAAGTESQALVSATPREDFRVRCTSKRAVTEMLQLCGRFVQKLGDALPEEIREPALRDAQWTFESAVQENISINGQAWQEASDNCFMDSDIKVLEDQFDEIIVDIATKRKQYPRKILECVIKTIKAKQEILKQYHPVVHPLDLKYDPDPVLACIN

SEQ ID NO: 57779 - protein, 281 aa, Homo sapiens
  Payload ID: 11337
  Gene Symbol: NSL1
  Gene Name: NSL1, MIS12 kinetochore complex component
  Uniprot ID: Q96IY1
  ENSP ID: ENSP00000355944
MAGSPELVVLDPPWDKELAAGTESQALVSATPREDFRVRCTSKRAVTEMLQLCGRFVQKLGDALPEEIREPALRDAQWTFESAVQENISINGQAWQEASDNCFMDSDIKVLEDQFDEIIVDIATKRKQYPRKILECVIKTIKAKQEILKQYHPVVHPLDLKYDPDPAPHMENLKCRGETVAKEISEAMKSLPALIEQGEGFSQVLRMQPVIHLQRIHQEVFSSCHRKPDAKPENFITQIETTPTETASRKTSDMVLKRKQTKDCPQRKWYPLRPKKINLDT

SEQ ID NO: 57780 - protein, 75 aa, Homo sapiens
  Payload ID: 11337
  Gene Symbol: NSL1
  Gene Name: NSL1, MIS12 kinetochore complex component
  ENSP ID: ENSP00000355945
MDSDIKVLEDQFDEIIVDIATKRKQYPRKILECVIKTIKAKQEILKQYHPVVHPLDLKYDPDPGAKPGGLALGAV

SEQ ID NO: 57781 - protein, 213 aa, Homo sapiens
  Payload ID: 11337
  Gene Symbol: NSL1
  Gene Name: NSL1, MIS12 kinetochore complex component
  Uniprot ID: Q96IY1
  ENSP ID: ENSP00000486783
MAGSPELVVLDPPWDKELAAGTESQALVSATPREDFRVRCTSKRAVTEMLQLCGRFVQKLGDALPEEIREPALRDAQWTFESAVQENISINGQAWQEASDNCFMDSDIKVLEDQFDEIIVDIATKRKQYPRKILECVIKTIKAKQEILKQYHPVVHPLDLKYDPDPVLNGNAFNFSPFNMMLAVDLSYMVFITSSPSYGKFEMQRGNSSKGDQ

SEQ ID NO: 57782 - protein, 502 aa, Homo sapiens
  Payload ID: 11338
  Gene Symbol: SGSH
  Gene Name: N-sulfoglucosamine sulfohydrolase
  Uniprot ID: P51688
  ENSP ID: ENSP00000314606
MSCPVPACCALLLVLGLCRARPRNALLLLADDGGFESGAYNNSAIATPHLDALARRSLLFRNAFTSVSSCSPSRASLLTGLPQHQNGMYGLHQDVHHFNSFDKVRSLPLLLSQAGVRTGIIGKKHVGPETVYPFDFAYTEENGSVLQVGRNITRIKLLVRKFLQTQDDRPFFLYVAFHDPHRCGHSQPQYGTFCEKFGNGESGMGRIPDWTPQAYDPLDVLVPYFVPNTPAARADLAAQYTTVGRMDQGVGLVLQELRDAGVLNDTLVIFTSDNGIPFPSGRTNLYWPGTAEPLLVSSPEHPKRWGQVSEAYVSLLDLTPTILDWFSIPYPSYAIFGSKTIHLTGRSLLPALEAEPLWATVFGSQSHHEVTMSYPMRSVQHRHFRLVHNLNFKMPFPIDQDFYVSPTFQDLLNRTTAGQPTGWYKDLRHYYYRARWELYDRSRDPHETQNLATDPRFAQLLEMLRDQLAKWQWETHDPWVCAPDGVLEEKLSPQCQPLHNEL

SEQ ID NO: 57783 - protein, 274 aa, Homo sapiens
  Payload ID: 11338
  Gene Symbol: SGSH
  Gene Name: N-sulfoglucosamine sulfohydrolase
  ENSP ID: ENSP00000458200
MSCPVPACCALLLVLGLCRARPRNALLLLADRALSVSHLTQRMTEALRVARTTTAPSPPRTWTPWPAAASSFAMPSPRSAAALPAAPASSLACPSIRMGCTGCTRTCTTSTPSTRCGACRCCSAKLVCAQASSGRSTWGRRPCTRLTLRTRRRMAPSSRWGGTSLELSCSSGNSCRLRMTGLSSSTSPSTTPTAVGTPSPSTEPSVRSLATERAAWVVSQTGPPRPTTHWTCWCLTSSPTPRQPEPTWPLSTPPSAAWTKELDWCSRSCVTPVS

SEQ ID NO: 57784 - protein, 227 aa, Homo sapiens
  Payload ID: 11338
  Gene Symbol: SGSH
  Gene Name: N-sulfoglucosamine sulfohydrolase
  ENSP ID: ENSP00000459280
MSCPVPACCALLLVLGLCRARPRNALLLLADDGGFESGAYNNSAIATPHLDALARRSLLFRNAFTSVSSCSPSRASLLTGLPQASSGRSTWGRRPCTRLTLRTRRRMAPSSRWGGTSLELSCSSGNSCRLRMTGLSSSTSPSTTPTAVGTPSPSTEPSVRSLATERAAWVVSQTGPPRPTTHWTCWCLTSSPTPRQPEPTWPLSTPPSAAWTKELDWCSRSCVTPVS

SEQ ID NO: 57785 - protein, 106 aa, Homo sapiens
  Payload ID: 11338
  Gene Symbol: SGSH
  Gene Name: N-sulfoglucosamine sulfohydrolase
  ENSP ID: ENSP00000459708
  MOD_RES (1)..(1): Any amino acid
XARPRNALLLLADDGGFESGAYNNSAIATPHLDALARRSLLFRNAFTSVSSCSPSRASLLTGLPQHQNGMYGLHQDVHHFNSFDKVRSLPLLLSQAGVRTGGAEHH

SEQ ID NO: 57786 - protein, 187 aa, Homo sapiens
  Payload ID: 11338
  Gene Symbol: SGSH
  Gene Name: N-sulfoglucosamine sulfohydrolase
  ENSP ID: ENSP00000459765
MSCPVPACCALLLVLGLCRARPRNALLLLADDGGFESGAYNNSAIATPHLDALARRSLLFRNAFTSVSSCSPSRASLLTGLPQHQNGMYGLHQDVHHFNSFDKVRSLPLLLSQAGVRTGLSSRPGIIGKKHVGPETVYPFDFAYTEENGSVLQVGRNITRIKLLVRKFLQTQDDRPFFLYVAFHDPH

SEQ ID NO: 57787 - protein, 67 aa, Homo sapiens
  Payload ID: 11338
  Gene Symbol: SGSH
  Gene Name: N-sulfoglucosamine sulfohydrolase
  ENSP ID: ENSP00000460720
VIFTSDNGIPFPSGRTNLYWPGTAEPLLVSSPEHPKRWGQVSEAYVSLLEEKNEAQRGEVSCSGLHS

SEQ ID NO: 57788 - protein, 110 aa, Homo sapiens
  Payload ID: 11338
  Gene Symbol: SGSH
  Gene Name: N-sulfoglucosamine sulfohydrolase
  ENSP ID: ENSP00000461128
MYGLHQDVHHFNSFDKVRSLPLLLSQAGVRTGIIGKKHVGPETVYPFDFAYTEENGSVLQVGRNITRIKLLVRKFLQTQDDRPFFLYVAFHDPHRCGHSQPQYGTFCEKF

SEQ ID NO: 57789 - protein, 108 aa, Homo sapiens
  Payload ID: 11338
  Gene Symbol: SGSH
  Gene Name: N-sulfoglucosamine sulfohydrolase
  ENSP ID: ENSP00000461160
MSCPVPACCALLLVLGLCRARPRNALLLLADDGGFESGAYNNSAIATPHLDALARRSLLFRNAFTSVSSCSPSRASLLTGLPQAFLPLRRLPRPPPLWALPAPVRNLL

SEQ ID NO: 57790 - protein, 194 aa, Homo sapiens
  Payload ID: 11338
  Gene Symbol: SGSH
  Gene Name: N-sulfoglucosamine sulfohydrolase
  ENSP ID: ENSP00000461827
  MOD_RES (1)..(1): Any amino acid
XFDFAYTEENGSVLQVGRNITRIKLLVRKFLQTQDDRPFFLYVAFHDPHRCGHSQPQYGTFCEKFGNGESGMGRIPDWTPQAYDPLDVLVPYFVPNTPAARADLAAQYTTVGRMDQGVGLVLQELRDAGVLNDTLVIFTSDNGIPFPSGRTNLYWPGTAEPLLVSSPEHPKRWGQVSEAYVSLLVTRLLLPTVK

SEQ ID NO: 57791 - protein, 533 aa, Homo sapiens
  Payload ID: 11339
  Gene Symbol: NT5C1B-RDH14
  Gene Name: NT5C1B-RDH14 readthrough
  ENSP ID: ENSP00000412639
MSQTSLKQKKNEPGMRSSKESLEAEKRKESDKTGVRLSNQGSQESSLRKTDSRGYLVRSQWSRISRSPSTKAPSIDEPRSRNTSAKVELPSSSTSSRTPSTSPSLHDSSPPPLSGQPSLQPPASPQLPRSLDSRPPTPPEPDPGSRRSTKMQENPEAWAQGIVREIRQTRDSQPLEYSRTSPTEWKSSSQRRGIYPASTQLDRNSLSEQQQQQREDEDDYEAAYWASMRSFYEKNPSCSRPWPPKPKNAITIALSSCALFNMVDGRKIYEQEGLEKYMEYQLTNENVILTPGPAFRFVKALQYVNARLRDLYPDEQDLFDIVLMTNNHAQVGVRLINSVNHYGLLIDRFCLTGGKDPIGYLKAYLTNLYIAADSEKVQEAIQEGIASATMFDGAKDMAYCDTQLRVAFDGDAVLFSDESEHFTKEHGLDKFFQYDTLCESKPLAQEEPRLDVLINNAGIFQCPYMKTEDGFEMQFGVNHLGHFLLTNLLLGLLKSSAPSRIVVVSSKLYKYGDINFDDLNSEQSYNKSFCYSR

SEQ ID NO: 57792 - protein, 602 aa, Homo sapiens
  Payload ID: 11339
  Gene Symbol: NT5C1B-RDH14
  Gene Name: NT5C1B-RDH14 readthrough
  ENSP ID: ENSP00000433415
MSQTSLKQKKNEPGMRSSKESLEAEKRKESDKTGVRLSNQMRRAVNPNHSLRCCPFQGHSSCRRCLCAAEGTALGPCHTIRIYIHMCLLWEQGQQITMMRGSQESSLRKTDSRGYLVRSQWSRISRSPSTKAPSIDEPRSRNTSAKLPSSSTSSRTPSTSPSLHDSSPPPLSGQPSLQPPASPQLPRSLDSRPPTPPEPDPGSRRSTKMQENPEAWAQGIVREIRQTRDSQPLEYSRTSPTEWKSSSQRRGIYPASTQLDRNSLSEQQQQQREDEDDYEAAYWASMRSFYEKNPSCSRPWPPKPKNAITIALSSCALFNMVDGRKIYEQEGLEKYMEYQLTNENVILTPGPAFRFVKALQYVNARLRDLYPDEQDLFDIVLMTNNHAQVGVRLINSVNHYGLLIDRFCLTGGKDPIGYLKAYLTNLYIAADSEKVQEAIQEGIASATMFDGAKDMAYCDTQLRVAFDGDAVLFSDESEHFTKEHGLDKFFQYDTLCESKPLAQGPLKGFLEDLGRLQKKFYAKNERLLCPIRTYLVTARSAASSGARVLKTLRRWGLEIDEALFLAGAPKSPILVKIRPHIFFDDHMFHIEGAQRKSLGWMS

SEQ ID NO: 57793 - protein, 310 aa, Homo sapiens
  Payload ID: 11340
  Gene Symbol: NTAN1
  Gene Name: N-terminal asparagine amidase
  Uniprot ID: Q96AB6
  ENSP ID: ENSP00000287706
MPLLVEGRRVRLPQSAGDLVRAHPPLEERARLLRGQSVQQVGPQGLLYVQQRELAVTSPKDGSISILGSDDATTCHIVVLRHTGNGATCLTHCDGTDTKAEVPLIMNSIKSFSDHAQCGRLEVHLVGGFSDDRQLSQKLTHQLLSEFDRQEDDIHLVTLCVTELNDREENENHFPVIYGIAVNIKTAEIYRASFQDRGPEEQLRAARTLAGGPMISIYDAETEQLRIGPYSWTPFPHVDFWLHQDDKQILENLSTSPLAEPPHFVEHIRSTLMFLKKHPSPAHTLFSGNKALLYKKNEDGLWEKISSPGS

SEQ ID NO: 57794 - protein, 18 aa, Homo sapiens
  Payload ID: 11340
  Gene Symbol: NTAN1
  Gene Name: N-terminal asparagine amidase
  ENSP ID: ENSP00000454595
PLIMNSIKSFSDHAQCGR

SEQ ID NO: 57795 - protein, 223 aa, Homo sapiens
  Payload ID: 11340
  Gene Symbol: NTAN1
  Gene Name: N-terminal asparagine amidase
  ENSP ID: ENSP00000454883
MPLLVEGRRVRLPQSAGDLVRAHPPLEERARLLRGSISILGSDDATTCHIVVLRHTGNGATCLTHCDGTDTKAEVPLIMNSIKSFSDHAQCGRLEVHLVGGFSDDRQLSQKLTHQLLSEFDRQEDDIHLVTLCVTELNDREENENHFPVIYGIAVNIKTAEIYRASFQDRGPEEQLRAARTLAGGPMISIYDAETEQLRIGPYSWTPFPHVDFWLHQDDKQIL

SEQ ID NO: 57796 - protein, 146 aa, Homo sapiens
  Payload ID: 11340
  Gene Symbol: NTAN1
  Gene Name: N-terminal asparagine amidase
  ENSP ID: ENSP00000455396
MNSIKSFSDHAQCGRLEVHLVGGFSDDRQLSQKLTHQLLSEFDRQEDDIHLVTLCVTELNDREENENHFPVIYGIAVNIKTAEIYRASFQDRGPEEQLRAARTLAGGPMISIYDAETEQLRIGPYSWTPFPHVDFWLHQDDKQILE

SEQ ID NO: 57797 - protein, 27 aa, Homo sapiens
  Payload ID: 11340
  Gene Symbol: NTAN1
  Gene Name: N-terminal asparagine amidase
  ENSP ID: ENSP00000456142
LVRAHPPLEAPSPFWVLMMPLLVTLWS

SEQ ID NO: 57798 - protein, 45 aa, Homo sapiens
  Payload ID: 11340
  Gene Symbol: NTAN1
  Gene Name: N-terminal asparagine amidase
  ENSP ID: ENSP00000457467
MPLLVEGRRVRLPQSAGDLVRAHPPLEAPSPFWVLMMPLLVTLWS

SEQ ID NO: 57799 - protein, 45 aa, Homo sapiens; identical to SEQ ID NO: 57798
  Payload ID: 11340
  Gene Symbol: NTAN1
  Gene Name: N-terminal asparagine amidase
  ENSP ID: ENSP00000478644

SEQ ID NO: 57800 - protein, 205 aa, Homo sapiens
  Payload ID: 11340
  Gene Symbol: NTAN1
  Gene Name: N-terminal asparagine amidase
  ENSP ID: ENSP00000481975
MNSIKSFSDHAQCGRLEVHLVGGFSDDRQLSQKLTHQLLSEFDRQEDDIHLVTLCVTELNDREENENHFPVIYGIAVNIKTAEIYRASFQDRGPEEQLRAARTLAGGPMISIYDAETEQLRIGPYSWTPFPHVDFWLHQDDKQILENLSTSPLAEPPHFVEHIRSTLMFLKKHPSPAHTLFSGNKALLYKKNEDGLWEKISSPGS

SEQ ID NO: 57801 - protein, 205 aa, Homo sapiens; identical to SEQ ID NO: 57800
  Payload ID: 11340
  Gene Symbol: NTAN1
  Gene Name: N-terminal asparagine amidase
  ENSP ID: ENSP00000483643

SEQ ID NO: 57802 - protein, 310 aa, Homo sapiens; identical to SEQ ID NO: 57793
  Payload ID: 11340
  Gene Symbol: NTAN1
  Gene Name: N-terminal asparagine amidase
  Uniprot ID: Q96AB6
  ENSP ID: ENSP00000484380

SEQ ID NO: 57803 - protein, 205 aa, Homo sapiens; identical to SEQ ID NO: 57800
  Payload ID: 11340
  Gene Symbol: NTAN1
  Gene Name: N-terminal asparagine amidase
  ENSP ID: ENSP00000485340

SEQ ID NO: 57804 - protein, 146 aa, Homo sapiens; identical to SEQ ID NO: 57796
  Payload ID: 11340
  Gene Symbol: NTAN1
  Gene Name: N-terminal asparagine amidase
  ENSP ID: ENSP00000487653

SEQ ID NO: 57805 - protein, 223 aa, Homo sapiens; identical to SEQ ID NO: 57795
  Payload ID: 11340
  Gene Symbol: NTAN1
  Gene Name: N-terminal asparagine amidase
  ENSP ID: ENSP00000488243

SEQ ID NO: 57806 - protein, 27 aa, Homo sapiens
  Payload ID: 11340
  Gene Symbol: NTAN1
  Gene Name: N-terminal asparagine amidase
  ENSP ID: ENSP00000488459
LVRAHPPLEAPSPFWVLMMPLLVTLWS

SEQ ID NO: 57807 - protein, 18 aa, Homo sapiens
  Payload ID: 11340
  Gene Symbol: NTAN1
  Gene Name: N-terminal asparagine amidase
  ENSP ID: ENSP00000488710
PLIMNSIKSFSDHAQCGR

SEQ ID NO: 57808 - protein, 351 aa, Homo sapiens
  Payload ID: 11341
  Gene Symbol: NECAB1
  Gene Name: N-terminal EF-hand calcium binding protein 1
  Uniprot ID: Q8N987
  ENSP ID: ENSP00000387380
MEDSQETSPSSNNSSEELSSALHLSKGMSIFLDILRRADKNDDGKLSFEEFKAYFADGVLSGEELHELFHTIDTHNTNNLDTEELCEYFSQHLGEYENVLAALEDLNLSILKAMGKTKKDYQEASNLEQFVTRFLLKETLNQLQSLQNSLECAMETTEEQTRQERQGPAKPEVLSIQWPGKRSSRRVQRHNSFSPNSPQFNVSGPGLLEEDNQWMTQINRLQKLIDRLEKKDLKLEPPEEEIIEGNTKSHIMLVQRQMSVIEEDLEEFQLALKHYVESASSQSGCLRISIQKLSNESRYMIYEFWENSSVWNSHLQTNYSKTFQRSNVDFLETPELTSTMLVPASWWILNN

SEQ ID NO: 57809 - protein, 100 aa, Homo sapiens
  Payload ID: 11341
  Gene Symbol: NECAB1
  Gene Name: N-terminal EF-hand calcium binding protein 1
  Uniprot ID: Q8N987
  ENSP ID: ENSP00000428632
MLVQRQMSVIEEDLEEFQLALKHYVESASSQSGCLRISIQKLSNESRYMIYEFWENSSVWNSHLQTNYSKTFQRSNVDFLETPELTSTMLVPASWWILNN

SEQ ID NO: 57810 - protein, 100 aa, Homo sapiens; identical to SEQ ID NO: 57809
  Payload ID: 11341
  Gene Symbol: NECAB1
  Gene Name: N-terminal EF-hand calcium binding protein 1
  Uniprot ID: Q8N987
  ENSP ID: ENSP00000428953

SEQ ID NO: 57811 - protein, 386 aa, Homo sapiens
  Payload ID: 11342
  Gene Symbol: NECAB2
  Gene Name: N-terminal EF-hand calcium binding protein 2
  Uniprot ID: Q7Z6G3
  ENSP ID: ENSP00000307449
MCERAARLCRAGAHRLLREPPQQGRALGGLLRWVGARMGEPRESLAPAAPADPGPASPRGGTAVILDIFRRADKNDDGKLSLEEFQLFFADGVLNEKELEDLFHTIDSDNTNHVDTKELCDYFVDHMGDYEDVLASLETLNHSVLKAMGYTKKVYEGGSNVDQFVTRFLLKETANQIQSLLSSVESAVEAIEEQTSQLRQNHIKPSHSAAQTWCGSPTPASAPNHKLMAMEQGKTLPSATEDAKEEGLEAQISRLAELIGRLESKALWFDLQQRLSDEDGTNMHLQLVRQEMAVCPEQLSEFLDSLRQYLRGTTGVRNCFHITAVRLSDGFTFVIYEFWETEEAWKRHLQSPLCKAFRHVKVDTLSQPEALSRILVPAAWCTVGRD

SEQ ID NO: 57812 - protein, 183 aa, Homo sapiens
  Payload ID: 11342
  Gene Symbol: NECAB2
  Gene Name: N-terminal EF-hand calcium binding protein 2
  ENSP ID: ENSP00000455322
NTNHVDTKELCDYFVDHMGDYEDVLASLETLNHSVLKAMGYTKKVYEGGSNVDQFVTRFLLKETANQIQSLLSSVESAVEAIEEQTSQLRQNHIKPSHSAAQTWCGSPTPASAPNHKLMAMEQGKTLPSATEDAKEEGLEAQISRLAELIGRLESKHLQLVRQEMAVCPEQLSEFLDSLRQYL

SEQ ID NO: 57813 - protein, 62 aa, Homo sapiens
  Payload ID: 11342
  Gene Symbol: NECAB2
  Gene Name: N-terminal EF-hand calcium binding protein 2
  ENSP ID: ENSP00000455713
  MOD_RES (1)..(1): Any amino acid
XSEFLDSLRQYLRGTTGVRNCFQHLQSPLCKAFRHVKVDTLSQPEALSRILVPAAWCTVGRD

SEQ ID NO: 57814 - protein, 303 aa, Homo sapiens
  Payload ID: 11342
  Gene Symbol: NECAB2
  Gene Name: N-terminal EF-hand calcium binding protein 2
  ENSP ID: ENSP00000457354
MMMGSCPWRNSSSSLQMASLMRKNWRISFTRLTLTTPNYFVDHMGDYEDVLASLETLNHSVLKAMGYTKKVYEGGSNVDQFVTRFLLKETANQIQSLLSSVESAVEAIEEQTSQLRQNHIKPSHSAAQTWCGSPTPASAPNHKLMAMEQGKTLPSATEDAKEEGLEAQISRLAELIGRLESKALWFDLQQRLSDEDGTNMHLQLVRQEMAVCPEQLSEFLDSLRQYLRGTTGVRNCFHITAVRLSDGFTFVIYEFWETEEAWKRHLQSPLCKAFRHVKVDTLSQPEALSRILVPAAWCTVGRD

SEQ ID NO: 57815 - protein, 396 aa, Homo sapiens
  Payload ID: 11343
  Gene Symbol: NECAB3
  Gene Name: N-terminal EF-hand calcium binding protein 3
  Uniprot ID: Q96P71
  ENSP ID: ENSP00000246190
MACAGLLTVCLLRPPAPQPQPQTPRHPQLAPDPGPAGHTLFQDVFRRADKNDDGKLSFEEFQNYFADGVLSLGELQELFSGIDGHLTDNLETEKLCDYFSEHLGVYRPVLAALESLNRAVLAAMDATKLEYERASKVDQFVTRFLLRETVSQLQALQSSLEGASDTLEAQAHGWRSDAESVEAQSRLCGSRRAGRRALRSVSRSSTWSPGSSDTGRSSEAEMQWRLQVNRLQELIDQLECKVRAVGPGPHKGGPSWYPPEPGPCWRPGPHSVPSQAPRLEPLREEDLAKGPDLHILMAQRQVQVAEEGLQDFHRALRCYVDFTGAQSHCLHVSAQKMLDGASFTLYEFWQDEASWRRHQQSPGSKAFQRILIDHLRAPDTLTTVFFPASWWIMNNN

SEQ ID NO: 57816 - protein, 362 aa, Homo sapiens
  Payload ID: 11343
  Gene Symbol: NECAB3
  Gene Name: N-terminal EF-hand calcium binding protein 3
  Uniprot ID: Q96P71
  ENSP ID: ENSP00000364386
MACAGLLTVCLLRPPAPQPQPQTPRHPQLAPDPGPAGHTLFQDVFRRADKNDDGKLSFEEFQNYFADGVLSLGELQELFSGIDGHLTDNLETEKLCDYFSEHLGVYRPVLAALESLNRAVLAAMDATKLEYERASKVDQFVTRFLLRETVSQLQALQSSLEGASDTLEAQAHGWRSDAESVEAQSRLCGSRRAGRRALRSVSRSSTWSPGSSDTGRSSEAEMQWRLQVNRLQELIDQLECKAPRLEPLREEDLAKGPDLHILMAQRQVQVAEEGLQDFHRALRCYVDFTGAQSHCLHVSAQKMLDGASFTLYEFWQDEASWRRHQQSPGSKAFQRILIDHLRAPDTLTTVFFPASWWIMNNN

SEQ ID NO: 57817 - protein, 289 aa, Homo sapiens
  Payload ID: 11343
  Gene Symbol: NECAB3
  Gene Name: N-terminal EF-hand calcium binding protein 3
  ENSP ID: ENSP00000392064
MACAGLLTVCLLRPPAPQPQPQTPRHPQLAPDPGPAGHTLFQDVFRRADKNDDGKLSFEEFQNYFADGVLSLGELQELFSGIDGHLTDNLETEKLCDYFSEHLGVYRPVLAALESLNRAVLAAMDATKLEYERASKVDQFVTRFLLRETVSQLQALQSSLEGASDTLEAQAHGWRSDAESVEAQSRLCGSRRAGRRALRSVSRSSTWSPGSSDTGRSSEAEMQWRLQVNRLQELIDQLECKHILMAQRQVQVAEEGLQDFHRALRCYVDFTGAQSHCLHVSAQKMLDGA

SEQ ID NO: 57818 - protein, 192 aa, Homo sapiens
  Payload ID: 11343
  Gene Symbol: NECAB3
  Gene Name: N-terminal EF-hand calcium binding protein 3
  ENSP ID: ENSP00000475369
MACAGLLTVCLLRPPAPQPQPQTPRHPQLAPDPGPAGHTLFQDVFRRADKNDDGKLSFEEFQNYFADGVLSLGELQELFSGIDGHLTDNLETEKLCDYFSEHLGVYRPVLAALESLNRAVLAAMDATKLEYERASKVDQFVTRFLLRETVSQLQALQSSLEGASDTLEAQAHGWRLIPSWGPSPRPCEPHFL

SEQ ID NO: 57819 - protein, 297 aa, Homo sapiens
  Payload ID: 11343
  Gene Symbol: NECAB3
  Gene Name: N-terminal EF-hand calcium binding protein 3
  ENSP ID: ENSP00000475420
MACAGLLTVCLLRPPAPQPQPQTPRHPQLAPDPGPAGHTLFQDVFRRADKNDDGKLSFEEFQNYFADGVLSLGELQELFSGIDGHLTDNLETEKLCDYFSEHLGVYRPVLAALESLNRAVLAAMDATKLEYERASKVDQFVTRFLLRETVSQLQALQSSLEGASDTLEAQAHGWRSDAESVEAQSRLCGSRRAGRRALRSVSRSSTWSPGSSDTGRSSEAEMQWRLQVNRLQELIDQLECKRQVQVAEEGLQDFHRALRCYVDFTGAQSHCLHVSAQKMLDGASFTLYEFWQDEASW

SEQ ID NO: 57820 - protein, 71 aa, Homo sapiens
  Payload ID: 11343
  Gene Symbol: NECAB3
  Gene Name: N-terminal EF-hand calcium binding protein 3
  ENSP ID: ENSP00000475755
MACAGLLTVCLLRPPAPQPQPQTPRHPQLAPDPGPAGHTLFQDVFRRADKNELLCRWGSQPGGAAGTVQRH

SEQ ID NO: 57821 - protein, 125 aa, Homo sapiens
  Payload ID: 11343
  Gene Symbol: NECAB3
  Gene Name: N-terminal EF-hand calcium binding protein 3
  ENSP ID: ENSP00000475834
MQWRLQVNRLQELIDQLECKAPRLEPLREEDLAKGPDLHILMAQRQVQVAEEGLQDFHRALRCYVDFTGAQSHCLHVSAQKMLDGASFTLYEFWQDEASWRRHQQSPGSKAFQRILIDHLRAPDT

SEQ ID NO: 57822 - protein, 54 aa, Homo sapiens
  Payload ID: 11343
  Gene Symbol: NECAB3
  Gene Name: N-terminal EF-hand calcium binding protein 3
  ENSP ID: ENSP00000475938
MACAGLLTVCLLRPPAPQPQPQTPRHPQLAPDPGPAGHTLFQDVFRRADKNALI

SEQ ID NO: 57823 - protein, 210 aa, Homo sapiens
  Payload ID: 11343
  Gene Symbol: NECAB3
  Gene Name: N-terminal EF-hand calcium binding protein 3
  ENSP ID: ENSP00000476044
MACAGLLTVCLLRPPAPQPQPQTPRHPQLAPDPGPAGHTLFQDVFRRADKNDDGKLSFEEFQNYFADGVLSLGELQELFSGIDGHLTDNLETEKLCDYFSEHLGVYRPVLAALESLNRAVLAAMDATKLEYERASKVDQFVTRFLLRETVSQLQALQSSLEGASDTLEAQAHGWRCRERGGAEQALRQPAGRTPSPEECQPVIHLVPRLF

SEQ ID NO: 57824 - protein, 95 aa, Homo sapiens
  Payload ID: 11343
  Gene Symbol: NECAB3
  Gene Name: N-terminal EF-hand calcium binding protein 3
  ENSP ID: ENSP00000476165
  MOD_RES (1)..(1): Any amino acid
XQNYFADGVLSLGELQELFSGIDGHLTDNLETEKLCDYFSEHLGVYRPVLAALESLNRAVLAAMDATKLVSGVADGGGSTVRQWASAVLWDPPQS

SEQ ID NO: 57825 - protein, 223 aa, Homo sapiens
  Payload ID: 11344
  Gene Symbol: NTMT1
  Gene Name: N-terminal Xaa-Pro-Lys N-methyltransferase 1
  Uniprot ID: Q9BV86
  ENSP ID: ENSP00000361558
MTSEVIEDEKQFYSKAKTYWKQIPPTVDGMLGGYGHISSIDINSSRKFLQRFLREGPNKTGTSCALDCGAGIGRITKRLLLPLFREVDMVDITEDFLVQAKTYLGEEGKRVRNYFCCGLQDFTPEPDSYDVIWIQWVIGHLTDQHLAEFLRRCKGSLRPNGIIVIKDNMAQEGVILDDVDSSVCRDLDVVRRIICSAGLSLLAEERQENLPDEIYHVYSFALR

SEQ ID NO: 57826 - protein, 145 aa, Homo sapiens
  Payload ID: 11344
  Gene Symbol: NTMT1
  Gene Name: N-terminal Xaa-Pro-Lys N-methyltransferase 1
  Uniprot ID: Q9BV86
  ENSP ID: ENSP00000361559
MTSEVIEDEKQFYSKAKTYWKQIPPTVDGMLGGYGHISSIDINSSRKFLQRFLREGPNKTGTSCALDCGAGIGRITKRLLLPLFREVDMVDITEDFLVQAKTYLGEEGKRATSPISTWPSSCGAARAASAPTASSSSKTTWPRRA

SEQ ID NO: 57827 - protein, 223 aa, Homo sapiens; identical to SEQ ID NO: 57825
  Payload ID: 11344
  Gene Symbol: NTMT1
  Gene Name: N-terminal Xaa-Pro-Lys N-methyltransferase 1
  Uniprot ID: Q9BV86
  ENSP ID: ENSP00000361561

SEQ ID NO: 57828 - protein, 223 aa, Homo sapiens; identical to SEQ ID NO: 57825
  Payload ID: 11344
  Gene Symbol: NTMT1
  Gene Name: N-terminal Xaa-Pro-Lys N-methyltransferase 1
  Uniprot ID: Q9BV86
  ENSP ID: ENSP00000361564

SEQ ID NO: 57829 - protein, 135 aa, Homo sapiens
  Payload ID: 11344
  Gene Symbol: NTMT1
  Gene Name: N-terminal Xaa-Pro-Lys N-methyltransferase 1
  ENSP ID: ENSP00000473900
MVDITEDFLVQAKTYLGEEGKRVRNYFCCGLQDFTPEPDSYDVIWIQWVIGHLTDQHLAEFLRRCKGSLRPNGIIVIKDNMAQEGVILDDVDSSVCRDLDVVRRIICSAGLSLLAEERQENLPDEIYHVYSFALR

SEQ ID NO: 57830 - protein, 70 aa, Homo sapiens
  Payload ID: 11344
  Gene Symbol: NTMT1
  Gene Name: N-terminal Xaa-Pro-Lys N-methyltransferase 1
  ENSP ID: ENSP00000473916
MTSEVIEDEKQFYSKAKTYWKQIPPTVDGMLGGKARTRQERPVPWTVELALGGSPSGCSCRCSERWIWST

SEQ ID NO: 57831 - protein, 109 aa, Homo sapiens
  Payload ID: 11344
  Gene Symbol: NTMT1
  Gene Name: N-terminal Xaa-Pro-Lys N-methyltransferase 1
  ENSP ID: ENSP00000474445
MTSEVIEDEKQFYSKAKTYWKQIPPTVDGMLGGYGHISSIDINSSRKFLQRFLRVGRSGVLSRRGCGSGGTAESMWGATFYTCNTAGLLAISWYLPQSLEELGWVGTVG

SEQ ID NO: 57832 - protein, 223 aa, Homo sapiens; identical to SEQ ID NO: 57825
  Payload ID: 11344
  Gene Symbol: NTMT1
  Gene Name: N-terminal Xaa-Pro-Lys N-methyltransferase 1
  Uniprot ID: Q9BV86
  ENSP ID: ENSP00000478521

SEQ ID NO: 57833 - protein, 223 aa, Homo sapiens; identical to SEQ ID NO: 57825
  Payload ID: 11344
  Gene Symbol: NTMT1
  Gene Name: N-terminal Xaa-Pro-Lys N-methyltransferase 1
  Uniprot ID: Q9BV86
  ENSP ID: ENSP00000483489

SEQ ID NO: 57834 - protein, 135 aa, Homo sapiens; identical to SEQ ID NO: 57829
  Payload ID: 11344
  Gene Symbol: NTMT1
  Gene Name: N-terminal Xaa-Pro-Lys N-methyltransferase 1
  ENSP ID: ENSP00000484447

SEQ ID NO: 57835 - protein, 312 aa, Homo sapiens
  Payload ID: 11345
  Gene Symbol: NTHL1
  Gene Name: nth-like DNA glycosylase 1
  Uniprot ID: P78549
  ENSP ID: ENSP00000219066
MCSPQESGMTALSARMLTRSRSLGPGAGPRGCREEPGPLRRREAAAEARKSHSPVKRPRKAQRLRVAYEGSDSEKGEGAEPLKVPVWEPQDWQQQLVNIRAMRNKKDAPVDHLGTEHCYDSSAPPKVRRYQVLLSLMLSSQTKDQVTAGAMQRLRARGLTVDSILQTDDATLGKLIYPVGFWRSKVKYIKQTSAILQQHYGGDIPASVAELVALPGVGPKMAHLAMAVAWGTVSGIAVDTHVHRIANRLRWTKKATKSPEETRAALEEWLPRELWHEINGLLVGFGQQTCLPVHPRCHACLNQALCPAAQGL

SEQ ID NO: 57836 - protein, 236 aa, Homo sapiens
  Payload ID: 11345
  Gene Symbol: NTHL1
  Gene Name: nth-like DNA glycosylase 1
  ENSP ID: ENSP00000455267
  MOD_RES (1)..(1): Any amino acid
XSLGPGAGPRGCREEPGPLRRREAAAEARKSHSPVKRPRKAQRLRVAYEGSDSEKGEGAEPLKVPVWEPQDWQQQLVNIRAMRNKKDAPVDHLGTEHCYDSSAPPKSKVKYIKQTSAILQQHYGGDIPASVAELVALPGVGPKMAHLAMAVAWGTVSGIAAVDTHVHRIANRLRWTKKATKSPEETRAALEEWLPRELWHEINGLLVGFGQQTCLPVHPRCHACLNQALCPAAQGL

SEQ ID NO: 57837 - protein, 218 aa, Homo sapiens
  Payload ID: 11345
  Gene Symbol: NTHL1
  Gene Name: nth-like DNA glycosylase 1
  ENSP ID: ENSP00000456301
  MOD_RES (1)..(1): Any amino acid
XPGPLRRREAAAEARKSHSPVKRPRKAQRLRVAYEGSDSEKGEGAEPLKVPVWEPQDWQQQLVNIRAMRNKKDAPVDHLGTEHCYDSSAPPKVRRYQVLLSLMLSSQTKDQVTAGAMQRLRARGLTVDSILQTDDATLGKLIYPVGFWRSKVKYIKQTSAILQQHYGGDIPASVAELVALPGVGPKMAHLAMAVAWGTVSGIGVCGPDHLQGDPRAAS

SEQ ID NO: 57838 - protein, 100 aa, Homo sapiens
  Payload ID: 11345
  Gene Symbol: NTHL1
  Gene Name: nth-like DNA glycosylase 1
  ENSP ID: ENSP00000457818
  MOD_RES (1)..(1): Any amino acid
XRSRSLGPGAGPRGCREEPGPLRRREAAAEARKSHSPVKRPRKAQRLRVAYEGSDSEKGTQVPGAAVTDALQPNQRPGDGGRHAATAGAGPDGGQHPADR

SEQ ID NO: 57839 - protein, 832 aa, Homo sapiens
  Payload ID: 11346
  Gene Symbol: NKPD1
  Gene Name: NTPase, KAP family P-loop domain containing 1
  ENSP ID: ENSP00000321976
MHKHYKVHFAKDAQSPNGHYFWDPELGHRKGCCHQWRQDSAALRAHGPCRPSPQSHWQLAYHSHQVGGSGWRRGLLPSVLQQQRQPQSQPSPPSPLRQRLCPIHEAQKGLPATSTVPKEPASAPQAPTLPTTAPAMARSGPALPSAAGVLLKPSEPTDARPLPAPAACGSFTAYSSDILTEDDVYCSCLAKTLCHVPVPVTVGFYAPFGCRLHMMLDKITALMQQEAAQRESEELQHVQWRPRAVSGWGVPQLLWYLVFLQPIITEVHLRRRNVQFLFIRFSAWQYAGTDKLWAGLVTTLCEGIRRHYGALPFSVYSVLGNKPATRQDCCQSEWHCRRRVCLGLLALLAALGLGVGLLYLSLGGHALGHGSPSGSLLKVFGGAATTLSGSGLLMAVYSVGKHLFVSQRKKIERLVSREKFGSQLGFMCEVKKEVELLTDFLCFLEIYQRRRLRVVLEVTGLDTCYPERVVGVLNAINTLLSDSHAPFIFILVVDPSILAACLESAGNMKGTADNGYLFLNRTVTLPFSVPIMGRRTKLQFLHDAVQSRDDLLYREMTRKPWLPGDAGGESAQLLAVQAQAGTERGQGRIDDEAARRIQEALFCLHDERDCLYEYVPDNVVSMRRIVNTVPITVRLLQQQQQQGDFGGPTPRQAVAWVVLANQWPCRLSWALQCLEDRQQTGGAPEGRARLWDVFRDNSRELHTMTKALQNVLDLDGDPELFERFLGADFPFTVAEAQSLLRCTVNLDHSIRRRMGLIRAVSALKPPSPPKSPTRDTPHAAHRANSASRAPPSGRASGQAGEGHHTGDLAHRGKLWPVACALFRPGQSSPGGP

SEQ ID NO: 57840 - protein, 610 aa, Homo sapiens
  Payload ID: 11346
  Gene Symbol: NKPD1
  Gene Name: NTPase, KAP family P-loop domain containing 1
  Uniprot ID: Q17RQ9
  ENSP ID: ENSP00000401739
MQQEAAQRESEELQHVQWRPRAVSGWGVPQLLWYLVFLQPIITEVHLRRRNVQFLFIRFSAWQYAGTDKLWAGLVTTLCEGIRRHYGALPFSVYSVLGNKPATRQDCCQSEWHCRRRVCLGLLALLAALGLGVGLLYLSLGGHALGHGSPSGSLLKVFGGAATTLSGSGLLMAVYSVGKHLFVSQRKKIERLVSREKFGSQLGFMCEVKKEVELLTDFLCFLEIYQRRRLRVVLEVTGLDTCYPERVVGVLNAINTLLSDSHAPFIFILVVDPSILAACLESAGNMKGTADNGYLFLNRTVTLPFSVPIMGRRTKLQFLHDAVQSRDDLLYREMTRKPWLPGDAGGESAQLLAVQAQAGTERGQGRIDDEAARRIQEALFCLHDERDCLYEYVPDNVVSMRRIVNTVPITVRLLQQQQQQGDFGGPTPRQAVAWVVLANQWPCRLSWALQCLEDRQQTGGAPEGRARLWDVFRDNSRELHTMTKALQNVLDLDGDPELFERFLGADFPFTVAEAQSLLRCTVNLDHSIRRRMGLIRAVSALKPPSPPKSPTRDTPHAAHRANSASRAPPSGRASGQAGEGHHTGDLAHRGKLWPVACALFRPGQSSPGGP

SEQ ID NO: 57841 - protein, 610 aa, Homo sapiens; identical to SEQ ID NO: 57840
  Payload ID: 11346
  Gene Symbol: NKPD1
  Gene Name: NTPase, KAP family P-loop domain containing 1
  Uniprot ID: Q17RQ9
  ENSP ID: ENSP00000468649

SEQ ID NO: 57842 - protein, 661 aa, Homo sapiens
  Payload ID: 11347
  Gene Symbol: NUAK1
  Gene Name: NUAK family, SNF1-like kinase, 1
  Uniprot ID: O60285
  ENSP ID: ENSP00000261402
MEGAAAPVAGDRPDLGLGAPGSPREAVAGATAALEPRKPHGVKRHHHKHNLKHRYELQETLGKGTYGKVKRATERFSGRVVAIKSIRKDKIKDEQDMVHIRREIEIMSSLNHPHIISIYEVFENKDKIVIIMEYASKGELYDYISERRRLSERETRHFFRQIVSAVHYCHKNGVVHRDLKLENILLDDNCNIKIADFGLSNLYQKDKFLQTFCGSPLYASPEIVNGRPYRGPEVDSWALGVLLYTLVYGTMPFDGFDHKNLIRQISSGEYREPTQPSDARGLIRWMLMVNPDRRATIEDIANHWWVNWGYKSSVCDCDALHDSESPLLARIIDWHHRSTGLQADTEAKMKGLAKPTTSEVMLERQRSLKKSKKENDFAQSGQDAVPESPSKLSSKRPKGILKKRSNSEHRSHSTGFIEGVVGPALPSTFKMEQDLCRTGVLLPSSPEAEVPGKLSPKQSATMPKKGILKKTQQRESGYYSSPERSESSELLDSNDVMGSSIPSPSPPDPARVTSHSLSCRRKGILKHSSKYSAGTMDPALVSPEMPTLESLSEPGVPAEGLSRSYSRPSSVISDDSVLSSDSFDLLDLQENRPARQRIRSCVSAENFLQIQDFEGLQNRPRPQYLKRYRNRLADSSFSLLTDMDDVTQVYKQALEICSKLN

SEQ ID NO: 57843 - protein, 118 aa, Homo sapiens
  Payload ID: 11347
  Gene Symbol: NUAK1
  Gene Name: NUAK family, SNF1-like kinase, 1
  ENSP ID: ENSP00000446873
MLMVNPDRRATIEDIANHWWVNWGYKSSVCDCDALHDSESPLLARIIDWHHRSTGLQADTEAKMKGLAKPTTSEVMLERQRSLKKSKKENDFAQSGQDAVPESPSKLSSKRPKGILKK

SEQ ID NO: 57844 - protein, 152 aa, Homo sapiens
  Payload ID: 11347
  Gene Symbol: NUAK1
  Gene Name: NUAK family, SNF1-like kinase, 1
  ENSP ID: ENSP00000448288
MEYASKGELYDYISERRRLSERETRHFFRQIVSAVHYCHKNGVVHRDLKLENILLDDNCNIKIADFGLSNLYQKDKFLQTFCGSPLYASPEIVNGRPYRGPEVDSWALGVLLYTLVYGTMPFDGFDHKNLIRQISSGEYREPTQPSDARGLI

SEQ ID NO: 57845 - protein, 74 aa, Homo sapiens
  Payload ID: 11347
  Gene Symbol: NUAK1
  Gene Name: NUAK family, SNF1-like kinase, 1
  ENSP ID: ENSP00000449990
MPFDGFDHKNLIRQISSGEYREPTQPSDARGLIRWMLMVNPDRRATIEDIANHWWVNWGYKSSVCDCDALHDSE

SEQ ID NO: 57846 - protein, 672 aa, Homo sapiens
  Payload ID: 11348
  Gene Symbol: NUAK2
  Gene Name: NUAK family, SNF1-like kinase, 2
  Uniprot ID: Q9H093
  ENSP ID: ENSP00000356125
MLCFTARSGTAVAPRPGAGPVPRASALPAQPTDSPAALAHLLLAMESLVFARRSGPTPSAAELARPLAEGLIKSPKPLMKKQAVKRHHHKHNLRHRYEFLETLGKGTYGKVKKARESSGRLVAIKSIRKDKIKDEQDLMHIRREIEIMSSLNHPHIIAIHEVFENSSKIVIVMEYASRGDLYDYISERQQLSEREARHFFRQIVSAVHYCHQNRVVHRDLKLENILLDANGNIKIADFGLSNLYHQGKFLQTFCGSPLYASPEIVNGKPYTGPEVDSWSLGVLLYILVHGTMPFDGHDHKILVKQISNGAYREPPKPSDACGLIRWLLMVNPTRRATLEDVASHWWVNWGYATRVGEQEAPHEGGHPGSDSARASMADWLRRSSRPLLENGAKVCSFFKQHAPGGGSTTPGLERQHSLKKSRKENDMAQSLHSDTADDTAHRPGKSNLKLPKGILKKKVSASAEGVQEDPPELSPIPASPGQAAPLLPKKGILKKPRQRESGYYSSPEPSESGELLDAGDVFVSGDPKEQKPPQASGLLLHRKGILKLNGKFSQTALELAAPTTFGSLDELAPPRPLARASRPSGAVSEDSILSSESFDQLDLPERLPEPPLRGCVSVDNLTGLEEPPSEGPGSCLRRWRQDPLGDSCFSLTDCQEVTATYRQALRVCSKLT

SEQ ID NO: 57847 - protein, 327 aa, Homo sapiens
  Payload ID: 11349
  Gene Symbol: NAIF1
  Gene Name: nuclear apoptosis inducing factor 1
  Uniprot ID: Q69YI7
  ENSP ID: ENSP00000362170
MAVPAKKRKMNFSEREVEIIVEELELKKHLLVNHFNAGVPLAAKSAAWHGILRRVNAVATCRRELPEVKKKWSDLKTEVRRKVAQVRAAVEGGEAPGPTEEDGAGGPGTGGGSGGGGPAVAPVLLTPMQQRICNLLGEATIISLPSTTEIHPVALGPSATAAAATVTLTQIPTETTYHTLEEGVVEYCTAEAPPPLPPETPVDMMAQHADTSVKPQALKSRIALNSAKLIQEQRVTNLHVKEIAQHLEQQNDLLQMIRRSQEVQACAQERQAQAMEGTQAALSVLIQVLRPMIKDFRRYLQSNTANPAPASDPGQVAQNGQPDSIIQ

SEQ ID NO: 57848 - protein, 494 aa, Homo sapiens
  Payload ID: 11350
  Gene Symbol: NAF1
  Gene Name: nuclear assembly factor 1 ribonucleoprotein
  Uniprot ID: Q96HR8
  ENSP ID: ENSP00000274054
MEVVEAAAAQLETLKFNGTDFGVGEGPAAPSPGSAPVPGTQPPLQSFEGSPDAGQTVEVKPAGEQPLQPVLNAVAAGTPAPQPQPPAESPACGDCVTSPGAAEPARAPDSLETSDSDSDSDSETDSDSSSSSSSSSSSSSSSSSSCISLPPVLSDGDDDLQIEKENKNFPLKTKDELLLNELPSVEELTIILPEDIELKPLGMVSSIIEQLVIIESMTNLPPVNEETVIFKSDRQAAGKIFEIFGPVAHPFYVLRFNSSDHIESKGIKIKETMYFAPSMKDFTQYIFTEKLKQDKGSDASWKNDQEPPPEALDFSDDEKEKEAKQRKKSQIQGRKKLKSEFNEPGEDFTEVHQNWNAHSSASEHAKGYRNREFTRGFSRARYPRSCHGRPPPQHFYNSEHMVSQETSGFPSQRQNNPIMPQYPFPLPVFDMHNFPLRPPPPPPPPPVNMGWATPNMAAHPLLNLPYSLPPPPPPPPLPPPPSSGDSNSHFGPYY

SEQ ID NO: 57849 - protein, 389 aa, Homo sapiens
  Payload ID: 11350
  Gene Symbol: NAF1
  Gene Name: nuclear assembly factor 1 ribonucleoprotein
  Uniprot ID: Q96HR8
  ENSP ID: ENSP00000408963
MEVVEAAAAQLETLKFNGTDFGVGEGPAAPSPGSAPVPGTQPPLQSFEGSPDAGQTVEVKPAGEQPLQPVLNAVAAGTPAPQPQPPAESPACGDCVTSPGAAEPARAPDSLETSDSDSDSDSETDSDSSSSSSSSSSSSSSSSSSCISLPPVLSDGDDDLQIEKENKNFPLKTKDELLLNELPSVEELTIILPEDIELKPLGMVSSIIEQLVIIESMTNLPPVNEETVIFKSDRQAAGKIFEIFGPVAHPFYVLRFNSSDHIESKGIKIKETMYFAPSMKDFTQYIFTEKLKQDKGSDASWKNDQEPPPEALDFSDDEKEKEAKQRKKSQIQGRKKLKSEFNEPGTGISHRYCGLGSRPLQSSESHKLFGFQMHIKVTFTCYFSLLSMQ

SEQ ID NO: 57850 - protein, 42 aa, Homo sapiens
  Payload ID: 11350
  Gene Symbol: NAF1
  Gene Name: nuclear assembly factor 1 ribonucleoprotein
  ENSP ID: ENSP00000427518
MYFAPSMKDFTQYIFTEKLKQDKGSDASWKNDQEPPPETMVD

SEQ ID NO: 57851 - protein, 788 aa, Homo sapiens
  Payload ID: 11351
  Gene Symbol: NASP
  Gene Name: nuclear autoantigenic sperm protein (histone-binding)
  Uniprot ID: P49321
  ENSP ID: ENSP00000255120
MAMESTATAAVAAELVSADKIEDVPAPSTSADKVESLDVDSEAKKLLGLGQKHLVMGDIPAAVNAFQEAASLLGKKYGETANECGEAFFFYGKSLLELARMENGVLGNALEGVHVEEEEGEKTEDESLVENNDNIDEEAREELREQVYDAMGEKEEAKKTEDKSLAKPETDKEQDSEMEKGGREDMDISKSAEEPQEKVDLTLDWLTETSEEAKGGAAPEGPNEAEVTSGKPEQEVPDAEEEKSVSGTDVQEECREKGGQEKQGEVIVSIEEKPKEVSEEQPVVTLEKQGTAVEVEAESLDPTVKPVDVGGDEPEEKVVTSENEAGKAVLEQLVGQEVPPAEESPEVTTEAAEASAVEAGSEVSEKPGQEAPVLPKDGAVNGPSVVGDQTPIEPQTSIERLTETKDGSGLEEKVRAKLVPSQEETKLSVEESEAAGDGVDTKVAQGATEKSPEDKVQIAANEETQEREEQMKEGEETEGSEEDDKENDKTEEMPNDSVLENKSLQENEEEEIGNLELAWDMLDLAKIIFKRQETKEAQLYAAQAHLKLGEVSVESENYVQAVEEFQSCLNLQEQYLEAHDRLLAETHYQLGLAYGYNSQYDEAVAQFSKSIEVIENRMAVLNEQVKEAEGSSAEYKKEIEELKELLPEIREKIEDAKESQRSGNVAELALKATLVESSTSGFTPGGGGSSVSMIASRKPTDGASSSNCVTDISHLVRKKRKPEEESPRKDDAKKAKQEPEVNGGSGDAVPSGNEVSENMEEEAENQAESRAAVEGTVEAGATVESTAC

SEQ ID NO: 57852 - protein, 449 aa, Homo sapiens
  Payload ID: 11351
  Gene Symbol: NASP
  Gene Name: nuclear autoantigenic sperm protein (histone-binding)
  Uniprot ID: P49321
  ENSP ID: ENSP00000255121
MAMESTATAAVAAELVSADKIEDVPAPSTSADKVESLDVDSEAKKLLGLGQKHLVMGDIPAAVNAFQEAASLLGKKYGETANECGEAFFFYGKSLLELARMENGVLGNALEGVHVEEEEGEKTEDESLVENNDNIDETEGSEEDDKENDKTEEMPNDSVLENKSLQENEEEEIGNLELAWDMLDLAKIIFKRQETKEAQLYAAQAHLKLGEVSVESENYVQAVEEFQSCLNLQEQYLEAHDRLLAETHYQLGLAYGYNSQYDEAVAQFSKSIEVIENRMAVLNEQVKEAEGSSAEYKKEIEELKELLPEIREKIEDAKESQRSGNVAELALKATLVESSTSGFTPGGGGSSVSMIASRKPTDGASSSNCVTDISHLVRKKRKPEEESPRKDDAKKAKQEPEVNGGSGDAVPSGNEVSENMEEEAENQAESRAAVEGTVEAGATVESTAC

SEQ ID NO: 57853 - protein, 422 aa, Homo sapiens
  Payload ID: 11351
  Gene Symbol: NASP
  Gene Name: nuclear autoantigenic sperm protein (histone-binding)
  ENSP ID: ENSP00000361122
MAMESTATAAVAAELVSADKIEDVPAPSTSADKVESLDVDSEAKKLLGLGQKHLVMGDIPAAVNAFQEAASLLMENGVLGNALEGVHVEEEEGEKTEDESLVENNDNIDETEGSEEDDKENDKTEEMPNDSVLENKSLQENEEEEIGNLELAWDMLDLAKIIFKRQETKEAQLYAAQAHLKLGEVSVESENYVQAVEEFQSCLNLQEQYLEAHDRLLAETHYQLGLAYGYNSQYDEAVAQFSKSIEVIENRMAVLNEQVKEAEGSSAEYKKEIEELKELLPEIREKIEDAKESQRSGNVAELALKATLVESSTSGFTPGGGGSSVSMIASRKPTDGASSSNCVTDISHLVRKKRKPEEESPRKDDAKKAKQEPEVNGGSGDAVPSGNEVSENMEEEAENQAESRAAVEGTVEAGATVESTAC

SEQ ID NO: 57854 - protein, 38 aa, Homo sapiens
  Payload ID: 11351
  Gene Symbol: NASP
  Gene Name: nuclear autoantigenic sperm protein (histone-binding)
  ENSP ID: ENSP00000388010
MAMESTATAAVAAELVSADKIEDVPAPSTSADKVESNH

SEQ ID NO: 57855 - protein, 256 aa, Homo sapiens
  Payload ID: 11351
  Gene Symbol: NASP
  Gene Name: nuclear autoantigenic sperm protein (histone-binding)
  ENSP ID: ENSP00000400792
MAMESTATAAVAAELVSADKIEDVPAPSTSADKVESLDVDSEAKKLLGLGQKHLVMGDIPAAVNAFQEAASLLGKKYGETANECGEAFFFYGKSLLELARMENGVLGNALEGVHVEEEEGEKTEDESLVENNDNIDETEGSEEDDKENDKTEEMPNDSVLENKSLQENEEEEIGNLELAWDMLDLAKIIFKRQETKEAQLYAAQAHLKLGEVSVESENYVQAVEEFQSCLNLQEQYLEAHDRLLAETHYQLGLAYG

SEQ ID NO: 57856 - protein, 38 aa, Homo sapiens; identical to SEQ ID NO: 57854
  Payload ID: 11351
  Gene Symbol: NASP
  Gene Name: nuclear autoantigenic sperm protein (histone-binding)
  ENSP ID: ENSP00000403157

SEQ ID NO: 57857 - protein, 268 aa, Homo sapiens
  Payload ID: 11351
  Gene Symbol: NASP
  Gene Name: nuclear autoantigenic sperm protein (histone-binding)
  ENSP ID: ENSP00000432289
MAMESTATAAVAAELVSADKIEDVPAPSTSADKVERMENGVLGNALEGVHVEEEEGEKTEDESLVENNDNIDETEGSEEDDKENDKTEEMPNDSVLENKSLQENEEEEIGNLELAWDMLDLAKIIFKRQETKEAQLYAAQAHLKLGEVSVESENYVQAVEEFQSCLNLQEQYLEAHDRLLAETHYQLGLAYGYNSQYDEAVAQFSKSIEVIENRMAVLNEQVKEAEGSSAEYKKEIEELKELLPEIREKIEDAKESQRSGNVAELALK

SEQ ID NO: 57858 - protein, 175 aa, Homo sapiens
  Payload ID: 11351
  Gene Symbol: NASP
  Gene Name: nuclear autoantigenic sperm protein (histone-binding)
  ENSP ID: ENSP00000434240
  MOD_RES (1)..(1): Any amino acid
XQEQYLEAHDRLLAETHYQLGLAYGYNSQYDEAVAQFSKSIEVIENRMAVLNEQVKEAEGSSAEYKKEIEELKELLPEIREKIEDAKESQRSGNVAELALKATLVESSTSGFTPGGGGSSVSMIASRKPTDGASSSNCVTDISHLVRKKAENQAESRAAVEGTVEAGATVESTAC

SEQ ID NO: 57859 - protein, 56 aa, Homo sapiens
  Payload ID: 11351
  Gene Symbol: NASP
  Gene Name: nuclear autoantigenic sperm protein (histone-binding)
  ENSP ID: ENSP00000435363
MAMESTATAAVAAELVSADKIEDVPAPSTSADKVERDEVSSRCPGWGSSHLLTSAT

SEQ ID NO: 57860 - protein, 55 aa, Homo sapiens
  Payload ID: 11351
  Gene Symbol: NASP
  Gene Name: nuclear autoantigenic sperm protein (histone-binding)
  ENSP ID: ENSP00000435548
MAMESTATAAVAAELVSADKMSGRARWLTPVIQHFGRPRWADHEVRRSRPSWLTR

SEQ ID NO: 57861 - protein, 38 aa, Homo sapiens; identical to SEQ ID NO: 57854
  Payload ID: 11351
  Gene Symbol: NASP
  Gene Name: nuclear autoantigenic sperm protein (histone-binding)
  ENSP ID: ENSP00000436388

SEQ ID NO: 57862 - protein, 56 aa, Homo sapiens; identical to SEQ ID NO: 57859
  Payload ID: 11351
  Gene Symbol: NASP
  Gene Name: nuclear autoantigenic sperm protein (histone-binding)
  ENSP ID: ENSP00000436778

SEQ ID NO: 57863 - protein, 37 aa, Homo sapiens
  Payload ID: 11351
  Gene Symbol: NASP
  Gene Name: nuclear autoantigenic sperm protein (histone-binding)
  ENSP ID: ENSP00000436790
MAMESTATAAVAAELVSADKIEDVPAPSTSADKVERN

SEQ ID NO: 57864 - protein, 316 aa, Homo sapiens
  Payload ID: 11351
  Gene Symbol: NASP
  Gene Name: nuclear autoantigenic sperm protein (histone-binding)
  ENSP ID: ENSP00000436924
MAMESTATAAVAAELVSADKIEDVPAPSTSADKVERGKKYGETANECGEAFFFYGKSLLELARMENGVLGNALEGVHVEEEEGEKTEDESLVENNDNIDEEAREELREQVYDAMGEKEEAKKTEDKSLAKPETDKEQDSEMEKGGREDMDISKSAEEPQEKVDLTLDWLTETSEEAKGGAAPEGPNEAEVTSGKPEQEVPDAEEEKSVSGTDVQEECREKGGQEKQGEVIVSIEEKPKEVSEEQPVVTLEKQGTAVEVEAESLDPTVKPVDVGGDEPEEKVVTSENEAGKAVLEQLVGQEVPPAEESPEVTTEAAE

SEQ ID NO: 57865 - protein, 154 aa, Homo sapiens
  Payload ID: 11351
  Gene Symbol: NASP
  Gene Name: nuclear autoantigenic sperm protein (histone-binding)
  ENSP ID: ENSP00000436939
MAMESTATAAVAAELVSADNLDVDSEAKKLLGLGQKHLVMGDIPAAVNAFQEAASLLGKKYGETANECGEAFFFYGKSLLELARMENGVLGNALEGVHVEEEEGEKTEDESLVENNDNIDETEGSEEDDKENDKTEEMPNDSVLENKSLQENEE

SEQ ID NO: 57866 - protein, 288 aa, Homo sapiens
  Payload ID: 11351
  Gene Symbol: NASP
  Gene Name: nuclear autoantigenic sperm protein (histone-binding)
  ENSP ID: ENSP00000437116
  MOD_RES (1)..(1): Any amino acid
XTEGSEEDDKENDKTEEMPNDSVLENKSLQENEEEEIGNLELAWDMLDLAKIIFKRQETKEAQLYAAQAHLKLGEVSVESENYVQAVEEFQSCLNLQEQYLEAHDRLLAETHYQLGLAYGYNSQYDEAVAQFSKSIEVIENRMAVLNEQVKEAEGSSAEYKKEIEELKELLPEIREKIEDAKESQRSGNVAELALKATLVESSTSGFTPGGGGSSVSMKRKPEEESPRKDDAKKAKQEPEVNGGSGDAVPSGNEVSENMEEEAENQAESRAAVEGTVEAGATVESTAC

SEQ ID NO: 57867 - protein, 143 aa, Homo sapiens
  Payload ID: 11351
  Gene Symbol: NASP
  Gene Name: nuclear autoantigenic sperm protein (histone-binding)
  ENSP ID: ENSP00000437241
MAMESTATAAVAAELVSADKIEDVPAPSTSADKVERMENGVLGNALEGVHVEEEEGEKTEDESLVENNDNIDEEAREELREQVYDAMGEKEEAKKTEDKSLAKPETDKEQDSEMEKGGREDMDISKSAEEPQEKVDLTLDWLT

SEQ ID NO: 57868 - protein, 724 aa, Homo sapiens
  Payload ID: 11351
  Gene Symbol: NASP
  Gene Name: nuclear autoantigenic sperm protein (histone-binding)
  Uniprot ID: P49321
  ENSP ID: ENSP00000438871
MAMESTATAAVAAELVSADKIEDVPAPSTSADKVERMENGVLGNALEGVHVEEEEGEKTEDESLVENNDNIDEEAREELREQVYDAMGEKEEAKKTEDKSLAKPETDKEQDSEMEKGGREDMDISKSAEEPQEKVDLTLDWLTETSEEAKGGAAPEGPNEAEVTSGKPEQEVPDAEEEKSVSGTDVQEECREKGGQEKQGEVIVSIEEKPKEVSEEQPVVTLEKQGTAVEVEAESLDPTVKPVDVGGDEPEEKVVTSENEAGKAVLEQLVGQEVPPAEESPEVTTEAAEASAVEAGSEVSEKPGQEAPVLPKDGAVNGPSVVGDQTPIEPQTSIERLTETKDGSGLEEKVRAKLVPSQEETKLSVEESEAAGDGVDTKVAQGATEKSPEDKVQIAANEETQEREEQMKEGEETEGSEEDDKENDKTEEMPNDSVLENKSLQENEEEEIGNLELAWDMLDLAKIIFKRQETKEAQLYAAQAHLKLGEVSVESENYVQAVEEFQSCLNLQEQYLEAHDRLLAETHYQLGLAYGYNSQYDEAVAQFSKSIEVIENRMAVLNEQVKEAEGSSAEYKKEIEELKELLPEIREKIEDAKESQRSGNVAELALKATLVESSTSGFTPGGGGSSVSMIASRKPTDGASSSNCVTDISHLVRKKRKPEEESPRKDDAKKAKQEPEVNGGSGDAVPSGNEVSENMEEEAENQAESRAAVEGTVEAGATVESTAC

SEQ ID NO: 57869 - protein, 56 aa, Homo sapiens; identical to SEQ ID NO: 57859
  Payload ID: 11351
  Gene Symbol: NASP
  Gene Name: nuclear autoantigenic sperm protein (histone-binding)
  ENSP ID: ENSP00000486336

SEQ ID NO: 57870 - protein, 155 aa, Homo sapiens
  Payload ID: 11352
  Gene Symbol: NCBP1
  Gene Name: nuclear cap binding protein subunit 1, 80kDa
  ENSP ID: ENSP00000364272
  MOD_RES (1)..(1): Any amino acid
XLFVWEILHSTIRKMNKHVLKIQKELEEAKEKLARQHKRRSDDDDRSSDRKDGVLEEQIERLQEKVESAQSEQKNLFLVIFQRFIMILTEHLVRCETDGTSVLTPWYKNCIERLQQIFLQVCGELRLGNNTILSHKDFSLKKILVKFVRRLYSTC

SEQ ID NO: 57871 - protein, 790 aa, Homo sapiens
  Payload ID: 11352
  Gene Symbol: NCBP1
  Gene Name: nuclear cap binding protein subunit 1, 80kDa
  Uniprot ID: Q09161
  ENSP ID: ENSP00000364289
MSRRRHSDENDGGQPHKRRKTSDANETEDHLESLICKVGEKSACSLESNLEGLAGVLEADLPNYKSKILRLLCTVARLLPEKLTIYTTLVGLLNARNYNFGGEFVEAMIRQLKESLKANNYNEAVYLVRFLSDLVNCHVIAAPSMVAMFENFVSVTQEEDVPQVRRDWYVYAFLSSLPWVGKELYEKKDAEMDRIFANTESYLKRRQKTHVPMLQVWTADKPHPQEEYLDCLWAQIQKLKKDRWQERHILRPYLAFDSILCEALQHNLPPFTPPPHTEDSVYPMPRVIFRMFDYTDDPEGPVMPGSHSVERFVIEENLHCIIKSHWKERKTCAAQLVSYPGKNKIPLNYHIVEVIFAELFQLPAPPHIDVMYTTLLIELCKLQPGSLPQVLAQATEMLYMRLDTMNTTCVDRFINWFSHHLSNFQFRWSWEDWSDCLSQDPESPKPKFVREVLEKCMRLSYHQRILDIVPPTFSALCPANPTCIYKYGDESSNSLPGHSVALCLAVAFKSKATNDEIFSILKDVPNPNQDDDDDEGFSFNPLKIEVFVQTLLHLAAKSFSHSFSALAKFHEVFKTLAESDEGKLHVLRVMFEVWRNHPQMIAVLVDKMIRTQIVDCAAVANWIFSSELSRDFTRLFVWEILHSTIRKMNKHVLKIQKELEEAKEKLARQHKRRSDDDDRSSDRKDGVLEEQIERLQEKVESAQSEQKNLFLVIFQRFIMILTEHLVRCETDGTSVLTPWYKNCIERLQQIFLQHHQIIQQYMVTLENLLFTAELDPHILAVFQQFCALQA

SEQ ID NO: 57872 - protein, 82 aa, Homo sapiens
  Payload ID: 11352
  Gene Symbol: NCBP1
  Gene Name: nuclear cap binding protein subunit 1, 80kDa
  ENSP ID: ENSP00000433007
MSRRRHSDENDGGQPHKRRKTSDANETEDHLESLICKVGEKSACSLESNLEGLAGVLEADLPNYKSKILRLLCTVSVFYLIL

SEQ ID NO: 57873 - protein, 82 aa, Homo sapiens; identical to SEQ ID NO: 57872
  Payload ID: 11352
  Gene Symbol: NCBP1
  Gene Name: nuclear cap binding protein subunit 1, 80kDa
  ENSP ID: ENSP00000487569

SEQ ID NO: 57874 - protein, 156 aa, Homo sapiens
  Payload ID: 11353
  Gene Symbol: NCBP2
  Gene Name: nuclear cap binding protein subunit 2, 20kDa
  Uniprot ID: P52298
  ENSP ID: ENSP00000326806
MSGGLLKALRSDSYVELSQYRDQHFRGDNEEQEKLLKKSCTLYVGNLSFYTTEEQIYELFSKSGDIKKIIMGLDKMKKTACGFCFVEYYSRADAENAMRYINGTRLDDRIIRTDWDAGFKEGRQYGRGRSGGQVRDEYRQDYDAGRGGYGKLAQNQ

SEQ ID NO: 57875 - protein, 83 aa, Homo sapiens
  Payload ID: 11353
  Gene Symbol: NCBP2
  Gene Name: nuclear cap binding protein subunit 2, 20kDa
  ENSP ID: ENSP00000389315
MGLDKMKKTACGFCFVEYYSRADAENAMRYINGTRLDDRIIRTDWDAGFKEGRQYGRGRSGGQVRDEYRQDYDAGRGGYGKLA

SEQ ID NO: 57876 - protein, 86 aa, Homo sapiens
  Payload ID: 11353
  Gene Symbol: NCBP2
  Gene Name: nuclear cap binding protein subunit 2, 20kDa
  ENSP ID: ENSP00000394105
MGLDKMKKTACGFCFVEYYSRADAENAMRYINGTRLDDRIIRTDWDAGFKEGRQYGRGRSGGQVRDEYRQDYDAGRGGYGKLAQNQ

SEQ ID NO: 57877 - protein, 103 aa, Homo sapiens
  Payload ID: 11353
  Gene Symbol: NCBP2
  Gene Name: nuclear cap binding protein subunit 2, 20kDa
  Uniprot ID: P52298
  ENSP ID: ENSP00000397619
MSGGLLKALRSDSYVELSQYRDQHFRGDNEEQEKLLKKSYAENAMRYINGTRLDDRIIRTDWDAGFKEGRQYGRGRSGGQVRDEYRQDYDAGRGGYGKLAQNQ

SEQ ID NO: 57878 - protein, 15 aa, Homo sapiens
  Payload ID: 11353
  Gene Symbol: NCBP2
  Gene Name: nuclear cap binding protein subunit 2, 20kDa
  ENSP ID: ENSP00000402549
MGLDKMKKTACGFCF

SEQ ID NO: 57879 - protein, 138 aa, Homo sapiens
  Payload ID: 11353
  Gene Symbol: NCBP2
  Gene Name: nuclear cap binding protein subunit 2, 20kDa
  Uniprot ID: P52298
  ENSP ID: ENSP00000412785
MVLRKLYAGDNEEQEKLLKKSCTLYVGNLSFYTTEEQIYELFSKSGDIKKIIMGLDKMKKTACGFCFVEYYSRADAENAMRYINGTRLDDRIIRTDWDAGFKEGRQYGRGRSGGQVRDEYRQDYDAGRGGYGKLAQNQ

SEQ ID NO: 57880 - protein, 86 aa, Homo sapiens; identical to SEQ ID NO: 57876
  Payload ID: 11353
  Gene Symbol: NCBP2
  Gene Name: nuclear cap binding protein subunit 2, 20kDa
  ENSP ID: ENSP00000413518

SEQ ID NO: 57881 - protein, 54 aa, Homo sapiens
  Payload ID: 11353
  Gene Symbol: NCBP2
  Gene Name: nuclear cap binding protein subunit 2, 20kDa
  ENSP ID: ENSP00000414122
MSGGLLKALRSDSYVELSQYRDQHFRVREAGPRDGKALGKNAEKRVTMKNKKNY

SEQ ID NO: 57882 - protein, 153 aa, Homo sapiens
  Payload ID: 11354
  Gene Symbol: NCBP2L
  Gene Name: nuclear cap binding protein subunit 2-like
  Uniprot ID: A6PVI3
  ENSP ID: ENSP00000476955
MSKDLKILCKDPALELSCYRDHQFSGRKFQQEKLLKESSTLNMGNLSFYTTEEKIHELFSRSDIRNIFMGLDKIKKTACGFCFVECHNRADAENAMRFLTGTCLDEWIICTDWDVGFREGQQYGRGKSGGQVRDEFREDFHSGRGGFGRQTQI

SEQ ID NO: 57883 - protein, 620 aa, Homo sapiens
  Payload ID: 11355
  Gene Symbol: NCBP3
  Gene Name: nuclear cap binding subunit 3
  Uniprot ID: Q53F19
  ENSP ID: ENSP00000373657
MAAVRGLRVSVKAEAPAGPALGLPSPEAESGVDRGEPEPMEVEEGELEIVPVRRSLKELIPDTSRRYENKAGSFITGIDVTSKEAIEKKEQRAKRFHFRSEVNLAQRNVALDRDMMKKAIPKVRLETIYICGVDEMSTQDVFSYFKEYPPAHIEWLDDTSCNVVWLDEMTATRALINMSSLPAQDKIRSRDASEDKSAEKRKKDKQEDSSDDDEAEEGEVEDENSSDVELDTLSQVEEESLLRNDLRPANKLAKGNRLFMRFATKDDKKELGAARRSQYYMKYGNPNYGGMKGILSNSWKRRYHSRRIQRDVIKKRALIGDDVGLTSYKHRHSGLVNVPEEPIEEEEEEEEEEEEEEEEDQDMDADDRVVVEYHEELPALKQPRERSASRRSSASSSDSDEMDYDLELKMISTPSPKKSMKMTMYADEVESQLKNIRNSMRADSVSSSNIKNRIGNKLPPEKFADVRHLLDEKRQHSRPRPPVSSTKSDIRQRLGKRPHSPEKAFSSNPVVRREPSSDVHSRLGVPRQDSKGLYADTREKKSGNLWTRLGSAPKTKEKNTKKVDHRAPGAEEDDSELQRAWGALIKEKEQSRQKKSRLDNLPSLQIEVSRESSSGSEAES

SEQ ID NO: 57884 - protein, 80 aa, Homo sapiens
  Payload ID: 11355
  Gene Symbol: NCBP3
  Gene Name: nuclear cap binding subunit 3
  ENSP ID: ENSP00000466165
PKTKEKNTKKVDHRAPGAEEDDSELQRAWGALIKEKEQSRQKKSRCYQHPFPKKSQFPGAYWTSFEGEEEGSGQLTLPGP

SEQ ID NO: 57885 - protein, 36 aa, Homo sapiens
  Payload ID: 11355
  Gene Symbol: NCBP3
  Gene Name: nuclear cap binding subunit 3
  ENSP ID: ENSP00000467742
  MOD_RES (1)..(1): Any amino acid
XSLLRNDLRPANKLAKGNRLFMRFATKAPGLGSIQD

SEQ ID NO: 57886 - protein, 243 aa, Homo sapiens
  Payload ID: 11356
  Gene Symbol: NUCKS1
  Gene Name: nuclear casein kinase and cyclin-dependent kinase substrate 1
  Uniprot ID: Q9H1E3
  ENSP ID: ENSP00000356110
MSRPVRNRKVVDYSQFQESDDADEDYGRDSGPPTKKIRSSPREAKNKRRSGKNSQEDSEDSEDKDVKTKKDDSHSAEDSEDEKEDHKNVRQQRQAASKAASKQREMLMEDVGSEEEQEEEDEAPFQEKDSGSDEDFLMEDDDDSDYGSSKKKNKKMVKKSKPERKEKKMPKPRLKATVTPSPVKGKGKVGRPTASKASKEKTPSPKEEDEEPESPPEKKTSTSPPPEKSGDEGSEDEAPSGED

SEQ ID NO: 57887 - protein, 444 aa, Homo sapiens
  Payload ID: 11357
  Gene Symbol: NEMP1
  Gene Name: nuclear envelope integral membrane protein 1
  Uniprot ID: O14524
  ENSP ID: ENSP00000300128
MAGGMKVAVSPAVGPGPWGSGVGGGGTVRLLLILSGCLVYGTAETDVNVVMLQESQVCEKRASQQFCYTNVLIPKWHDIWTRIQIRVNSSRLVRVTQVENEEKLKELEQFSIWNFFSSFLKEKLNDTYVNVGLYSTKTCLKVEIIEKDTKYSVIVIRRFDPKLFLVFLLGLMLFFCGDLLSRSQIFYYSTGMTVGIVASLLIIIFILSKFMPKKSPIYVILVGGWSFSLYLIQLVFKNLQEIWRCYWQYLLSYVLTVGFMSFAVCYKYGPLENERSINLLTWTLQLMGLCFMYSGIQIPHIALAIIIIALCTKNLEHPIQWLYITCRKVCKGAEKPVPPRLLTEEEYRIQGEVETRKALEELREFCNSPDCSAWKTVSRIQSPKRFADFVEGSSHLTPNEVSVHEQEYGLGSIIAQDEIYEEASSEEEDSYSRCPAITQNNFLT

SEQ ID NO: 57888 - protein, 371 aa, Homo sapiens
  Payload ID: 11357
  Gene Symbol: NEMP1
  Gene Name: nuclear envelope integral membrane protein 1
  Uniprot ID: O14524
  ENSP ID: ENSP00000368701
MAGGMKVAVSPAVGPGPWGSGVGGGGTVRLLLILSGCLVYGTAETDVNVVMLQESQVCEKRASQQFCYTNVLIPKWHDIWTRIQIRVNSSRLVRVTQVENEEKLKELEQSQIFYYSTGMTVGIVASLLIIIFILSKFMPKKSPIYVILVGGWSFSLYLIQLVFKNLQEIWRCYWQYLLSYVLTVGFMSFAVCYKYGPLENERSINLLTWTLQLMGLCFMYSGIQIPHIALAIIIIALCTKNLEHPIQWLYITCRKVCKGAEKPVPPRLLTEEEYRIQGEVETRKALEELREFCNSPDCSAWKTVSRIQSPKRFADFVEGSSHLTPNEVSVHEQEYGLGSIIAQDEIYEEASSEEEDSYSRCPAITQNNFLT

SEQ ID NO: 57889 - protein, 110 aa, Homo sapiens
  Payload ID: 11357
  Gene Symbol: NEMP1
  Gene Name: nuclear envelope integral membrane protein 1
  ENSP ID: ENSP00000452391
MAGGMKVAVSPAVGPGPWGSGVGGGGTVRLLLILSGCLVYGTAETDVNVVMLQESQVCEKRASQQFCYTNVLIPKWHDIWTRIQIRVNSSRLVRVTQVENEEKLKELEQI

SEQ ID NO: 57890 - protein, 85 aa, Homo sapiens
  Payload ID: 11358
  Gene Symbol: NEMP2
  Gene Name: nuclear envelope integral membrane protein 2
  ENSP ID: ENSP00000340087
MGPRQGRWWLLLWLPPLATLPVRGEAAAAALSVRRCKALKEKDLIRTSESDCYCYNQNSQVEWKYIWSTMQGDCVLLCGACQEDI

SEQ ID NO: 57891 - protein, 417 aa, Homo sapiens
  Payload ID: 11358
  Gene Symbol: NEMP2
  Gene Name: nuclear envelope integral membrane protein 2
  Uniprot ID: A6NFY4
  ENSP ID: ENSP00000386292
MGPRQGRWWLLLWLPPLATLPVRGEAAAAALSVRRCKALKEKDLIRTSESDCYCYNQNSQVEWKYIWSTMQVKITSPGLFRIVYIAERHNCQYPENILSFIKCVIHNFWIPKESNEITIIINPYRETVCFSVEPVKKIFNYMIHVNRNIMDFKLFLVFVAGVFLFFYARTLSQSPTFYYSSGTVLGVLMTLVFVLLLVKRFIPKYSTFWALMVGCWFASVYIVCQLMEDLKWLWYENRIYVLGYVLIVGFFSFVVCYKHGPLADDRSRSLLMWMLRLLSLVLVYAGVAVPQFAYAAIILLMSSWSLHYPLRACSYMRWKMEQWFTSKELVVKYLTEDEYREQADAETNSALEELRRACRKPDFPSWLVVSRLHTPSKFADFVLGGSHLSPEEISLHEEQYGLGGAFLEEQLFNPSTA

SEQ ID NO: 57892 - protein, 35 aa, Homo sapiens
  Payload ID: 11358
  Gene Symbol: NEMP2
  Gene Name: nuclear envelope integral membrane protein 2
  ENSP ID: ENSP00000403867
DCYCYNQNSQVEWKYIWSTMQGDCVLLCGACQEDI

SEQ ID NO: 57893 - protein, 138 aa, Homo sapiens
  Payload ID: 11358
  Gene Symbol: NEMP2
  Gene Name: nuclear envelope integral membrane protein 2
  Uniprot ID: A6NFY4
  ENSP ID: ENSP00000404283
MQVKITSPGLFRIVYIAERHNCQYPENILSFIKCVIHNFWIPKESNEITIIINPYRETVCFSVEPVKKIFNYMIHVNRNIMDFKLFLVFVAGVFLFFYARTLSQSPTFYYSSGTVLGVLMTLVFVLLLVKRFIPKAMS

SEQ ID NO: 57894 - protein, 24 aa, Homo sapiens
  Payload ID: 11358
  Gene Symbol: NEMP2
  Gene Name: nuclear envelope integral membrane protein 2
  ENSP ID: ENSP00000410306
MQVKITSPGLFRIVYIAERHNCQY

SEQ ID NO: 57895 - protein, 1076 aa, Homo sapiens
  Payload ID: 11359
  Gene Symbol: NEMF
  Gene Name: nuclear export mediator factor
  Uniprot ID: O60524
  ENSP ID: ENSP00000298310
MKSRFSTIDLRAVLAELNASLLGMRVNNVYDVDNKTYLIRLQKPDFKATLLLESGIRIHTTEFEWPKNMMPSSFAMKCRKHLKSRRLVSAKQLGVDRIVDFQFGSDEAAYHLIIELYDRGNIVLTDYEYVILNILRFRTDEADDVKFAVRERYPLDHARAAEPLLTLERLTEIVASAPKGELLKRVLNPLLPYGPALIEHCLLENGFSGNVKVDEKLETKDIEKVLVSLQKAEDYMKTTSNFSGKGYIIQKREIKPSLEADKPVEDILTYEEFHPFLFSQHSQCPYIEFESFDKAVDEFYSKIEGQKIDLKALQQEKQALKKLDNVRKDHENRLEALQQAQEIDKLKGELIEMNLQIVDRAIQVVRSALANQIDWTEIGLIVKEAQAQGDPVASAIKELKLQTNHVTMLLRNPYLLSEEEDDDVDGDVNVEKNETEPPKGKKKKQKNKQLQKPQKNKPLLVDVDLSLSAYANAKKYYDHKRYAAKKTQKTVEAAEKAFKSAEKKTKQTLKEVQTVTSIQKARKVYWFEKFLWFISSENYLIIGGRDQQQNEIIVKRYLTPGDIYVHADLHGATSCVIKNPTGEPIPPRTLTEAGTMALCYSAAWDARVITSAWWVYHHQVSKTAPTGEYLTTGSFMIRGKKNFLPPSYLMMGFSFLFKVDESCVWRHQGERKVRVQDEDMETLASCTSELISEEMEQLDGGDTSSDEDKEEHETPVEVELMTQVDQEDITLQSGRDELNEELIQEESSEDEGEYEEVRKDQDSVGEMKDEGEETLNYPDTTIDLSHLQPQRSIQKLASKEESSNSSDSKSQSRRHLSAKERREMKKKKLPSDSGDLEALEGKDKEKESTVHIETHQNTSKNVAAVQPMKRGQKSKMKKMKEKYKDQDEEDRELIMKLLGSAGSNKEEKGKKGKKGKTKDEPVKKQPQKPRGGQRVSDNIKKETPFLEVITHELQDFAVDDPHDDKEEQDLDQQGNEENLFDSLTGQPHPEDVLLFAIPICAPYTTMTNYKYKVKLTPGVQKKGKAAKTALNSFMHSKEATAREKDLFRSVKDTDLSRNIPGKVKVSAPNLLNVKRK

SEQ ID NO: 57896 - protein, 178 aa, Homo sapiens
  Payload ID: 11359
  Gene Symbol: NEMF
  Gene Name: nuclear export mediator factor
  ENSP ID: ENSP00000451740
MKSRFSTIDLRAVLAELNASLLGMRVNNVYDVDNKTYLIRLQKPDFKATLLLESGIRIHTTEFEWPKNMMPSSFAMKGNIVLTDYEYVILNILRFRTDEADDVKFAVRERYPLDHARAAEPLLTLERLTEIVASAPKGELLKRVLNPLLPYGPALIEHCLLENGFSGNVKVDEKLETK

SEQ ID NO: 57897 - protein, 121 aa, Homo sapiens
  Payload ID: 11359
  Gene Symbol: NEMF
  Gene Name: nuclear export mediator factor
  ENSP ID: ENSP00000452174
MKSRFSTIDLRAVLAELNASLLGMRVNNVYDVDNKTYLIRLQKPDFKATLLLESGIRIHTTEFEWPKNMMPSSFAMKCRKHLKSRRLVSAKQLGVDRIVDFQFGSDEAAYHLIIELYDRVS

SEQ ID NO: 57898 - protein, 998 aa, Homo sapiens
  Payload ID: 11359
  Gene Symbol: NEMF
  Gene Name: nuclear export mediator factor
  ENSP ID: ENSP00000452540
MKSRFSTIDLRAVLAELNASLLGMRVNNVYDVDNKTYLIRLQKPDFKATLLLESGIRIHTTEFEWPKNMMPSSFAMKGNIVLTDYEYVILNILRFRTDEADDVKFAVRERYPLDHARAAEPLLTLERLTEIVASAPKGELLKRVLNPLLPYGPALIEHCLLENGFSGNVKVDEKLETKDIEKVLVSLQKAEDYMKTTSNFSGKGYIIQKREIKPSLEADKPVEDILTYEEFHPFLFSQHSQCPYIEFESFDKAVDEFYSKIEGQKIDLKALQQEKQALKKLDNVRKDHENRLEALQQAQEIDKLKGELIEMNLQIVDRAIQVVRSALANQIDWTEIGLIVKEAQAQGDPVASAIKELKLQTNHVTMLLRNPYLLSEEEDDDVDGDVNVEKNETEPPKGKKKKQKNKQLQKPQKNKPLLVDVDLSLSAYANAKKYYDHKRYAAKKTQKTVEAAEKAFKSAEKKTKQTLKEVQTVTSIQKARKVYWFEKFLWFISSENYLIIGGRDQQQNEIIVKRYLTPGDIYVHADLHGATSCVIKNPTGEPIPPRTLTEAGTMALCYSAAWDARVITSAWWVYHHQVSKTAPTGEYLTTGSFMIRGKKNFLPPSYLMMGFSFLFKVDESCVWRHQGERKVRVQDEDMETLASCTSELISEEMEQLDGGDTSSDEDKEEHETPVEVELMTQVDQEDITLQSGRDELNEELIQEESSEDEGEYEEVRKDQDSVGEMKDEGEETLNYPDTTIDLSHLQPQRSIQKLASKEESSNSSDSKSQSRRHLSAKERREMKKKKLPSDSGDLEALEGKDKEKESTVHIETHQNTSKNVAAVQPMKRGQKSKMKKMKEKYKDQDEEDRELIMKLLGSAGSNKEEKGKKGKKGKTKDEPVKKQPQKPRGGQRVSDNIKKETPFLEVITHELQDFAVDDPHDDKEEQDLDQQGNEENLFDSLTGQPHPEDVLLFAIPICAPYTTMTNYKYKVKLTPGVQKKGKAAKTALNSFMHSKEAT

SEQ ID NO: 57899 - protein, 380 aa, Homo sapiens
  Payload ID: 11360
  Gene Symbol: NFIA
  Gene Name: nuclear factor I/A
  ENSP ID: ENSP00000360226
MYSPLCLTQDEFHPFIEALLPHVRAFAYTWFNLQARKRKYFKKHEKRMSKEEERAVKDELLSEKPEVKQKWASRLLAKLRKDIRPEYREDFVLTVTGKKPPCCVLSNPDQKGKMRRIDCLRQADKVWRLDLVMVILFKGIPLESTDGERLVKSPQCSNPGLCVQPHHIGVSVKELDLYLAYFVHAAGMPSPTTLKKSEKSGFSSPSPSQTSSLGTAFTQHHRPVITGPRASPHATPSTLHFPTSPIIQQPGPYFSHPAIRYHPQETLKEFVQLVCPDAGQQAGQVGFLNPNGSSQGKVHNPFLPTPMLPPPPPPPMARPVPLPVPDTKPPTTSTEGGAASPTSPTYSTPSTSPANRFVSVGPRDPSFVNIPQQTQSWYLG

SEQ ID NO: 57900 - protein, 487 aa, Homo sapiens
  Payload ID: 11360
  Gene Symbol: NFIA
  Gene Name: nuclear factor I/A
  ENSP ID: ENSP00000360227
MYSPLCLTQDEFHPFIEALLPHVRAFAYTWFNLQARKRKYFKKHEKRMSKEEERAVKDELLSEKPEVKQKWASRLLAKLRKDIRPEYREDFVLTVTGKKPPCCVLSNPDQKGKMRRIDCLRQADKVWRLDLVMVILFKGIPLESTDGERLVKSPQCSNPGLCVQPHHIGVSVKELDLYLAYFVHAAGHLGFQDSFVTSGVFSVTELVRVSQTPIAAGTGPNFSLSDLESSSYYSMSPGAMRRSLPSTSSTSSTKRLKSVEDEMDSPGEEPFYTGQGRSPGSGSQSSGWHEVEPGMPSPTTLKKSEKSGFSSPSPSQTSSLGTAFTQHHRPVITGPRASPHATPSTLHFPTSPIIQQPGPYFSHPAIRYHPQETLKEFVQLVCPDAGQQAGQVGFLNPNGSSQGKVHNPFLPTPMLPPPPPPPMARPVPLPVPDTKPPTTSTEGGAASPTSPTYSTPSTSPANRFVSVGPRDPSFVNIPQQTQSWYLG

SEQ ID NO: 57901 - protein, 498 aa, Homo sapiens
  Payload ID: 11360
  Gene Symbol: NFIA
  Gene Name: nuclear factor I/A
  Uniprot ID: Q12857
  ENSP ID: ENSP00000360229
MYSPLCLTQDEFHPFIEALLPHVRAFAYTWFNLQARKRKYFKKHEKRMSKEEERAVKDELLSEKPEVKQKWASRLLAKLRKDIRPEYREDFVLTVTGKKPPCCVLSNPDQKGKMRRIDCLRQADKVWRLDLVMVILFKGIPLESTDGERLVKSPQCSNPGLCVQPHHIGVSVKELDLYLAYFVHAADSSQSESPSQPSDADIKDQPENGHLGFQDSFVTSGVFSVTELVRVSQTPIAAGTGPNFSLSDLESSSYYSMSPGAMRRSLPSTSSTSSTKRLKSVEDEMDSPGEEPFYTGQGRSPGSGSQSSGWHEVEPGMPSPTTLKKSEKSGFSSPSPSQTSSLGTAFTQHHRPVITGPRASPHATPSTLHFPTSPIIQQPGPYFSHPAIRYHPQETLKEFVQLVCPDAGQQAGQVGFLNPNGSSQGKVHNPFLPTPMLPPPPPPPMARPVPLPVPDTKPPTTSTEGGAASPTSPILVPGIKVAASHHPPDRPPDPFSTL

SEQ ID NO: 57902 - protein, 554 aa, Homo sapiens
  Payload ID: 11360
  Gene Symbol: NFIA
  Gene Name: nuclear factor I/A
  Uniprot ID: Q12857
  ENSP ID: ENSP00000360231
MQMCRPASSSVLYVPTRWPGGCGATWQSCPSPPPRRTRIPQRPAVMYSPLCLTQDEFHPFIEALLPHVRAFAYTWFNLQARKRKYFKKHEKRMSKEEERAVKDELLSEKPEVKQKWASRLLAKLRKDIRPEYREDFVLTVTGKKPPCCVLSNPDQKGKMRRIDCLRQADKVWRLDLVMVILFKGIPLESTDGERLVKSPQCSNPGLCVQPHHIGVSVKELDLYLAYFVHAADSSQSESPSQPSDADIKDQPENGHLGFQDSFVTSGVFSVTELVRVSQTPIAAGTGPNFSLSDLESSSYYSMSPGAMRRSLPSTSSTSSTKRLKSVEDEMDSPGEEPFYTGQGRSPGSGSQSSGWHEVEPGMPSPTTLKKSEKSGFSSPSPSQTSSLGTAFTQHHRPVITGPRASPHATPSTLHFPTSPIIQQPGPYFSHPAIRYHPQETLKEFVQLVCPDAGQQAGQVGFLNPNGSSQGKVHNPFLPTPMLPPPPPPPMARPVPLPVPDTKPPTTSTEGGAASPTSPTYSTPSTSPANRFVSVGPRDPSFVNIPQQTQSWYLG

SEQ ID NO: 57903 - protein, 532 aa, Homo sapiens
  Payload ID: 11360
  Gene Symbol: NFIA
  Gene Name: nuclear factor I/A
  ENSP ID: ENSP00000360233
MKLADSVMAGKASDGSIKWQLCYDISARTWWMDEFHPFIEALLPHVRAFAYTWFNLQARKRKYFKKHEKRMSKEEERAVKDELLSEKPEVKQKWASRLLAKLRKDIRPEYREDFVLTVTGKKPPCCVLSNPDQKGKMRRIDCLRQADKVWRLDLVMVILFKGIPLESTDGERLVKSPQCSNPGLCVQPHHIGVSVKELDLYLAYFVHAADSSQSESPSQPSDADIKDQPENGHLGFQDSFVTSGVFSVTELVRVSQTPIAAGTGPNFSLSDLESSSYYSMSPGAMRRSLPSTSSTSSTKRLKSVEDEMDSPGEEPFYTGQGRSPGSGSQSSGWHEVEPGMPSPTTLKKSEKSGFSSPSPSQTSSLGTAFTQHHRPVITGPRASPHATPSTLHFPTSPIIQQPGPYFSHPAIRYHPQETLKEFVQLVCPDAGQQAGQVGFLNPNGSSQGKVHNPFLPTPMLPPPPPPPMARPVPLPVPDTKPPTTSTEGGAASPTSPTYSTPSTSPANRFVSVGPRDPSFVNIPQQTQSWYLG

SEQ ID NO: 57904 - protein, 509 aa, Homo sapiens
  Payload ID: 11360
  Gene Symbol: NFIA
  Gene Name: nuclear factor I/A
  Uniprot ID: Q12857
  ENSP ID: ENSP00000384523
MYSPLCLTQDEFHPFIEALLPHVRAFAYTWFNLQARKRKYFKKHEKRMSKEEERAVKDELLSEKPEVKQKWASRLLAKLRKDIRPEYREDFVLTVTGKKPPCCVLSNPDQKGKMRRIDCLRQADKVWRLDLVMVILFKGIPLESTDGERLVKSPQCSNPGLCVQPHHIGVSVKELDLYLAYFVHAADSSQSESPSQPSDADIKDQPENGHLGFQDSFVTSGVFSVTELVRVSQTPIAAGTGPNFSLSDLESSSYYSMSPGAMRRSLPSTSSTSSTKRLKSVEDEMDSPGEEPFYTGQGRSPGSGSQSSGWHEVEPGMPSPTTLKKSEKSGFSSPSPSQTSSLGTAFTQHHRPVITGPRASPHATPSTLHFPTSPIIQQPGPYFSHPAIRYHPQETLKEFVQLVCPDAGQQAGQVGFLNPNGSSQGKVHNPFLPTPMLPPPPPPPMARPVPLPVPDTKPPTTSTEGGAASPTSPTYSTPSTSPANRFVSVGPRDPSFVNIPQQTQSWYLG

SEQ ID NO: 57905 - protein, 501 aa, Homo sapiens
  Payload ID: 11360
  Gene Symbol: NFIA
  Gene Name: nuclear factor I/A
  Uniprot ID: Q12857
  ENSP ID: ENSP00000384680
MDEFHPFIEALLPHVRAFAYTWFNLQARKRKYFKKHEKRMSKEEERAVKDELLSEKPEVKQKWASRLLAKLRKDIRPEYREDFVLTVTGKKPPCCVLSNPDQKGKMRRIDCLRQADKVWRLDLVMVILFKGIPLESTDGERLVKSPQCSNPGLCVQPHHIGVSVKELDLYLAYFVHAADSSQSESPSQPSDADIKDQPENGHLGFQDSFVTSGVFSVTELVRVSQTPIAAGTGPNFSLSDLESSSYYSMSPGAMRRSLPSTSSTSSTKRLKSVEDEMDSPGEEPFYTGQGRSPGSGSQSSGWHEVEPGMPSPTTLKKSEKSGFSSPSPSQTSSLGTAFTQHHRPVITGPRASPHATPSTLHFPTSPIIQQPGPYFSHPAIRYHPQETLKEFVQLVCPDAGQQAGQVGFLNPNGSSQGKVHNPFLPTPMLPPPPPPPMARPVPLPVPDTKPPTTSTEGGAASPTSPTYSTPSTSPANRFVSVGPRDPSFVNIPQQTQSWYLG

SEQ ID NO: 57906 - protein, 466 aa, Homo sapiens
  Payload ID: 11360
  Gene Symbol: NFIA
  Gene Name: nuclear factor I/A
  ENSP ID: ENSP00000419785
MYSPLCLTQDEFHPFIEALLPHVRAFAYTWFNLQARKRKYFKKHEKRMSKEEERAVKDELLSEKPEVKQKWASRLLAKLRKDIRPEYREDFVLTVTGKKPPCCVLSNPDQKGKMRRIDCLRQADKVWRLDLVMVILFKGIPLESTDGERLVKSPQCSNPGLCVQPHHIGVSVKELDLYLAYFVHAADSSQSESPSQPSDADIKDQPENGHLGFQDSFVTSGVFSVTELVRVSQTPIAAGTGPNFSLSDLESSSYYSMSPGAMRRSLPSTSSTSSTKRLKSVEDEMDSPGEEPFYTGQGRSPGSGSQSSGWHEVEPASPHATPSTLHFPTSPIIQQPGPYFSHPAIRYHPQETLKEFVQLVCPDAGQQAGQVGFLNPNGSSQGKVHNPFLPTPMLPPPPPPPMARPVPLPVPDTKPPTTSTEGGAASPTSPTYSTPSTSPANRFVSVGPRDPSFVNIPQQTQSWYLG

SEQ ID NO: 57907 - protein, 95 aa, Homo sapiens
  Payload ID: 11360
  Gene Symbol: NFIA
  Gene Name: nuclear factor I/A
  ENSP ID: ENSP00000473830
  MOD_RES (1)..(1): Any amino acid
XKKPPCCVLSNPDQKGKMRRIDCLRQADKVWRLDLVMVILFKGIPLESTDGERLVKSPQCSNPGLCVQPHHIGVSVKELDLYLAYFVHAAGGVGR

SEQ ID NO: 57908 - protein, 186 aa, Homo sapiens
  Payload ID: 11360
  Gene Symbol: NFIA
  Gene Name: nuclear factor I/A
  ENSP ID: ENSP00000474461
MSKEEERAVKDELLSEKPEVKQKWASRLLAKLRKDIRPEYREDFVLTVTGKKPPCCVLSNPDQKGKMRRIDCLRQADKVWRLDLVMVILFKGIPLESTDGERLVKSPQCSNPGLCVQPHHIGVSVKELDLYLAYFVHAADSSQSESPSQPSDADIKDQPENGHLGFQDSFVTSGVFSVTELVRVSQ

SEQ ID NO: 57909 - protein, 157 aa, Homo sapiens
  Payload ID: 11360
  Gene Symbol: NFIA
  Gene Name: nuclear factor I/A
  ENSP ID: ENSP00000474462
MFSFPAASPHATPSTLHFPTSPIIQQPGPYFSHPAIRYHPQETLKEFVQLVCPDAGQQAGQVGFLNPNGSSQGKVHNPFLPTPMLPPPPPPPMARPVPLPVPDTKPPTTSTEGGAASPTSPTYSTPSTSPANRFVSVGPRDPSFVNIPQQTQSWYLG

SEQ ID NO: 57910 - protein, 184 aa, Homo sapiens
  Payload ID: 11360
  Gene Symbol: NFIA
  Gene Name: nuclear factor I/A
  ENSP ID: ENSP00000474806
  MOD_RES (1)..(1): Any amino acid
XPIAAGTGPNFSLSDLESSSYYSMSPGAMRRSLPSTSSTSSTKRLKSVEDEMDSPGEEPFYTGQGRSPGSGSQSSGWHEVEPGMPSPTTLKKSEKSGFSSPSPSQTSSLGTAFTQHHRPVITGPREFKMAPSILGSPFWKVYSASPHATPSTLHFPTSPIIQQPGPYFSHPAIRYHPQETLKEF

SEQ ID NO: 57911 - protein, 47 aa, Homo sapiens
  Payload ID: 11360
  Gene Symbol: NFIA
  Gene Name: nuclear factor I/A
  ENSP ID: ENSP00000474817
  MOD_RES (1)..(1): Any amino acid
XTKPPTTSTEGGAASPTSPRCHMTGRVLWETLISLRWCGPEQSWYLG

SEQ ID NO: 57912 - protein, 200 aa, Homo sapiens
  Payload ID: 11361
  Gene Symbol: NFIB
  Gene Name: nuclear factor I/B
  ENSP ID: ENSP00000370308
MMYSPICLTQDEFHPFIEALLPHVRAIAYTWFNLQARKRKYFKKHEKRMSKDEERAVKDELLSEKPEIKQKWASRLLAKLRKDIRQEYREDFVLTVTGKKHPCCVLSNPDQKGKIRRIDCLRQADKVWRLDLVMVILFKGIPLESTDGERLMKSPHCTNPALCVQPHHITVSVKELDLFLAYYVQEQGKNFFSSNKCIKI

SEQ ID NO: 57913 - protein, 168 aa, Homo sapiens
  Payload ID: 11361
  Gene Symbol: NFIB
  Gene Name: nuclear factor I/B
  ENSP ID: ENSP00000370311
MNSGVNLQRSLSSPPSSKRPKTISIDENMEPSPTGDFYPSPSSPAAGSRTWHERDQDMSSPTTMKKPEKPLFSSASPQDSSPRLSTFPQHHHPGIPGVAHSVISTRTPPPPSPLPFPTQAILPPAPSSYFSHPTIRYPPHLNPQDTLKNYVPSYDPSSPQTSQSWYLG

SEQ ID NO: 57914 - protein, 446 aa, Homo sapiens
  Payload ID: 11361
  Gene Symbol: NFIB
  Gene Name: nuclear factor I/B
  ENSP ID: ENSP00000370321
MERIPVSVDFWVVCCAVLKCNPGIPKRMSTLCFGFSDEFHPFIEALLPHVRAIAYTWFNLQARKRKYFKKHEKRMSKDEERAVKDELLSEKPEIKQKWASRLLAKLRKDIRQEYREDFVLTVTGKKHPCCVLSNPDQKGKIRRIDCLRQADKVWRLDLVMVILFKGIPLESTDGERLMKSPHCTNPALCVQPHHITVSVKELDLFLAYYVQEQDSGQSGSPSHNDPAKNPPGYLEDSFVKSGVFNVSELVRVSRTPITQGTGVNFPIGEIPSQPYYHDMNSGVNLQRSLSSPPSSKRPKTISIDENMEPSPTGDFYPSPSSPAAGSRTWHERDQDMSSPTTMKKPEKPLFSSASPQDSSPRLSTFPQHHHPGIPGVAHSVISTRTPPPPSPLPFPTQAILPPAPSSYFSHPTIRYPPHLNPQDTLKNYVPSYDPSSPQTSQSWYLG

SEQ ID NO: 57915 - protein, 494 aa, Homo sapiens
  Payload ID: 11361
  Gene Symbol: NFIB
  Gene Name: nuclear factor I/B
  Uniprot ID: O00712
  ENSP ID: ENSP00000370340
MMYSPICLTQDEFHPFIEALLPHVRAIAYTWFNLQARKRKYFKKHEKRMSKDEERAVKDELLSEKPEIKQKWASRLLAKLRKDIRQEYREDFVLTVTGKKHPCCVLSNPDQKGKIRRIDCLRQADKVWRLDLVMVILFKGIPLESTDGERLMKSPHCTNPALCVQPHHITVSVKELDLFLAYYVQEQDSGQSGSPSHNDPAKNPPGYLEDSFVKSGVFNVSELVRVSRTPITQGTGVNFPIGEIPSQPYYHDMNSGVNLQRSLSSPPSSKRPKTISIDENMEPSPTGDFYPSPSSPAAGSRTWHERDQDMSSPTTMKKPEKPLFSSASPQDSSPRLSTFPQHHHPGIPGVAHSVISTRTPPPPSPLPFPTQAILPPAPSSYFSHPTIRYPPHLNPQDTLKNYVPSYDPSSPQTSQPNGSGQVVGKVPGHFTPVLAPSPHPSAVRPVTLSMTDTKPITTSTEAYTASGTSQANRYVGLSPRDPSFLHQQQSWYLG

SEQ ID NO: 57916 - protein, 420 aa, Homo sapiens
  Payload ID: 11361
  Gene Symbol: NFIB
  Gene Name: nuclear factor I/B
  Uniprot ID: O00712
  ENSP ID: ENSP00000370346
MMYSPICLTQDEFHPFIEALLPHVRAIAYTWFNLQARKRKYFKKHEKRMSKDEERAVKDELLSEKPEIKQKWASRLLAKLRKDIRQEYREDFVLTVTGKKHPCCVLSNPDQKGKIRRIDCLRQADKVWRLDLVMVILFKGIPLESTDGERLMKSPHCTNPALCVQPHHITVSVKELDLFLAYYVQEQDSGQSGSPSHNDPAKNPPGYLEDSFVKSGVFNVSELVRVSRTPITQGTGVNFPIGEIPSQPYYHDMNSGVNLQRSLSSPPSSKRPKTISIDENMEPSPTGDFYPSPSSPAAGSRTWHERDQDMSSPTTMKKPEKPLFSSASPQDSSPRLSTFPQHHHPGIPGVAHSVISTRTPPPPSPLPFPTQAILPPAPSSYFSHPTIRYPPHLNPQDTLKNYVPSYDPSSPQTSQSWYLG

SEQ ID NO: 57917 - protein, 561 aa, Homo sapiens
  Payload ID: 11361
  Gene Symbol: NFIB
  Gene Name: nuclear factor I/B
  ENSP ID: ENSP00000380705
MMYSPICLTQDEFHPFIEALLPHVRAIAYTWFNLQARKRKYFKKHEKRMSKDEERAVKDELLSEKPEIKQKWASRLLAKLRKDIRQEYREDFVLTVTGKKHPCCVLSNPDQKGKIRRIDCLRQADKVWRLDLVMVILFKGIPLESTDGERLMKSPHCTNPALCVQPHHITVSVKELDLFLAYYVQEQDSGQSGSPSHNDPAKNPPGYLEDSFVKSGVFNVSELVRVSRTPITQGTGVNFPIGEIPSQPYYHDMNSGVNLQRSLSSPPSSKRPKTISIDENMEPSPTGDFYPSPSSPAAGSRTWHERDQDMSSPTTMKKPEKPLFSSASPQDSSPRLSTFPQHHHPGIPGVAHSVISTRTPPPPSPLPFPTQAILPPAPSSYFSHPTIRYPPHLNPQDTLKNYVPSYDPSSPQTSQPNGSGQVVGKVPGHFTPVLAPSPHPSAVRPVTLSMTDTKPITTSTEAYTASGTSQANRYVGLSPRDPSFLHQQQLRICDWTMNQNGRHLYPSTSEDTLGITWQSPGTWASLVPFQVSNRTPILPANVQNYGLNIIGEPFLQAETSN

SEQ ID NO: 57918 - protein, 487 aa, Homo sapiens
  Payload ID: 11361
  Gene Symbol: NFIB
  Gene Name: nuclear factor I/B
  ENSP ID: ENSP00000380709
MMYSPICLTQDEFHPFIEALLPHVRAIAYTWFNLQARKRKYFKKHEKRMSKDEERAVKDELLSEKPEIKQKWASRLLAKLRKDIRQEYREDFVLTVTGKKHPCCVLSNPDQKGKIRRIDCLRQADKVWRLDLVMVILFKGIPLESTDGERLMKSPHCTNPALCVQPHHITVSVKELDLFLAYYVQEQDSGQSGSPSHNDPAKNPPGYLEDSFVKSGVFNVSELVRVSRTPITQGTGVNFPIGEIPSQPYYHDMNSGVNLQRSLSSPPSSKRPKTISIDENMEPSPTGDFYPSPSSPAAGSRTWHERDQDMSSPTTMKKPEKPLFSSASPQDSSPRLSTFPQHHHPGIPGVAHSVISTRTPPPPSPLPFPTQAILPPAPSSYFSHPTIRYPPHLNPQDTLKNYVPSYDPSSPQTSQLRICDWTMNQNGRHLYPSTSEDTLGITWQSPGTWASLVPFQVSNRTPILPANVQNYGLNIIGEPFLQAETSN

SEQ ID NO: 57919 - protein, 570 aa, Homo sapiens
  Payload ID: 11361
  Gene Symbol: NFIB
  Gene Name: nuclear factor I/B
  ENSP ID: ENSP00000380711
MMYSPICLTQDEFHPFIEALLPHVRAIAYTWFNLQARKRKYFKKHEKRMSKDEERAVKDELLSEKPEIKQKWASRLLAKLRKDIRQEYREDFVLTVTGKKHPCCVLSNPDQKGKIRRIDCLRQADKVWRLDLVMVILFKGIPLESTDGERLMKSPHCTNPALCVQPHHITVSVKELDLFLAYYVQEQDSGQSGSPSHNDPAKNPPGYLEDSFVKSGVFNVSELVRVSRTPITQGTGVNFPIGEIPSQPYYHDMNSGVNLQRSLSSPPSSKRPKTISIDENMEPSPTGDFYPSPSSPAAGSRTWHERDQDMSSPTTMKKPEKPLFSSASPQDSSPRLSTFPQHHHPGIPGVAHSVISTRTPPPPSPLPFPTQAILPPAPSSYFSHPTIRYPPHLNPQDTLKNYVPSYDPSSPQTSQPNGSGQVVGKVPGHFTPVLAPSPHPSAVRPVTLSMTDTKPITTSTEGEAASPTATTYTASGTSQANRYVGLSPRDPSFLHQQQLRICDWTMNQNGRHLYPSTSEDTLGITWQSPGTWASLVPFQVSNRTPILPANVQNYGLNIIGEPFLQAETSN

SEQ ID NO: 57920 - protein, 309 aa, Homo sapiens
  Payload ID: 11361
  Gene Symbol: NFIB
  Gene Name: nuclear factor I/B
  Uniprot ID: O00712
  ENSP ID: ENSP00000442888
MNSGVNLQRSLSSPPSSKRPKTISIDENMEPSPTGDFYPSPSSPAAGSRTWHERDQDMSSPTTMKKPEKPLFSSASPQDSSPRLSTFPQHHHPGIPGVAHSVISTRTPPPPSPLPFPTQAILPPAPSSYFSHPTIRYPPHLNPQDTLKNYVPSYDPSSPQTSQPNGSGQVVGKVPGHFTPVLAPSPHPSAVRPVTLSMTDTKPITTSTEAYTASGTSQANRYVGLSPRDPSFLHQQQLRICDWTMNQNGRHLYPSTSEDTLGITWQSPGTWASLVPFQVSNRTPILPANVQNYGLNIIGEPFLQAETSN

SEQ ID NO: 57921 - protein, 166 aa, Homo sapiens
  Payload ID: 11361
  Gene Symbol: NFIB
  Gene Name: nuclear factor I/B
  ENSP ID: ENSP00000475362
MVLHSDEFHPFIEALLPHVRAIAYTWFNLQARKRKYFKKHEKRMSKDEERAVKDELLSEKPEIKQKWASRLLAKLRKDIRQEYREDFVLTVTGKKHPCCVLSNPDQKGKIRRIDCLRQADKVWRLDLVMVILFKGIPLESTDGERLMKSPHCTNPALCVQPHHITV

SEQ ID NO: 57922 - protein, 59 aa, Homo sapiens
  Payload ID: 11361
  Gene Symbol: NFIB
  Gene Name: nuclear factor I/B
  ENSP ID: ENSP00000475813
MQYSAMDEFHPFIEALLPHVRAIAYTWFNLQARKRKYFKKHEKRMSKDEERAVKDELLS

SEQ ID NO: 57923 - protein, 188 aa, Homo sapiens [sequence omitted]

SEQ ID NO: 57924 - protein, 428 aa, Homo sapiens
  Payload ID: 11362
  Gene Symbol: NFIC
  Gene Name: nuclear factor I/C (CCAAT-binding transcription factor)
  Uniprot ID: P08651
  ENSP ID: ENSP00000342194
MYSSPLCLTQDEFHPFIEALLPHVRAFAYTWFNLQARKRKYFKKHEKRMSKDEERAVKDELLGEKPEVKQKWASRLLAKLRKDIRPECREDFVLSITGKKAPGCVLSNPDQKGKMRRIDCLRQADKVWRLDLVMVILFKGIPLESTDGERLVKAAQCGHPVLCVQPHHIGVAVKELDLYLAYFVRERDAEQSGSPRTGMGSDQEDSKPITLDTTDFQESFVTSGVFSVTELIQVSRTPVVTGTGPNFSLGELQGHLAYDLNPASTGLRRTLPSTSSSGSKRHKSGSMEEDVDTSPGGDYYTSPSSPTSSSRNWTEDMEGGISSPVKKTEMDKSPFNSPSPQDSPRLSSFTQHHRPVIAVHSGIARSPHPSSALHFPTTSILPQTASTYFPHTAIRYPPHLNPQDPLKDLVSLACDPASQQPGPSWYLG

SEQ ID NO: 57925 - protein, 430 aa, Homo sapiens
  Payload ID: 11362
  Gene Symbol: NFIC
  Gene Name: nuclear factor I/C (CCAAT-binding transcription factor)
  Uniprot ID: P08651
  ENSP ID: ENSP00000378543
MDEFHPFIEALLPHVRAFAYTWFNLQARKRKYFKKHEKRMSKDEERAVKDELLGEKPEVKQKWASRLLAKLRKDIRPECREDFVLSITGKKAPGCVLSNPDQKGKMRRIDCLRQADKVWRLDLVMVILFKGIPLESTDGERLVKAAQCGHPVLCVQPHHIGVAVKELDLYLAYFVRERDAEQSGSPRTGMGSDQEDSKPITLDTTDFQESFVTSGVFSVTELIQVSRTPVVTGTGPNFSLGELQGHLAYDLNPASTGLRRTLPSTSSSGSKRHKSGSMEEDVDTSPGGDYYTSPSSPTSSSRNWTEDMEGGISSPVKKTEMDKSPFNSPSPQDSPRLSSFTQHHRPVIAVHSGIARSPHPSSALHFPTTSILPQTASTYFPHTAIRYPPHLNPQDPLKDLVSLACDPASQQPGPPTLRPTRPLQTVPLWD

SEQ ID NO: 57926 - protein, 508 aa, Homo sapiens
  Payload ID: 11362
  Gene Symbol: NFIC
  Gene Name: nuclear factor I/C (CCAAT-binding transcription factor)
  Uniprot ID: P08651
  ENSP ID: ENSP00000396843
MYSSPLCLTQDEFHPFIEALLPHVRAFAYTWFNLQARKRKYFKKHEKRMSKDEERAVKDELLGEKPEVKQKWASRLLAKLRKDIRPECREDFVLSITGKKAPGCVLSNPDQKGKMRRIDCLRQADKVWRLDLVMVILFKGIPLESTDGERLVKAAQCGHPVLCVQPHHIGVAVKELDLYLAYFVRERDAEQSGSPRTGMGSDQEDSKPITLDTTDFQESFVTSGVFSVTELIQVSRTPVVTGTGPNFSLGELQGHLAYDLNPASTGLRRTLPSTSSSGSKRHKSGSMEEDVDTSPGGDYYTSPSSPTSSSRNWTEDMEGGISSPVKKTEMDKSPFNSPSPQDSPRLSSFTQHHRPVIAVHSGIARSPHPSSALHFPTTSILPQTASTYFPHTAIRYPPHLNPQDPLKDLVSLACDPASQQPGPLNGSGQLKMPSHCLSAQMLAPPPPGLPRLALPPATKPATTSEGGATSPTSPSYSPPDTSPANRSFVGLGPRDPAGIYQAQSWYLG

SEQ ID NO: 57927 - protein, 406 aa, Homo sapiens
  Payload ID: 11362
  Gene Symbol: NFIC
  Gene Name: nuclear factor I/C (CCAAT-binding transcription factor)
  Uniprot ID: P08651
  ENSP ID: ENSP00000465177
MDEFHPFIEALLPHVRAFAYTWFNLQARKRKYFKKHEKRMSKDEERAVKDELLGEKPEVKQKWASRLLAKLRKDIRPECREDFVLSITGKKAPGCVLSNPDQKGKMRRIDCLRQADKVWRLDLVMVILFKGIPLESTDGERLVKAAQCGHPVLCVQPHHIGVAVKELDLYLAYFVRERDTTDFQESFVTSGVFSVTELIQVSRTPVVTGTGPNFSLGELQGHLAYDLNPASTGLRRTLPSTSSSGSKRHKSGSMEEDVDTSPGGDYYTSPSSPTSSSRNWTEDMEGGISSPVKKTEMDKSPFNSPSPQDSPRLSSFTQHHRPVIAVHSGIARSPHPSSALHFPTTSILPQTASTYFPHTAIRYPPHLNPQDPLKDLVSLACDPASQQPGPPTLRPTRPLQTVPLWD

SEQ ID NO: 57928 - protein, 499 aa, Homo sapiens
  Payload ID: 11362
  Gene Symbol: NFIC
  Gene Name: nuclear factor I/C (CCAAT-binding transcription factor)
  Uniprot ID: P08651
  ENSP ID: ENSP00000465655
MDEFHPFIEALLPHVRAFAYTWFNLQARKRKYFKKHEKRMSKDEERAVKDELLGEKPEVKQKWASRLLAKLRKDIRPECREDFVLSITGKKAPGCVLSNPDQKGKMRRIDCLRQADKVWRLDLVMVILFKGIPLESTDGERLVKAAQCGHPVLCVQPHHIGVAVKELDLYLAYFVRERDAEQSGSPRTGMGSDQEDSKPITLDTTDFQESFVTSGVFSVTELIQVSRTPVVTGTGPNFSLGELQGHLAYDLNPASTGLRRTLPSTSSSGSKRHKSGSMEEDVDTSPGGDYYTSPSSPTSSSRNWTEDMEGGISSPVKKTEMDKSPFNSPSPQDSPRLSSFTQHHRPVIAVHSGIARSPHPSSALHFPTTSILPQTASTYFPHTAIRYPPHLNPQDPLKDLVSLACDPASQQPGPLNGSGQLKMPSHCLSAQMLAPPPPGLPRLALPPATKPATTSEGGATSPTSPSYSPPDTSPANRSFVGLGPRDPAGIYQAQSWYLG

SEQ ID NO: 57929 - protein, 439 aa, Homo sapiens
  Payload ID: 11362
  Gene Symbol: NFIC
  Gene Name: nuclear factor I/C (CCAAT-binding transcription factor)
  Uniprot ID: P08651
  ENSP ID: ENSP00000466647
MYSSPLCLTQDEFHPFIEALLPHVRAFAYTWFNLQARKRKYFKKHEKRMSKDEERAVKDELLGEKPEVKQKWASRLLAKLRKDIRPECREDFVLSITGKKAPGCVLSNPDQKGKMRRIDCLRQADKVWRLDLVMVILFKGIPLESTDGERLVKAAQCGHPVLCVQPHHIGVAVKELDLYLAYFVRERDAEQSGSPRTGMGSDQEDSKPITLDTTDFQESFVTSGVFSVTELIQVSRTPVVTGTGPNFSLGELQGHLAYDLNPASTGLRRTLPSTSSSGSKRHKSGSMEEDVDTSPGGDYYTSPSSPTSSSRNWTEDMEGGISSPVKKTEMDKSPFNSPSPQDSPRLSSFTQHHRPVIAVHSGIARSPHPSSALHFPTTSILPQTASTYFPHTAIRYPPHLNPQDPLKDLVSLACDPASQQPGPPTLRPTRPLQTVPLWD

SEQ ID NO: 57930 - protein, 403 aa, Homo sapiens
  Payload ID: 11363
  Gene Symbol: NFIX
  Gene Name: nuclear factor I/X (CCAAT-binding transcription factor)
  ENSP ID: ENSP00000351354
MGATEPGGDTSSDEFHPFIEALLPHVRAFSYTWFNLQARKRKYFKKHEKRMSKDEERAVKDELLGEKPEIKQKWASRLLAKLRKDIRPEFREDFVLTITGKKPPCCVLSNPDQKGKIRRIDCLRQADKVWRLDLVMVILFKGIPLESTDGERLYKSPQCSNPGLCVQPHHIGVTIKELDLYLAYFVHTPESGQSDSSNQQGDADIKPLPNGHLSFQDCFVTSGVWNVTELVRVSQTPVATASGPNFSLADLESPSYYNINQVTLGRRSITSPPSTSTTKRPKSIDDSEMESPVDDVFYPGTGRSPAAGSSQSSGWPNDVDAGSPRATASALHFPSTSIIQQSSPYFTHPTIRYHHHHGQDSLKEFVQFVCSDGSGQATGQHSQRQAPPLPTGLSASDPGTATF

SEQ ID NO: 57931 - protein, 403 aa, Homo sapiens; identical to SEQ ID NO: 57930
  Payload ID: 11363
  Gene Symbol: NFIX
  Gene Name: nuclear factor I/X (CCAAT-binding transcription factor)
  ENSP ID: ENSP00000353219

SEQ ID NO: 57932 - protein, 441 aa, Homo sapiens
  Payload ID: 11363
  Gene Symbol: NFIX
  Gene Name: nuclear factor I/X (CCAAT-binding transcription factor)
  Uniprot ID: Q14938
  ENSP ID: ENSP00000380781
MYSPYCLTQDEFHPFIEALLPHVRAFSYTWFNLQARKRKYFKKHEKRMSKDEERAVKDELLGEKPEIKQKWASRLLAKLRKDIRPEFREDFVLTITGKKPPCCVLSNPDQKGKIRRIDCLRQADKVWRLDLVMVILFKGIPLESTDGERLYKSPQCSNPGLCVQPHHIGVTIKELDLYLAYFVHTPESGQSDSSNQQGDADIKPLPNGHLSFQDCFVTSGVWNVTELVRVSQTPVATASGPNFSLADLESPSYYNINQVTLGRRSITSPPSTSTTKRPKSIDDSEMESPVDDVFYPGTGRSPAAGSSQSSGWPNDVDAGPASLKKSGKLDFCSALSSQGSSPRMAFTHHPLPVLAGVRPGSPRATASALHFPSTSIIQQSSPYFTHPTIRYHHHHGQDSLKEFVQFVCSDGSGQATGQHSQRQAPPLPTGLSASDPGTATF

SEQ ID NO: 57933 - protein, 183 aa, Homo sapiens
  Payload ID: 11363
  Gene Symbol: NFIX
  Gene Name: nuclear factor I/X (CCAAT-binding transcription factor)
  ENSP ID: ENSP00000465094
MGATEPGGDTSSVCVWTATLSVRVCDEFHPFIEALLPHVRAFSYTWFNLQARKRKYFKKHEKRMSKDEERAVKDELLGEKPEIKQKWASRLLAKLRKDIRPEFREDFVLTITGKKPPCCVLSNPDQKGKIRRIDCLRQADKVWRLDLVMVILFKGIPLESTDGERLYKSPQCSNPGLCVQPHH

SEQ ID NO: 57934 - protein, 128 aa, Homo sapiens
  Payload ID: 11363
  Gene Symbol: NFIX
  Gene Name: nuclear factor I/X (CCAAT-binding transcription factor)
  ENSP ID: ENSP00000465616
MSKDEERAVKDELLGEKPEIKQKWASRLLAKLRKDIRPEFREDFVLTITGKKPPCCVLSNPDQKGKIRRIDCLRQADKVWRLDLVMVILFKGIPLESTDGERLYKSPQCSNPGLCVQPHHIGVTIKEL

SEQ ID NO: 57935 - protein, 433 aa, Homo sapiens
  Payload ID: 11363
  Gene Symbol: NFIX
  Gene Name: nuclear factor I/X (CCAAT-binding transcription factor)
  Uniprot ID: Q14938
  ENSP ID: ENSP00000466389
MDEFHPFIEALLPHVRAFSYTWFNLQARKRKYFKKHEKRMSKDEERAVKDELLGEKPEIKQKWASRLLAKLRKDIRPEFREDFVLTITGKKPPCCVLSNPDQKGKIRRIDCLRQADKVWRLDLVMVILFKGIPLESTDGERLYKSPQCSNPGLCVQPHHIGVTIKELDLYLAYFVHTPESGQSDSSNQQGDADIKPLPNGHLSFQDCFVTSGVWNVTELVRVSQTPVATASGPNFSLADLESPSYYNINQVTLGRRSITSPPSTSTTKRPKSIDDSEMESPVDDVFYPGTGRSPAAGSSQSSGWPNDVDAGPASLKKSGKLDFCSALSSQGSSPRMAFTHHPLPVLAGVRPGSPRATASALHFPSTSIIQQSSPYFTHPTIRYHHHHGQDSLKEFVQFVCSDGSGQATGQHSQRQAPPLPTGLSASDPGTATF

SEQ ID NO: 57936 - protein, 101 aa, Homo sapiens
  Payload ID: 11363
  Gene Symbol: NFIX
  Gene Name: nuclear factor I/X (CCAAT-binding transcription factor)
  ENSP ID: ENSP00000466605
MSKDEERAVKDELLGEKPEIKQKWASRLLAKLRKDIRPEFREDFVLTITGKKPPCCVLSNPDQKGKIRRIDCLRQADKNPDNQIVQTSKEMRTSNHCPTGT

SEQ ID NO: 57937 - protein, 455 aa, Homo sapiens
  Payload ID: 11363
  Gene Symbol: NFIX
  Gene Name: nuclear factor I/X (CCAAT-binding transcription factor)
  ENSP ID: ENSP00000466735
MSKDEERAVKDELLGEKPEIKQKWASRLLAKLRKDIRPEFREDFVLTITGKKPPCCVLSNPDQKGKIRRIDCLRQADKVWRLDLVMVILFKGIPLESTDGERLYKSPQCSNPGLCVQPHHIGVTIKELDLYLAYFVHTPESGQSDSSNQQGDADIKPLPNGHLSFQDCFVTSGVWNVTELVRVSQTPVATASGPNFSLADLESPSYYNINQVTLGRRSITSPPSTSTTKRPKSIDDSEMESPVDDVFYPGTGRSPAAGSSQSSGWPNDVDAGPASLKKSGKLDFCSALSSQGSSPRMAFTHHPLPVLAGVRPGSPRATASALHFPSTSIIQQSSPYFTHPTIRYHHHHGQDSLKEFVQFVCSDGSGQATGQPNGSGQGKVPGSFLLPPPPPVARPVPLPMPDSKSTSTAPDGAALTPPSPSFATTGASSANRFVSIGPRDGNFLNIPQQSQSWFL

SEQ ID NO: 57938 - protein, 502 aa, Homo sapiens
  Payload ID: 11363
  Gene Symbol: NFIX
  Gene Name: nuclear factor I/X (CCAAT-binding transcription factor)
  Uniprot ID: Q14938
  ENSP ID: ENSP00000467512
MYSPYCLTQDEFHPFIEALLPHVRAFSYTWFNLQARKRKYFKKHEKRMSKDEERAVKDELLGEKPEIKQKWASRLLAKLRKDIRPEFREDFVLTITGKKPPCCVLSNPDQKGKIRRIDCLRQADKVWRLDLVMVILFKGIPLESTDGERLYKSPQCSNPGLCVQPHHIGVTIKELDLYLAYFVHTPESGQSDSSNQQGDADIKPLPNGHLSFQDCFVTSGVWNVTELVRVSQTPVATASGPNFSLADLESPSYYNINQVTLGRRSITSPPSTSTTKRPKSIDDSEMESPVDDVFYPGTGRSPAAGSSQSSGWPNDVDAGPASLKKSGKLDFCSALSSQGSSPRMAFTHHPLPVLAGVRPGSPRATASALHFPSTSIIQQSSPYFTHPTIRYHHHHGQDSLKEFVQFVCSDGSGQATGQPNGSGQGKVPGSFLLPPPPPVARPVPLPMPDSKSTSTAPDGAALTPPSPSFATTGASSANRFVSIGPRDGNFLNIPQQSQSWFL

SEQ ID NO: 57939 - protein, 59 aa, Homo sapiens
  Payload ID: 11363
  Gene Symbol: NFIX
  Gene Name: nuclear factor I/X (CCAAT-binding transcription factor)
  ENSP ID: ENSP00000467536
MGATEPGGDTSSVMSSTRSSRHCCLTSALSPTPGSTCRRGSASTSRSMKSGCRRTRSGR

SEQ ID NO: 57940 - protein, 440 aa, Homo sapiens
  Payload ID: 11363
  Gene Symbol: NFIX
  Gene Name: nuclear factor I/X (CCAAT-binding transcription factor)
  Uniprot ID: Q14938
  ENSP ID: ENSP00000467785
MLPACRLQDEFHPFIEALLPHVRAFSYTWFNLQARKRKYFKKHEKRMSKDEERAVKDELLGEKPEIKQKWASRLLAKLRKDIRPEFREDFVLTITGKKPPCCVLSNPDQKGKIRRIDCLRQADKVWRLDLVMVILFKGIPLESTDGERLYKSPQCSNPGLCVQPHHIGVTIKELDLYLAYFVHTPESGQSDSSNQQGDADIKPLPNGHLSFQDCFVTSGVWNVTELVRVSQTPVATASGPNFSLADLESPSYYNINQVTLGRRSITSPPSTSTTKRPKSIDDSEMESPVDDVFYPGTGRSPAAGSSQSSGWPNDVDAGPASLKKSGKLDFCSALSSQGSSPRMAFTHHPLPVLAGVRPGSPRATASALHFPSTSIIQQSSPYFTHPTIRYHHHHGQDSLKEFVQFVCSDGSGQATGQHSQRQAPPLPTGLSASDPGTATF

SEQ ID NO: 57941 - protein, 125 aa, Homo sapiens
  Payload ID: 11363
  Gene Symbol: NFIX
  Gene Name: nuclear factor I/X (CCAAT-binding transcription factor)
  ENSP ID: ENSP00000468707
MSKDEERAVKDELLGEKPEIKQKWASRLLAKLRKDIRPEFREDFVLTITGKKPPCCVLSNPDQKGKIRRIDCLRQADKVWRLDLVMVILFKGIPLESTDGERLYKSPQCSNPGLCVQPHHIGVTI

SEQ ID NO: 57942 - protein, 494 aa, Homo sapiens
  Payload ID: 11363
  Gene Symbol: NFIX
  Gene Name: nuclear factor I/X (CCAAT-binding transcription factor)
  Uniprot ID: Q14938
  ENSP ID: ENSP00000468794
MDEFHPFIEALLPHVRAFSYTWFNLQARKRKYFKKHEKRMSKDEERAVKDELLGEKPEIKQKWASRLLAKLRKDIRPEFREDFVLTITGKKPPCCVLSNPDQKGKIRRIDCLRQADKVWRLDLVMVILFKGIPLESTDGERLYKSPQCSNPGLCVQPHHIGVTIKELDLYLAYFVHTPESGQSDSSNQQGDADIKPLPNGHLSFQDCFVTSGVWNVTELVRVSQTPVATASGPNFSLADLESPSYYNINQVTLGRRSITSPPSTSTTKRPKSIDDSEMESPVDDVFYPGTGRSPAAGSSQSSGWPNDVDAGPASLKKSGKLDFCSALSSQGSSPRMAFTHHPLPVLAGVRPGSPRATASALHFPSTSIIQQSSPYFTHPTIRYHHHHGQDSLKEFVQFVCSDGSGQATGQPNGSGQGKVPGSFLLPPPPPVARPVPLPMPDSKSTSTAPDGAALTPPSPSFATTGASSANRFVSIGPRDGNFLNIPQQSQSWFL

SEQ ID NO: 57943 - protein, 1455 aa, Homo sapiens
  Payload ID: 11364
  Gene Symbol: NFAT5
  Gene Name: nuclear factor of activated T-cells 5, tonicity-responsive
  Uniprot ID: O94916
  ENSP ID: ENSP00000338806
MGGACSSFTTSSSPTIYSTSVTDSKAMQVESCSSAVGVSNRGVSEKQLTSNTVQQHPSTPKRHTVLYISPPPEDLLDNSRMSCQDEGCGLESEQSCSMWMEDSPSNFSNMSTSSYNDNTEVPRKSRKRNPKQRPGVKRRDCEESNMDIFDADSAKAPHYVLSQLTTDNKGNSKAGNGTLENQKGTGVKKSPMLCGQYPVKSEGKELKIVVQPETQHRARYLTEGSRGSVKDRTQQGFPTVKLEGHNEPVVLQVFVGNDSGRVKPHGFYQACRVTGRNTTPCKEVDIEGTTVIEVGLDPSNNMTLAVDCVGILKLRNADVEARIGIAGSKKKSTRARLVFRVNIMRKDGSTLTLQTPSSPILCTQPAGVPEILKKSLHSCSVKGEEEVFLIGKNFLKGTKVIFQENVSDENSWKSEAEIDMELFHQNHLIVKVPPYHDQHITLPVSVGIYVVTNAGRSHDVQPFTYTPDPAAAGALNVNVKKEISSPARPCSFEEAMKAMKTTGCNLDKVNIIPNALMTPLIPSSMIKSEDVTPMEVTAEKRSSTIFKTTKSVGSTQQTLENISNIAGNGSFSSPSSSHLPSENEKQQQIQPKAYNPETLTTIQTQDISQPGTFPAVSASSQLPNSDALLQQATQFQTRETQSREILQSDGTVVNLSQLTEASQQQQQSPLQEQAQTLQQQISSNIFPSPNSVSQLQNTIQQLQAGSFTGSTASGSSGSVDLVQQVLEAQQQLSSVLFSAPDGNENVQEQLSADIFQQVSQIQSGVSPGMFSSTEPTVHTRPDNLLPGRAESVHPQSENTLSNQQQQQQQQQQVMESSAAMVMEMQQSICQAAAQIQSELFPSTASANGNLQQSPVYQQTSHMMSALSTNEDMQMQCELFSSPPAVSGNETSTTTTQQVATPGTTMFQTSSSGDGEETGTQAKQIQNSVFQTMVQMQHSGDNQPQVNLFSSTKSMMSVQNSGTQQQGNGLFQQGNEMMSLQSGNFLQQSSHSQAQLFHPQNPIADAQNLSQETQGSLFHSPNPIVHSQTSTTSSEQMQPPMFHSQSTIAVLQGSSVPQDQQSTNIFLSQSPMNNLQTNTVAQEAFFAAPNSISPLQSTSNSEQQAAFQQQAPISHIQTPMLSQEQAQPPQQGLFQPQVALGSLPPNPMPQSQQGTMFQSQHSIVAMQSNSPSQEQQQQQQQQQQQQQQQQQSILFSNQNTMATMASPKQPPPNMIFNPNQNPMANQEQQNQSIFHQQSNMAPMNQEQQPMQFQSQSTVSSLQNPGPTQSESSQTPLFHSSPQIQLVQGSPSSQEQQVTLFLSPASMSALQTSINQQDMQQSPLYSPQNNMPGIQGATSSPQPQATLFHNTAGGTMNQLQNSPGSSQQTSGMFLFGIQNNCSQLLTSGPATLPDQLMAISQPGQPQNEGQPPVTTLLSQQMPENSPLASSINTNQNIEKIDLLVSLQNQGNNLTGSF

SEQ ID NO: 57944 - protein, 1531 aa, Homo sapiens
  Payload ID: 11364
  Gene Symbol: NFAT5
  Gene Name: nuclear factor of activated T-cells 5, tonicity-responsive
  Uniprot ID: O94916
  ENSP ID: ENSP00000346420
MPSDFISLLSADLDLESPKSLYSRESVYDLLPKELQLPPSRETSVASMSQTSGGEAGSPPPAVVAADASSAPSSSSMGGACSSFTTSSSPTIYSTSVTDSKAMQVESCSSAVGVSNRGVSEKQLTSNTVQQHPSTPKRHTVLYISPPPEDLLDNSRMSCQDEGCGLESEQSCSMWMEDSPSNFSNMSTSSYNDNTEVPRKSRKRNPKQRPGVKRRDCEESNMDIFDADSAKAPHYVLSQLTTDNKGNSKAGNGTLENQKGTGVKKSPMLCGQYPVKSEGKELKIVVQPETQHRARYLTEGSRGSVKDRTQQGFPTVKLEGHNEPVVLQVFVGNDSGRVKPHGFYQACRVTGRNTTPCKEVDIEGTTVIEVGLDPSNNMTLAVDCVGILKLRNADVEARIGIAGSKKKSTRARLVFRVNIMRKDGSTLTLQTPSSPILCTQPAGVPEILKKSLHSCSVKGEEEVFLIGKNFLKGTKVIFQENVSDENSWKSEAEIDMELFHQNHLIVKVPPYHDQHITLPVSVGIYVVTNAGRSHDVQPFTYTPDPAAAGALNVNVKKEISSPARPCSFEEAMKAMKTTGCNLDKVNIIPNALMTPLIPSSMIKSEDVTPMEVTAEKRSSTIFKTTKSVGSTQQTLENISNIAGNGSFSSPSSSHLPSENEKQQQIQPKAYNPETLTTIQTQDISQPGTFPAVSASSQLPNSDALLQQATQFQTRETQSREILQSDGTVVNLSQLTEASQQQQQSPLQEQAQTLQQQISSNIFPSPNSVSQLQNTIQQLQAGSFTGSTASGSSGSVDLVQQVLEAQQQLSSVLFSAPDGNENVQEQLSADIFQQVSQIQSGVSPGMFSSTEPTVHTRPDNLLPGRAESVHPQSENTLSNQQQQQQQQQQVMESSAAMVMEMQQSICQAAAQIQSELFPSTASANGNLQQSPVYQQTSHMMSALSTNEDMQMQCELFSSPPAVSGNETSTTTTQQVATPGTTMFQTSSSGDGEETGTQAKQIQNSVFQTMVQMQHSGDNQPQVNLFSSTKSMMSVQNSGTQQQGNGLFQQGNEMMSLQSGNFLQQSSHSQAQLFHPQNPIADAQNLSQETQGSLFHSPNPIVHSQTSTTSSEQMQPPMFHSQSTIAVLQGSSVPQDQQSTNIFLSQSPMNNLQTNTVAQEAFFAAPNSISPLQSTSNSEQQAAFQQQAPISHIQTPMLSQEQAQPPQQGLFQPQVALGSLPPNPMPQSQQGTMFQSQHSIVAMQSNSPSQEQQQQQQQQQQQQQQQQQSILFSNQNTMATMASPKQPPPNMIFNPNQNPMANQEQQNQSIFHQQSNMAPMNQEQQPMQFQSQSTVSSLQNPGPTQSESSQTPLFHSSPQIQLVQGSPSSQEQQVTLFLSPASMSALQTSINQQDMQQSPLYSPQNNMPGIQGATSSPQPQATLFHNTAGGTMNQLQNSPGSSQQTSGMFLFGIQNNCSQLLTSGPATLPDQLMAISQPGQPQNEGQPPVTTLLSQQMPENSPLASSINTNQNIEKIDLLVSLQNQGNNLTGSF

SEQ ID NO: 57945 - protein, 1455 aa, Homo sapiens; identical to SEQ ID NO: 57943
  Payload ID: 11364
  Gene Symbol: NFAT5
  Gene Name: nuclear factor of activated T-cells 5, tonicity-responsive
  Uniprot ID: O94916
  ENSP ID: ENSP00000377343

SEQ ID NO: 57946 - protein, 99 aa, Homo sapiens
  Payload ID: 11364
  Gene Symbol: NFAT5
  Gene Name: nuclear factor of activated T-cells 5, tonicity-responsive
  ENSP ID: ENSP00000413126
MPSDFISLLSADLDLESPKSLYSRDSLKLHPSQNFHRAGLLEESVYDLLPKELQLPPSRETSVASMSQTSGGEAGSPPPAVVAAGFASEAGSVCIKNDL

SEQ ID NO: 57947 - protein, 119 aa, Homo sapiens
  Payload ID: 11364
  Gene Symbol: NFAT5
  Gene Name: nuclear factor of activated T-cells 5, tonicity-responsive
  ENSP ID: ENSP00000455115
MPSDFISLLSADLDLESPKSLYSRDSLKLHPSQNFHRAGLLEESVYDLLPKELQLPPSRETSVASMSQTSGGEAGSPPPAVVAAGIPEMFILCILMCMILRFKKGFASEAGSVCIKNDL

SEQ ID NO: 57948 - protein, 1455 aa, Homo sapiens; identical to SEQ ID NO: 57943
  Payload ID: 11364
  Gene Symbol: NFAT5
  Gene Name: nuclear factor of activated T-cells 5, tonicity-responsive
  Uniprot ID: O94916
  ENSP ID: ENSP00000455628

SEQ ID NO: 57949 - protein, 1548 aa, Homo sapiens
  Payload ID: 11364
  Gene Symbol: NFAT5
  Gene Name: nuclear factor of activated T-cells 5, tonicity-responsive
  Uniprot ID: O94916
  ENSP ID: ENSP00000457593
MPSDFISLLSADLDLESPKSLYSRDSLKLHPSQNFHRAGLLEESVYDLLPKELQLPPSRETSVASMSQTSGGEAGSPPPAVVAADASSAPSSSSMGGACSSFTTSSSPTIYSTSVTDSKAMQVESCSSAVGVSNRGVSEKQLTSNTVQQHPSTPKRHTVLYISPPPEDLLDNSRMSCQDEGCGLESEQSCSMWMEDSPSNFSNMSTSSYNDNTEVPRKSRKRNPKQRPGVKRRDCEESNMDIFDADSAKAPHYVLSQLTTDNKGNSKAGNGTLENQKGTGVKKSPMLCGQYPVKSEGKELKIVVQPETQHRARYLTEGSRGSVKDRTQQGFPTVKLEGHNEPVVLQVFVGNDSGRVKPHGFYQACRVTGRNTTPCKEVDIEGTTVIEVGLDPSNNMTLAVDCVGILKLRNADVEARIGIAGSKKKSTRARLVFRVNIMRKDGSTLTLQTPSSPILCTQPAGVPEILKKSLHSCSVKGEEEVFLIGKNFLKGTKVIFQENVSDENSWKSEAEIDMELFHQNHLIVKVPPYHDQHITLPVSVGIYVVTNAGRSHDVQPFTYTPDPAAGALNVNVKKEISSPARPCSFEEAMKAMKTTGCNLDKVNIIPNALMTPLIPSSMIKSEDVTPMEVTAEKRSSTIFKTTKSVGSTQQTLENISNIAGNGSFSSPSSSHLPSENEKQQQIQPKAYNPETLTTIQTQDISQPGTFPAVSASSQLPNSDALLQQATQFQTRETQSREILQSDGTVVNLSQLTEASQQQQQSPLQEQAQTLQQQISSNIFPSPNSVSQLQNTIQQLQAGSFTGSTASGSSGSVDLVQQVLEAQQQLSSVLFSAPDGNENVQEQLSADIFQQVSQIQSGVSPGMFSSTEPTVHTRPDNLLPGRAESVHPQSENTLSNQQQQQQQQQQVMESSAAMVMEMQQSICQAAAQIQSELFPSTASANGNLQQSPVYQQTSHMMSALSTNEDMQMQCELFSSPPAVSGNETSTTTTQQVATPGTTMFQTSSSGDGEETGTQAKQIQNSVFQTMVQMQHSGDNQPQVNLFSSTKSMMSVQNSGTQQQGNGLFQQGNEMMSLQSGNFLQQSSHSQAQLFHPQNPIADAQNLSQETQGSLFHSPNPIVHSQTSTTSSEQMQPPMFHSQSTIAVLQGSSVPQDQQSTNIFLSQSPMNNLQTNTVAQEAFFAAPNSISPLQSTSNSEQQAAFQQQAPISHIQTPMLSQEQAQPPQQGLFQPQVALGSLPPNPMPQSQQGTMFQSQHSIVAMQSNSPSQEQQQQQQQQQQQQQQQQQSILFSNQNTMATMASPKQPPPNMIFNPNQNPMANQEQQNQSIFHQQSNMAPMNQEQQPMQFQSQSTVSSLQNPGPTQSESSQTPLFHSSPQIQLVQGSPSSQEQQVTLFLSPASMSALQTSINQQDMQQSPLYSPQNNMPGIQGATSSPQPQATLFHNTAGGTMNQLQNSPGSSQQTSGMFLFGIQNNCSQLLTSGPATLPDQLMAISQPGQPQNEGQPPVTTLLSQQMPENSPLASSINTNQNIEKIDLLVSLQNQGNNLTGSF

SEQ ID NO: 57950 - protein, 143 aa, Homo sapiens
  Payload ID: 11364
  Gene Symbol: NFAT5
  Gene Name: nuclear factor of activated T-cells 5, tonicity-responsive
  ENSP ID: ENSP00000462061
  MOD_RES (1)..(1): Any amino acid
XTLENQKGTGVKKSPMLCGQYPVKSEGKELKIVVQPETQHRARYLTEGSRGSVKDRTQQGFPTVKLEGHNEPVVLQVFVGNDSGRVKPHGFYQACRVTGRNTTPCKEVDIEGTTVIEVGLDPSNNMTLASASRSARNLKEKLA

SEQ ID NO: 57951 - protein, 141 aa, Homo sapiens
  Payload ID: 11364
  Gene Symbol: NFAT5
  Gene Name: nuclear factor of activated T-cells 5, tonicity-responsive
  ENSP ID: ENSP00000463214
AMQVESCSSAVGNNMPGIQGATSSPQPQATLFHNTAGGTMNQLQNSPGSSQQTSGMFLFGIQNNCSQLLTSGPATLPDQLMAISQPGQPQNEGQPPVTTLLSQQMPENSPLASSINTNQNIEKIDLLVSLQNQGNNLTGSF

SEQ ID NO: 57952 - protein, 1549 aa, Homo sapiens
  Payload ID: 11364
  Gene Symbol: NFAT5
  Gene Name: nuclear factor of activated T-cells 5, tonicity-responsive
  Uniprot ID: O94916
  ENSP ID: ENSP00000486610
MPSDFISLLSADLDLESPKSLYSRDSLKLHPSQNFHRAGLLEESVYDLLPKELQLPPSRETSVASMSQTSGGEAGSPPPAVVAADASSAPSSSSMGGACSSFTTSSSPTIYSTSVTDSKAMQVESCSSAVGVSNRGVSEKQLTSNTVQQHPSTPKRHTVLYISPPPEDLLDNSRMSCQDEGCGLESEQSCSMWMEDSPSNFSNMSTSSYNDNTEVPRKSRKRNPKQRPGVKRRDCEESNMDIFDADSAKAPHYVLSQLTTDNKGNSKAGNGTLENQKGTGVKKSPMLCGQYPVKSEGKELKIVVQPETQHRARYLTEGSRGSVKDRTQQGFPTVKLEGHNEPVVLQVFVGNDSGRVKPHGFYQACRVTGRNTTPCKEVDIEGTTVIEVGLDPSNNMTLAVDCVGILKLRNADVEARIGIAGSKKKSTRARLVFRVNIMRKDGSTLTLQTPSSPILCTQPAGVPEILKKSLHSCSVKGEEEVFLIGKNFLKGTKVIFQENVSDENSWKSEAEIDMELFHQNHLIVKVPPYHDQHITLPVSVGIYVVTNAGRSHDVQPFTYTPDPAAAGALNVNVKKEISSPARPCSFEEAMKAMKTTGCNLDKVNIIPNALMTPLIPSSMIKSEDVTPMEVTAEKRSSTIFKTTKSVGSTQQTLENISNIAGNGSFSSPSSSHLPSENEKQQQIQPKAYNPETLTTIQTQDISQPGTFPAVSASSQLPNSDALLQQATQFQTRETQSREILQSDGTVVNLSQLTEASQQQQQSPLQEQAQTLQQQISSNIFPSPNSVSQLQNTIQQLQAGSFTGSTASGSSGSVDLVQQVLEAQQQLSSVLFSAPDGNENVQEQLSADIFQQVSQIQSGVSPGMFSSTEPTVHTRPDNLLPGRAESVHPQSENTLSNQQQQQQQQQQVMESSAAMVMEMQQSICQAAAQIQSELFPSTASANGNLQQSPVYQQTSHMMSALSTNEDMQMQCELFSSPPAVSGNETSTTTTQQVATPGTTMFQTSSSGDGEETGTQAKQIQNSVFQTMVQMQHSGDNQPQVNLFSSTKSMMSVQNSGTQQQGNGLFQQGNEMMSLQSGNFLQQSSHSQAQLFHPQNPIADAQNLSQETQGSLFHSPNPIVHSQTSTTSSEQMQPPMFHSQSTIAVLQGSSVPQDQQSTNIFLSQSPMNNLQTNTVAQEAFFAAPNSISPLQSTSNSEQQAAFQQQAPISHIQTPMLSQEQAQPPQQGLFQPQVALGSLPPNPMPQSQQGTMFQSQHSIVAMQSNSPSQEQQQQQQQQQQQQQQQQQSILFSNQNTMATMASPKQPPPNMIFNPNQNPMANQEQQNQSIFHQQSNMAPMNQEQQPMQFQSQSTVSSLQNPGPTQSESSQTPLFHSSPQIQLVQGSPSSQEQQVTLFLSPASMSALQTSINQQDMQQSPLYSPQNNMPGIQGATSSPQPQATLFHNTAGGTMNQLQNSPGSSQQTSGMFLFGIQNNCSQLLTSGPATLPDQLMAISQPGQPQNEGQPPVTTLLSQQMPENSPLASSINTNQNIEKIDLLVSLQNQGNNLTGSF

SEQ ID NO: 57953 - protein, 825 aa, Homo sapiens
  Payload ID: 11365
  Gene Symbol: NFATC1
  Gene Name: nuclear factor of activated T-cells, cytoplasmic, calcineurin-dependent 1
  Uniprot ID: O95644
  ENSP ID: ENSP00000253506
MPSTSFPVPSKFPLGPAAAVFGRGETLGPAPRAGGTMKSAEEEHYGYASSNVSPALPLPTAHSTLPAPCHNLQTSTPGIIPPADHPSGYGAALDGGPAGYFLSSGHTRPDGAPALESPRIEITSCLGLYHNNNQFFHDVEVEDVLPSSKRSPSTATLSLPSLEAYRDPSCLSPASSLSSRSCNSEASSYESNYSYPYASPQTSPWQSPCVSPKTTDPEEGFPRGLGACTLLGSPRHSPSTSPRASVTEESWLGARSSRPASPCNKRKYSLNGRQPPYSPHHSPTPSPHGSPRVSVTDDSWLGNTTQYTSSAIVAAINALTTDSSLDLGDGVPVKSRKTTLEQPPSVALKVEPVGEDLGSPPPPADFAPEDYSSFQHIRKGGFCDQYLAVPQHPYQWAKPKPLSPTSYMSPTLPALDWQLPSHSGPYELRIEVQPKSHHRAHYETEGSRGAVKASAGGHPIVQLHGYLENEPLMLQLFIGTADDRLLRPHAFYQVHRITGKTVSTTSHEAILSNTKVLEIPLLPENSMRAVIDCAGILKLRNSDIELRKGETDIGRKNTRVRLVFRVHVPQPSGRTLSLQVASNPIECSQRSAQELPLVEKQSTDSYPVVGGKKMVLSGHNFLQDSKVIFVEKAPDGHHVWEMEAKTDRDLCKPNSLVVEIPPFRNQRITSPVHVSFYVCNGKRKRSQYQRFTYLPANVPIIKTEPTDDYEPAPTCGPVSQGLSPLPRPYYSQQLAMPPDPSSCLVAGFPPCPQRSTLMPAAPGVSPKLHDLSPAAYTKGVASPGHCHLGLPQPAGEAPAVQDVPRPVATHPGSPGQPPPALLPQQ

SEQ ID NO: 57954 - protein, 812 aa, Homo sapiens
  Payload ID: 11365
  Gene Symbol: NFATC1
  Gene Name: nuclear factor of activated T-cells, cytoplasmic, calcineurin-dependent 1
  Uniprot ID: O95644
  ENSP ID: ENSP00000316553
MTGLEDQEFDFEFLFEFNQRDEGAAAAAPEHYGYASSNVSPALPLPTAHSTLPAPCHNLQTSTPGIIPPADHPSGYGAALDGGPAGYFLSSGHTRPDGAPALESPRIEITSCLGLYHNNNQFFHDVEVEDVLPSSKRSPSTATLSLPSLEAYRDPSCLSPASSLSSRSCNSEASSYESNYSYPYASPQTSPWQSPCVSPKTTDPEEGFPRGLGACTLLGSPRHSPSTSPRASVTEESWLGARSSRPASPCNKRKYSLNGRQPPYSPHHSPTPSPHGSPRVSVTDDSWLGNTTQYTSSAIVAAINALTTDSSLDLGDGVPVKSRKTTLEQPPSVALKVEPVGEDLGSPPPPADFAPEDYSSFQHIRKGGFCDQYLAVPQHPYQWAKPKPLSPTSYMSPTLPALDWQLPSHSGPYELRIEVQPKSHHRAHYETEGSRGAVKASAGGHPIVQLHGYLENEPLMLQLFIGTADDRLLRPHAFYQVHRITGKTVSTTSHEAILSNTKVLEIPLLPENSMRAVIDCAGILKLRNSDIELRKGETDIGRKNTRVRLVFRVHVPQPSGRTLSLQVASNPIECSQRSAQELPLVEKQSTDSYPVVGGKKMVLSGHNFLQDSKVIFVEKAPDGHHVWEMEAKTDRDLCKPNSLVVEIPPFRNQRITSPVHVSFYVCNGKRKRSQYQRFTYLPANVPIIKTEPTDDYEPAPTCGPVSQGLSPLPRPYYSQQLAMPPDPSSCLVAGFPPCPQRSTLMPAAPGVSPKLHDLSPAAYTKGVASPGHCHLGLPQPAGEAPAVQDVPRPVATHPGSPGQPPPALLPQQ

SEQ ID NO: 57955 - protein, 930 aa, Homo sapiens
  Payload ID: 11365
  Gene Symbol: NFATC1
  Gene Name: nuclear factor of activated T-cells, cytoplasmic, calcineurin-dependent 1
  Uniprot ID: O95644
  ENSP ID: ENSP00000327850
MTGLEDQEFDFEFLFEFNQRDEGAAAAAPEHYGYASSNVSPALPLPTAHSTLPAPCHNLQTSTPGIIPPADHPSGYGAALDGGPAGYFLSSGHTRPDGAPALESPRIEITSCLGLYHNNNQFFHDVEVEDVLPSSKRSPSTATLSLPSLEAYRDPSCLSPASSLSSRSCNSEASSYESNYSYPYASPQTSPWQSPCVSPKTTDPEEGFPRGLGACTLLGSPRHSPSTSPRASVTEESWLGARSSRPASPCNKRKYSLNGRQPPYSPHHSPTPSPHGSPRVSVTDDSWLGNTTQYTSSAIVAAINALTTDSSLDLGDGVPVKSRKTTLEQPPSVALKVEPVGEDLGSPPPPADFAPEDYSSFQHIRKGGFCDQYLAVPQHPYQWAKPKPLSPTSYMSPTLPALDWQLPSHSGPYELRIEVQPKSHHRAHYETEGSRGAVKASAGGHPIVQLHGYLENEPLMLQLFIGTADDRLLRPHAFYQVHRITGKTVSTTSHEAILSNTKVLEIPLLPENSMRAVIDCAGILKLRNSDIELRKGETDIGRKNTRVRLVFRVHVPQPSGRTLSLQVASNPIECSQRSAQELPLVEKQSTDSYPVVGGKKMVLSGHNFLQDSKVIFVEKAPDGHHVWEMEAKTDRDLCKPNSLVVEIPPFRNQRITSPVHVSFYVCNGKRKRSQYQRFTYLPANVPIIKTEPTDDYEPAPTCGPVSQGLSPLPRPYYSQQLAMPPDPSSCLVAGFPPCPQRSTLMPAAPGVSPKLHDLSPAAYTKGVASPGHCHLGLPQPAGEAPAVQDVPRPVATHPGSPGQPPPALLPQQVSAPPSSSCPPGLEHSLCPSSPSPPLPPATQEPTCLQPCSPACPPATGRPQHLPSTVRRDESPTAGPRLLPEVHEDGSPNLAPIPVTVKREPEELDQLYLDDVNEIIRNDLSSTSTHS

SEQ ID NO: 57956 - protein, 353 aa, Homo sapiens
  Payload ID: 11365
  Gene Symbol: NFATC1
  Gene Name: nuclear factor of activated T-cells, cytoplasmic, calcineurin-dependent 1
  Uniprot ID: O95644
  ENSP ID: ENSP00000380892
MLQLFIGTADDRLLRPHAFYQVHRITGKTVSTTSHEAILSNTKVLEIPLLPENSMRAVIDCAGILKLRNSDIELRKGETDIGRKNTRVRLVFRVHVPQPSGRTLSLQVASNPIECSQRSAQELPLVEKQSTDSYPVVGGKKMVLSGHNFLQDSKVIFVEKAPDGHHVWEMEAKTDRDLCKPNSLVVEIPPFRNQRITSPVHVSFYVCNGKRKRSQYQRFTYLPANVPIIKTEPTDDYEPAPTCGPVSQGLSPLPRPYYSQQLAMPPDPSSCLVAGFPPCPQRSTLMPAAPGVSPKLHDLSPAAYTKGVASPGHCHLGLPQPAGEAPAVQDVPRPVATHPGSPGQPPPALLPQQ

SEQ ID NO: 57957 - protein, 943 aa, Homo sapiens
  Payload ID: 11365
  Gene Symbol: NFATC1
  Gene Name: nuclear factor of activated T-cells, cytoplasmic, calcineurin-dependent 1
  Uniprot ID: O95644
  ENSP ID: ENSP00000389377
MPSTSFPVPSKFPLGPAAAVFGRGETLGPAPRAGGTMKSAEEEHYGYASSNVSPALPLPTAHSTLPAPCHNLQTSTPGIIPPADHPSGYGAALDGGPAGYFLSSGHTRPDGAPALESPRIEITSCLGLYHNNNQFFHDVEVEDVLPSSKRSPSTATLSLPSLEAYRDPSCLSPASSLSSRSCNSEASSYESNYSYPYASPQTSPWQSPCVSPKTTDPEEGFPRGLGACTLLGSPRHSPSTSPRASVTEESWLGARSSRPASPCNKRKYSLNGRQPPYSPHHSPTPSPHGSPRVSVTDDSWLGNTTQYTSSAIVAAINALTTDSSLDLGDGVPVKSRKTTLEQPPSVALKVEPVGEDLGSPPPPADFAPEDYSSFQHIRKGGFCDQYLAVPQHPYQWAKPKPLSPTSYMSPTLPALDWQLPSHSGPYELRIEVQPKSHHRAHYETEGSRGAVKASAGGHPIVQLHGYLENEPLMLQLFIGTADDRLLRPHAFYQVHRITGKTVSTTSHEAILSNTKVLEIPLLPENSMRAVIDCAGILKLRNSDIELRKGETDIGRKNTRVRLVFRVHVPQPSGRTLSLQVASNPIECSQRSAQELPLVEKQSTDSYPVVGGKKMVLSGHNFLQDSKVIFVEKAPDGHHVWEMEAKTDRDLCKPNSLVVEIPPFRNQRITSPVHVSFYVCNGKRKRSQYQRFTYLPANVPIIKTEPTDDYEPAPTCGPVSQGLSPLPRPYYSQQLAMPPDPSSCLVAGFPPCPQRSTLMPAAPGVSPKLHDLSPAAYTKGVASPGHCHLGLPQPAGEAPAVQDVPRPVATHPGSPGQPPPALLPQQVSAPPSSSCPPGLEHSLCPSSPSPPLPPATQEPTCLQPCSPACPPATGRPQHLPSTVRRDESPTAGPRLLPEVHEDGSPNLAPIPVTVKREPEELDQLYLDDVNEIIRNDLSSTSTHS

SEQ ID NO: 57958 - protein, 471 aa, Homo sapiens
  Payload ID: 11365
  Gene Symbol: NFATC1
  Gene Name: nuclear factor of activated T-cells, cytoplasmic, calcineurin-dependent 1
  ENSP ID: ENSP00000439992
MLQLFIGTADDRLLRPHAFYQVHRITGKTVSTTSHEAILSNTKVLEIPLLPENSMRAVIDCAGILKLRNSDIELRKGETDIGRKNTRVRLVFRVHVPQPSGRTLSLQVASNPIECSQRSAQELPLVEKQSTDSYPVVGGKKMVLSGHNFLQDSKVIFVEKAPDGHHVWEMEAKTDRDLCKPNSLVVEIPPFRNQRITSPVHVSFYVCNGKRKRSQYQRFTYLPANVPIIKTEPTDDYEPAPTCGPVSQGLSPLPRPYYSQQLAMPPDPSSCLVAGFPPCPQRSTLMPAAPGVSPKLHDLSPAAYTKGVASPGHCHLGLPQPAGEAPAVQDVPRPVATHPGSPGQPPPALLPQQVSAPPSSSCPPGLEHSLCPSSPSPPLPPATQEPTCLQPCSPACPPATGRPQHLPSTVRRDESPTAGPRLLPEVHEDGSPNLAPIPVTVKREPEELDQLYLDDVNEIIRNDLSSTSTHS

SEQ ID NO: 57959 - protein, 713 aa, Homo sapiens
  Payload ID: 11365
  Gene Symbol: NFATC1
  Gene Name: nuclear factor of activated T-cells, cytoplasmic, calcineurin-dependent 1
  Uniprot ID: O95644
  ENSP ID: ENSP00000442435
MPSTSFPVPSKFPLGPAAAVFGRGETLGPAPRAGGTMKSAEEEHYGYASSNVSPALPLPTAHSTLPAPCHNLQTSTPGIIPPADHPSGYGAALDGGPAGYFLSSGHTRPDGAPALESPRIEITSCLGLYHNNNQFFHDVEVEDVLPSSKRSPSTATLSLPSLEAYRDPSCLSPASSLSSRSCNSEASSYESNYSYPYASPQTSPWQSPCVSPKTTDPEEGFPRGLGACTLLGSPRHSPSTSPRASVTEESWLGARSSRPASPCNKRKYSLNGRQPPYSPHHSPTPSPHGSPRVSVTDDSWLGNTTQYTSSAIVAAINALTTDSSLDLGDGVPVKSRKTTLEQPPSVALKVEPVGEDLGSPPPPADFAPEDYSSFQHIRKGGFCDQYLAVPQHPYQWAKPKPLSPTSYMSPTLPALDWQLPSHSGPYELRIEVQPKSHHRAHYETEGSRGAVKASAGGHPIVQLHGYLENEPLMLQLFIGTADDRLLRPHAFYQVHRITGKTVSTTSHEAILSNTKVLEIPLLPENSMRAVIDCAGILKLRNSDIELRKGETDIGRKNTRVRLVFRVHVPQPSGRTLSLQVASNPIECSQRSAQELPLVEKQSTDSYPVVGGKKMVLSGHNFLQDSKVIFVEKAPDGHHVWEMEAKTDRDLCKPNSLVVEIPPFRNQRITSPVHVSFYVCNGKRKRSQYQRFTYLPANVNEIIRNDLSSTSTHS

SEQ ID NO: 57960 - protein, 716 aa, Homo sapiens
  Payload ID: 11365
  Gene Symbol: NFATC1
  Gene Name: nuclear factor of activated T-cells, cytoplasmic, calcineurin-dependent 1
  Uniprot ID: O95644
  ENSP ID: ENSP00000466194
MPSTSFPVPSKFPLGPAAAVFGRGETLGPAPRAGGTMKSAEEEHYGYASSNVSPALPLPTAHSTLPAPCHNLQTSTPGIIPPADHPSGYGAALDGGPAGYFLSSGHTRPDGAPALESPRIEITSCLGLYHNNNQFFHDVEVEDVLPSSKRSPSTATLSLPSLEAYRDPSCLSPASSLSSRSCNSEASSYESNYSYPYASPQTSPWQSPCVSPKTTDPEEGFPRGLGACTLLGSPRHSPSTSPRASVTEESWLGARSSRPASPCNKRKYSLNGRQPPYSPHHSPTPSPHGSPRVSVTDDSWLGNTTQYTSSAIVAAINALTTDSSLDLGDGVPVKSRKTTLEQPPSVALKVEPVGEDLGSPPPPADFAPEDYSSFQHIRKGGFCDQYLAVPQHPYQWAKPKPLSPTSYMSPTLPALDWQLPSHSGPYELRIEVQPKSHHRAHYETEGSRGAVKASAGGHPIVQLHGYLENEPLMLQLFIGTADDRLLRPHAFYQVHRITGKTVSTTSHEAILSNTKVLEIPLLPENSMRAVIDCAGILKLRNSDIELRKGETDIGRKNTRVRLVFRVHVPQPSGRTLSLQVASNPIECSQRSAQELPLVEKQSTDSYPVVGGKKMVLSGHNFLQDSKVIFVEKAPDGHHVWEMEAKTDRDLCKPNSLVVEIPPFRNQRITSPVHVSFYVCNGKRKRSQYQRFTYLPANGNAIFLTVSREHERVGCFF

SEQ ID NO: 57961 - protein, 700 aa, Homo sapiens
  Payload ID: 11365
  Gene Symbol: NFATC1
  Gene Name: nuclear factor of activated T-cells, cytoplasmic, calcineurin-dependent 1
  Uniprot ID: O95644
  ENSP ID: ENSP00000466489
MTGLEDQEFDFEFLFEFNQRDEGAAAAAPEHYGYASSNVSPALPLPTAHSTLPAPCHNLQTSTPGIIPPADHPSGYGAALDGGPAGYFLSSGHTRPDGAPALESPRIEITSCLGLYHNNNQFFHDVEVEDVLPSSKRSPSTATLSLPSLEAYRDPSCLSPASSLSSRSCNSEASSYESNYSYPYASPQTSPWQSPCVSPKTTDPEEGFPRGLGACTLLGSPRHSPSTSPRASVTEESWLGARSSRPASPCNKRKYSLNGRQPPYSPHHSPTPSPHGSPRVSVTDDSWLGNTTQYTSSAIVAAINALTTDSSLDLGDGVPVKSRKTTLEQPPSVALKVEPVGEDLGSPPPPADFAPEDYSSFQHIRKGGFCDQYLAVPQHPYQWAKPKPLSPTSYMSPTLPALDWQLPSHSGPYELRIEVQPKSHHRAHYETEGSRGAVKASAGGHPIVQLHGYLENEPLMLQLFIGTADDRLLRPHAFYQVHRITGKTVSTTSHEAILSNTKVLEIPLLPENSMRAVIDCAGILKLRNSDIELRKGETDIGRKNTRVRLVFRVHVPQPSGRTLSLQVASNPIECSQRSAQELPLVEKQSTDSYPVVGGKKMVLSGHNFLQDSKVIFVEKAPDGHHVWEMEAKTDRDLCKPNSLVVEIPPFRNQRITSPVHVSFYVCNGKRKRSQYQRFTYLPANVNEIIRNDLSSTSTHS

SEQ ID NO: 57962 - protein, 703 aa, Homo sapiens
  Payload ID: 11365
  Gene Symbol: NFATC1
  Gene Name: nuclear factor of activated T-cells, cytoplasmic, calcineurin-dependent 1
  Uniprot ID: O95644
  ENSP ID: ENSP00000467181
MTGLEDQEFDFEFLFEFNQRDEGAAAAAPEHYGYASSNVSPALPLPTAHSTLPAPCHNLQTSTPGIIPPADHPSGYGAALDGGPAGYFLSSGHTRPDGAPALESPRIEITSCLGLYHNNNQFFHDVEVEDVLPSSKRSPSTATLSLPSLEAYRDPSCLSPASSLSSRSCNSEASSYESNYSYPYASPQTSPWQSPCVSPKTTDPEEGFPRGLGACTLLGSPRHSPSTSPRASVTEESWLGARSSRPASPCNKRKYSLNGRQPPYSPHHSPTPSPHGSPRVSVTDDSWLGNTTQYTSSAIVAAINALTTDSSLDLGDGVPVKSRKTTLEQPPSVALKVEPVGEDLGSPPPPADFAPEDYSSFQHIRKGGFCDQYLAVPQHPYQWAKPKPLSPTSYMSPTLPALDWQLPSHSGPYELRIEVQPKSHHRAHYETEGSRGAVKASAGGHPIVQLHGYLENEPLMLQLFIGTADDRLLRPHAFYQVHRITGKTVSTTSHEAILSNTKVLEIPLLPENSMRAVIDCAGILKLRNSDIELRKGETDIGRKNTRVRLVFRVHVPQPSGRTLSLQVASNPIECSQRSAQELPLVEKQSTDSYPVVGGKKMVLSGHNFLQDSKVIFVEKAPDGHHVWEMEAKTDRDLCKPNSLVVEIPPFRNQRITSPVHVSFYVCNGKRKRSQYQRFTYLPANGNAIFLTVSREHERVGCFF

SEQ ID NO: 57963 - protein, 71 aa, Homo sapiens
  Payload ID: 11365
  Gene Symbol: NFATC1
  Gene Name: nuclear factor of activated T-cells, cytoplasmic, calcineurin-dependent 1
  ENSP ID: ENSP00000467615
MTGLEDQEFDFEFLFEFNQRDEGAAAAAPARPCPPWTGSCRPTQARMSFGLRCSPSPTTEPTTRRRAAGGP

SEQ ID NO: 57964 - protein, 639 aa, Homo sapiens
  Payload ID: 11365
  Gene Symbol: NFATC1
  Gene Name: nuclear factor of activated T-cells, cytoplasmic, calcineurin-dependent 1
  ENSP ID: ENSP00000468111
MPSTSFPVPSKFPLGPAAAVFGRGETLGPAPRAGGTMKSAEEEHYGYASSNVSPALPLPTAHSTLPAPCHNLQTSTPGIIPPADHPSGYGAALDGGPAGYFLSSGHTRPDGAPALESPRIEITSCLGLYHNNNQFFHDVEVEDVLPSSKRSPSTATLSLPSLEAYRDPSCLSPASSLSSRSCNSEASSYESNYSYPYASPQTSPWQSPCVSPKTTDPEEGFPRGLGACTLLGSPRHSPSTSPRASVTEESWLGARSSRPASPCNKRKYSLNGRQPPYSPHHSPTPSPHGSPRVSVTDDSWLGNTTQYTSSAIVAAINALTTDSSLDLGDGVPVKSRKTTLEQPPSVALKVEPVGEDLGSPPPPADFAPEDYSSFQHIRKGGFCDQYLAVPQHPYQWAKPKPLSPTSYMSPTLPALDWQLPSHSGPYELRIEVQPKSHHRAHYETEGSRGAVKASAGGHPIVQLHGYLENEPLMLQLFIGTADDRLLRPHAFYQVHRITGKTVSTTSHEAILSNTKVLEIPLLPENSMRAVIDCAGILKLRNSDIELRKGETDIGRKNTRPSAQLRSCLWWRSRARTAIRSWAGRRWSCLATTSCRTPRSFSWRKPQMATMSGRWKRKLTGTCASRILWWLRSRHFGIRG

SEQ ID NO: 57965 - protein, 921 aa, Homo sapiens
  Payload ID: 11366
  Gene Symbol: NFATC2
  Gene Name: nuclear factor of activated T-cells, cytoplasmic, calcineurin-dependent 2
  Uniprot ID: Q13469
  ENSP ID: ENSP00000360619
MNAPERQPQPDGGDAPGHEPGGSPQDELDFSILFDYEYLNPNEEEPNAHKVASPPSGPAYPDDVLDYGLKPYSPLASLSGEPPGRFGEPDRVGPQKFLSAAKPAGASGLSPRIEITPSHELIQAVGPLRMRDAGLLVEQPPLAGVAASPRFTLPVPGFEGYREPLCLSPASSGSSASFISDTFSPYTSPCVSPNNGGPDDLCPQFQNIPAHYSPRTSPIMSPRTSLAEDSCLGRHSPVPRPASRSSSPGAKRRHSCAEALVALPPGASPQRSRSPSPQPSSHVAPQDHGSPAGYPPVAGSAVIMDALNSLATDSPCGIPPKMWKTSPDPSPVSAAPSKAGLPRHIYPAVEFLGPCEQGERRNSAPESILLVPPTWPKPLVPAIPICSIPVTASLPPLEWPLSSQSGSYELRIEVQPKPHHRAHYETEGSRGAVKAPTGGHPVVQLHGYMENKPLGLQIFIGTADERILKPHAFYQVHRITGKTVTTTSYEKIVGNTKVLEIPLEPKNNMRATIDCAGILKLRNADIELRKGETDIGRKNTRVRLVFRVHIPESSGRIVSLQTASNPIECSQRSAHELPMVERQDTDSCLVYGGQQMILTGQNFTSESKVVFTEKTTDGQQIWEMEATVDKDKSQPNMLFVEIPEYRNKHIRTPVKVNFYVINGKRKRSQPQHFTYHPVPAIKTEPTDEYDPTLICSPTHGGLGSQPYYPQHPMVAESPSCLVATMAPCQQFRTGLSSPDARYQQQNPAAVLYQRSKSLSPSLLGYQQPALMAAPLSLADAHRSVLVHAGSQGQSSALLHPSPTNQQASPVIHYSPTNQQLRCGSHQEFQHIMYCENFAPGTTRPGPPPVSQGQRLSPGSYPTVIQQQNATSQRAAKNGPPVSDQKEVLPAGVTIKQEQNLDQTYLDDELIDTHLSWIQNIL

SEQ ID NO: 57966 - protein, 925 aa, Homo sapiens
  Payload ID: 11366
  Gene Symbol: NFATC2
  Gene Name: nuclear factor of activated T-cells, cytoplasmic, calcineurin-dependent 2
  Uniprot ID: Q13469
  ENSP ID: ENSP00000379330
MNAPERQPQPDGGDAPGHEPGGSPQDELDFSILFDYEYLNPNEEEPNAHKVASPPSGPAYPDDVLDYGLKPYSPLASLSGEPPGRFGEPDRVGPQKFLSAAKPAGASGLSPRIEITPSHELIQAVGPLRMRDAGLLVEQPPLAGVAASPRFTLPVPGFEGYREPLCLSPASSGSSASFISDTFSPYTSPCVSPNNGGPDDLCPQFQNIPAHYSPRTSPIMSPRTSLAEDSCLGRHSPVPRPASRSSSPGAKRRHSCAEALVALPPGASPQRSRSPSPQPSSHVAPQDHGSPAGYPPVAGSAVIMDALNSLATDSPCGIPPKMWKTSPDPSPVSAAPSKAGLPRHIYPAVEFLGPCEQGERRNSAPESILLVPPTWPKPLVPAIPICSIPVTASLPPLEWPLSSQSGSYELRIEVQPKPHHRAHYETEGSRGAVKAPTGGHPVVQLHGYMENKPLGLQIFIGTADERILKPHAFYQVHRITGKTVTTTSYEKIVGNTKVLEIPLEPKNNMRATIDCAGILKLRNADIELRKGETDIGRKNTRVRLVFRVHIPESSGRIVSLQTASNPIECSQRSAHELPMVERQDTDSCLVYGGQQMILTGQNFTSESKVVFTEKTTDGQQIWEMEATVDKDKSQPNMLFVEIPEYRNKHIRTPVKVNFYVINGKRKRSQPQHFTYHPVPAIKTEPTDEYDPTLICSPTHGGLGSQPYYPQHPMVAESPSCLVATMAPCQQFRTGLSSPDARYQQQNPAAVLYQRSKSLSPSLLGYQQPALMAAPLSLADAHRSVLVHAGSQGQSSALLHPSPTNQQASPVIHYSPTNQQLRCGSHQEFQHIMYCENFAPGTTRPGPPPVSQGQRLSPGSYPTVIQQQNATSQRAAKNGPPVSDQKEVLPAGVTIKQEQNLDQTYLDDVNEIIRKEFSGPPARNQT

SEQ ID NO: 57967 - protein, 901 aa, Homo sapiens
  Payload ID: 11366
  Gene Symbol: NFATC2
  Gene Name: nuclear factor of activated T-cells, cytoplasmic, calcineurin-dependent 2
  Uniprot ID: Q13469
  ENSP ID: ENSP00000396471
MQREAAFRLGHCHPLRIMGSVDQEEPNAHKVASPPSGPAYPDDVLDYGLKPYSPLASLSGEPPGRFGEPDRVGPQKFLSAAKPAGASGLSPRIEITPSHELIQAVGPLRMRDAGLLVEQPPLAGVAASPRFTLPVPGFEGYREPLCLSPASSGSSASFISDTFSPYTSPCVSPNNGGPDDLCPQFQNIPAHYSPRTSPIMSPRTSLAEDSCLGRHSPVPRPASRSSSPGAKRRHSCAEALVALPPGASPQRSRSPSPQPSSHVAPQDHGSPAGYPPVAGSAVIMDALNSLATDSPCGIPPKMWKTSPDPSPVSAAPSKAGLPRHIYPAVEFLGPCEQGERRNSAPESILLVPPTWPKPLVPAIPICSIPVTASLPPLEWPLSSQSGSYELRIEVQPKPHHRAHYETEGSRGAVKAPTGGHPVVQLHGYMENKPLGLQIFIGTADERILKPHAFYQVHRITGKTVTTTSYEKIVGNTKVLEIPLEPKNNMRATIDCAGILKLRNADIELRKGETDIGRKNTRVRLVFRVHIPESSGRIVSLQTASNPIECSQRSAHELPMVERQDTDSCLVYGGQQMILTGQNFTSESKVVFTEKTTDGQQIWEMEATVDKDKSQPNMLFVEIPEYRNKHIRTPVKVNFYVINGKRKRSQPQHFTYHPVPAIKTEPTDEYDPTLICSPTHGGLGSQPYYPQHPMVAESPSCLVATMAPCQQFRTGLSSPDARYQQQNPAAVLYQRSKSLSPSLLGYQQPALMAAPLSLADAHRSVLVHAGSQGQSSALLHPSPTNQQASPVIHYSPTNQQLRCGSHQEFQHIMYCENFAPGTTRPGPPPVSQGQRLSPGSYPTVIQQQNATSQRAAKNGPPVSDQKEVLPAGVTIKQEQNLDQTYLDDELIDTHLSWIQNIL

SEQ ID NO: 57968 - protein, 702 aa, Homo sapiens
  Payload ID: 11366
  Gene Symbol: NFATC2
  Gene Name: nuclear factor of activated T-cells, cytoplasmic, calcineurin-dependent 2
  Uniprot ID: Q13469
  ENSP ID: ENSP00000477142
MSPRTSLAEDSCLGRHSPVPRPASRSSSPGAKRRHSCAEALVALPPGASPQRSRSPSPQPSSHVAPQDHGSPAGYPPVAGSAVIMDALNSLATDSPCGIPPKMWKTSPDPSPVSAAPSKAGLPRHIYPAVEFLGPCEQGERRNSAPESILLVPPTWPKPLVPAIPICSIPVTASLPPLEWPLSSQSGSYELRIEVQPKPHHRAHYETEGSRGAVKAPTGGHPVVQLHGYMENKPLGLQIFIGTADERILKPHAFYQVHRITGKTVTTTSYEKIVGNTKVLEIPLEPKNNMRATIDCAGILKLRNADIELRKGETDIGRKNTRVRLVFRVHIPESSGRIVSLQTASNPIECSQRSAHELPMVERQDTDSCLVYGGQQMILTGQNFTSESKVVFTEKTTDGQQIWEMEATVDKDKSQPNMLFVEIPEYRNKHIRTPVKVNFYVINGKRKRSQPQHFTYHPVPAIKTEPTDEYDPTLICSPTHGGLGSQPYYPQHPMVAESPSCLVATMAPCQQFRTGLSSPDARYQQQNPAAVLYQRSKSLSPSLLGYQQPALMAAPLSLADAHRSVLVHAGSQGQSSALLHPSPTNQQASPVIHYSPTNQQLRCGSHQEFQHIMYCENFAPGTTRPGPPPVSQGQRLSPGSYPTVIQQQNATSQRAAKNGPPVSDQKEVLPAGVTIKQEQNLDQTYLDDELIDTHLSWIQNIL

SEQ ID NO: 57969 - protein, 702 aa, Homo sapiens; identical to SEQ ID NO: 57968
  Payload ID: 11366
  Gene Symbol: NFATC2
  Gene Name: nuclear factor of activated T-cells, cytoplasmic, calcineurin-dependent 2
  Uniprot ID: Q13469
  ENSP ID: ENSP00000477342

SEQ ID NO: 57970 - protein, 905 aa, Homo sapiens
  Payload ID: 11366
  Gene Symbol: NFATC2
  Gene Name: nuclear factor of activated T-cells, cytoplasmic, calcineurin-dependent 2
  Uniprot ID: Q13469
  ENSP ID: ENSP00000477370
MQREAAFRLGHCHPLRIMGSVDQEEPNAHKVASPPSGPAYPDDVLDYGLKPYSPLASLSGEPPGRFGEPDRVGPQKFLSAAKPAGASGLSPRIEITPSHELIQAVGPLRMRDAGLLVEQPPLAGVAASPRFTLPVPGFEGYREPLCLSPASSGSSASFISDTFSPYTSPCVSPNNGGPDDLCPQFQNIPAHYSPRTSPIMSPRTSLAEDSCLGRHSPVPRPASRSSSPGAKRRHSCAEALVALPPGASPQRSRSPSPQPSSHVAPQDHGSPAGYPPVAGSAVIMDALNSLATDSPCGIPPKMWKTSPDPSPVSAAPSKAGLPRHIYPAVEFLGPCEQGERRNSAPESILLVPPTWPKPLVPAIPICSIPVTASLPPLEWPLSSQSGSYELRIEVQPKPHHRAHYETEGSRGAVKAPTGGHPVVQLHGYMENKPLGLQIFIGTADERILKPHAFYQVHRITGKTVTTTSYEKIVGNTKVLEIPLEPKNNMRATIDCAGILKLRNADIELRKGETDIGRKNTRVRLVFRVHIPESSGRIVSLQTASNPIECSQRSAHELPMVERQDTDSCLVYGGQQMILTGQNFTSESKVVFTEKTTDGQQIWEMEATVDKDKSQPNMLFVEIPEYRNKHIRTPVKVNFYVINGKRKRSQPQHFTYHPVPAIKTEPTDEYDPTLICSPTHGGLGSQPYYPQHPMVAESPSCLVATMAPCQQFRTGLSSPDARYQQQNPAAVLYQRSKSLSPSLLGYQQPALMAAPLSLADAHRSVLVHAGSQGQSSALLHPSPTNQQASPVIHYSPTNQQLRCGSHQEFQHIMYCENFAPGTTRPGPPPVSQGQRLSPGSYPTVIQQQNATSQRAAKNGPPVSDQKEVLPAGVTIKQEQNLDQTYLDDVNEIIRKEFSGPPARNQT

SEQ ID NO: 57971 - protein, 419 aa, Homo sapiens
  Payload ID: 11367
  Gene Symbol: NFATC2IP
  Gene Name: nuclear factor of activated T-cells, cytoplasmic, calcineurin-dependent 2 interacting protein
  Uniprot ID: Q8NCF5
  ENSP ID: ENSP00000324792
MAEPVGKRGRWSGGSGAGRGGRGGWGGRGRRPRAQRSPSRGTLDVVSVDLVTDSDEEILEVATARGAADEVEVEPPEPPGPVASRDNSNSDSEGEDRRPAGPPREPVRRRRRLVLDPGEAPLVPVYSGKVKSSLRLIPDDLSLLKLYPPGDEEEAELADSSGLYHEGSPSPGSPWKTKLRTKDKEEKKKTEFLDLDNSPLSPPSPRTKSRTHTRALKKLSEVNKRLQDLRSCLSPKPPQGQEQQGQEDEVVLVEGPTLPETPRLFPLKIRCRADLVRLPLRMSEPLQSVVDHMATHLGVSPSRILLLFGETELSPTATPRTLKLGVADIIDCVVLTSSPEATETSQQLQLRVQGKEKHQTLEVSLSRDSPLKTLMSHYEEAMGLSGRKLSFFFDGTKLSGRELPADLGMESGDLIEVWG

SEQ ID NO: 57972 - protein, 127 aa, Homo sapiens
  Payload ID: 11367
  Gene Symbol: NFATC2IP
  Gene Name: nuclear factor of activated T-cells, cytoplasmic, calcineurin-dependent 2 interacting protein
  Uniprot ID: Q8NCF5
  ENSP ID: ENSP00000454958
MATHLGVSPSRILLLFGETELSPTATPRTLKLGVADIIDCVVLTSSPEATETSQQLQLRVQGKEKHQTLEVSLSRDSPLKTLMSHYEEAMGLSGRKLSFFFDGTKLSGRELPADLGMESGDLIEVWG

SEQ ID NO: 57973 - protein, 140 aa, Homo sapiens
  Payload ID: 11367
  Gene Symbol: NFATC2IP
  Gene Name: nuclear factor of activated T-cells, cytoplasmic, calcineurin-dependent 2 interacting protein
  ENSP ID: ENSP00000456948
MRKSEPLQSVVDHMATHLGVSPSRILLLFGETELSPTATPRTLKLGVADIIDCVVLTSSPEATETSQQLQLRVQGKEKHQTLEVSLSRDSPLKTLMSHYEEAMGLSGRKLSFFFDGTKLSGRELPADLGMESGDLIEVWG

SEQ ID NO: 57974 - protein, 1065 aa, Homo sapiens
  Payload ID: 11368
  Gene Symbol: NFATC3
  Gene Name: nuclear factor of activated T-cells, cytoplasmic, calcineurin-dependent 3
  Uniprot ID: Q12968
  ENSP ID: ENSP00000264008
MTTANCGAHDELDFKLVFGEDGAPAPPPPGSRPADLEPDDCASIYIFNVDPPPSTLTTPLCLPHHGLPSHSSVLSPSFQLQSHKNYEGTCEIPESKYSPLGGPKPFECPSIQITSISPNCHQELDAHEDDLQINDPEREFLERPSRDHLYLPLEPSYRESSLSPSPASSISSRSWFSDASSCESLSHIYDDVDSELNEAAARFTLGSPLTSPGGSPGGCPGEETWHQQYGLGHSLSPRQSPCHSPRSSVTDENWLSPRPASGPSSRPTSPCGKRRHSSAEVCYAGSLSPHHSPVPSPGHSPRGSVTEDTWLNASVHGGSGLGPAVFPFQYCVETDIPLKTRKTSEDQAAILPGKLELCSDDQGSLSPARETSIDDGLGSQYPLKKDSCGDQFLSVPSPFTWSKPKPGHTPIFRTSSLPPLDWPLPAHFGQCELKIEVQPKTHHRAHYETEGSRGAVKASTGGHPVVKLLGYNEKPINLQMFIGTADDRYLRPHAFYQVHRITGKTVATASQEIIIASTKVLEIPLLPENNMSASIDCAGILKLRNSDIELRKGETDIGRKNTRVRLVFRVHIPQPSGKVLSLQIASIPVECSQRSAQELPHIEKYSINSCSVNGGHEMVVTGSNFLPESKIIFLEKGQDGRPQWEVEGKIIREKCQGAHIVLEVPPYHNPAVTAAVQVHFYLCNGKRKKSQSQRFTYTPVLMKQEHREEIDLSSVPSLPVPHPAQTQRPSSDSGCSHDSVLSGQRSLICSIPQTYASMVTSSHLPQLQCRDESVSKEQHMIPSPIVHQPFQVTPTPPVGSSYQPMQTNVVYNGPTCLPINAASSQEFDSVLFQQDATLSGLVNLGCQPLSSIPFHSSNSGSTGHLLAHTPHSVHTLPHLQSMGYHCSNTGQRSLSSPVADQITGQPSSQLQPITYGPSHSGSATTASPAASHPLASSPLSGPPSPQLQPMPYQSPSSGTASSPSPATRMHSGQHSTQAQSTGQGGLSAPSSLICHSLCDPASFPPDGATVSIKPEPEDREPNFATIGLQDITLDDDLFTSNNFDLLQLRPTFWPVPAGRYLRNLE

SEQ ID NO: 57975 - protein, 1075 aa, Homo sapiens
  Payload ID: 11368
  Gene Symbol: NFATC3
  Gene Name: nuclear factor of activated T-cells, cytoplasmic, calcineurin-dependent 3
  Uniprot ID: Q12968
  ENSP ID: ENSP00000300659
MTTANCGAHDELDFKLVFGEDGAPAPPPPGSRPADLEPDDCASIYIFNVDPPPSTLTTPLCLPHHGLPSHSSVLSPSFQLQSHKNYEGTCEIPESKYSPLGGPKPFECPSIQITSISPNCHQELDAHEDDLQINDPEREFLERPSRDHLYLPLEPSYRESSLSPSPASSISSRSWFSDASSCESLSHIYDDVDSELNEAAARFTLGSPLTSPGGSPGGCPGEETWHQQYGLGHSLSPRQSPCHSPRSSVTDENWLSPRPASGPSSRPTSPCGKRRHSSAEVCYAGSLSPHHSPVPSPGHSPRGSVTEDTWLNASVHGGSGLGPAVFPFQYCVETDIPLKTRKTSEDQAAILPGKLELCSDDQGSLSPARETSIDDGLGSQYPLKKDSCGDQFLSVPSPFTWSKPKPGHTPIFRTSSLPPLDWPLPAHFGQCELKIEVQPKTHHRAHYETEGSRGAVKASTGGHPVVKLLGYNEKPINLQMFIGTADDRYLRPHAFYQVHRITGKTVATASQEIIIASTKVLEIPLLPENNMSASIDCAGILKLRNSDIELRKGETDIGRKNTRVRLVFRVHIPQPSGKVLSLQIASIPVECSQRSAQELPHIEKYSINSCSVNGGHEMVVTGSNFLPESKIIFLEKGQDGRPQWEVEGKIIREKCQGAHIVLEVPPYHNPAVTAAVQVHFYLCNGKRKKSQSQRFTYTPVLMKQEHREEIDLSSVPSLPVPHPAQTQRPSSDSGCSHDSVLSGQRSLICSIPQTYASMVTSSHLPQLQCRDESVSKEQHMIPSPIVHQPFQVTPTPPVGSSYQPMQTNVVYNGPTCLPINAASSQEFDSVLFQQDATLSGLVNLGCQPLSSIPFHSSNSGSTGHLLAHTPHSVHTLPHLQSMGYHCSNTGQRSLSSPVADQITGQPSSQLQPITYGPSHSGSATTASPAASHPLASSPLSGPPSPQLQPMPYQSPSSGTASSPSPATRMHSGQHSTQAQSTGQGGLSAPSSLICHSLCDPASFPPDGATVSIKPEPEDREPNFATIGLQDITLDDVNEIIGRDMSQISVSQGAGVSRQAPLPSPESLDLGRSDGL

SEQ ID NO: 57976 - protein, 1068 aa, Homo sapiens
  Payload ID: 11368
  Gene Symbol: NFATC3
  Gene Name: nuclear factor of activated T-cells, cytoplasmic, calcineurin-dependent 3
  Uniprot ID: Q12968
  ENSP ID: ENSP00000331324
MTTANCGAHDELDFKLVFGEDGAPAPPPPGSRPADLEPDDCASIYIFNVDPPPSTLTTPLCLPHHGLPSHSSVLSPSFQLQSHKNYEGTCEIPESKYSPLGGPKPFECPSIQITSISPNCHQELDAHEDDLQINDPEREFLERPSRDHLYLPLEPSYRESSLSPSPASSISSRSWFSDASSCESLSHIYDDVDSELNEAAARFTLGSPLTSPGGSPGGCPGEETWHQQYGLGHSLSPRQSPCHSPRSSVTDENWLSPRPASGPSSRPTSPCGKRRHSSAEVCYAGSLSPHHSPVPSPGHSPRGSVTEDTWLNASVHGGSGLGPAVFPFQYCVETDIPLKTRKTSEDQAAILPGKLELCSDDQGSLSPARETSIDDGLGSQYPLKKDSCGDQFLSVPSPFTWSKPKPGHTPIFRTSSLPPLDWPLPAHFGQCELKIEVQPKTHHRAHYETEGSRGAVKASTGGHPVVKLLGYNEKPINLQMFIGTADDRYLRPHAFYQVHRITGKTVATASQEIIIASTKVLEIPLLPENNMSASIDCAGILKLRNSDIELRKGETDIGRKNTRVRLVFRVHIPQPSGKVLSLQIASIPVECSQRSAQELPHIEKYSINSCSVNGGHEMVVTGSNFLPESKIIFLEKGQDGRPQWEVEGKIIREKCQGAHIVLEVPPYHNPAVTAAVQVHFYLCNGKRKKSQSQRFTYTPVLMKQEHREEIDLSSVPSLPVPHPAQTQRPSSDSGCSHDSVLSGQRSLICSIPQTYASMVTSSHLPQLQCRDESVSKEQHMIPSPIVHQPFQVTPTPPVGSSYQPMQTNVVYNGPTCLPINAASSQEFDSVLFQQDATLSGLVNLGCQPLSSIPFHSSNSGSTGHLLAHTPHSVHTLPHLQSMGYHCSNTGQRSLSSPVADQITGQPSSQLQPITYGPSHSGSATTASPAASHPLASSPLSGPPSPQLQPMPYQSPSSGTASSPSPATRMHSGQHSTQAQSTGQGGLSAPSSLICHSLCDPASFPPDGATVSIKPEPEDREPNFATIGLQDITLDDDQFISDLEHQPSGSAEKWPNHSVLSCPAPFWRI

SEQ ID NO: 57977 - protein, 38 aa, Homo sapiens
  Payload ID: 11368
  Gene Symbol: NFATC3
  Gene Name: nuclear factor of activated T-cells, cytoplasmic, calcineurin-dependent 3
  ENSP ID: ENSP00000445670
MTTANCGAHDELDFKLVFGEDGAPAPPPPGSRPAAPGL

SEQ ID NO: 57978 - protein, 38 aa, Homo sapiens; identical to SEQ ID NO: 57977
  Payload ID: 11368
  Gene Symbol: NFATC3
  Gene Name: nuclear factor of activated T-cells, cytoplasmic, calcineurin-dependent 3
  ENSP ID: ENSP00000454451

SEQ ID NO: 57979 - protein, 38 aa, Homo sapiens; identical to SEQ ID NO: 57977
  Payload ID: 11368
  Gene Symbol: NFATC3
  Gene Name: nuclear factor of activated T-cells, cytoplasmic, calcineurin-dependent 3
  ENSP ID: ENSP00000455113

SEQ ID NO: 57980 - protein, 1053 aa, Homo sapiens
  Payload ID: 11368
  Gene Symbol: NFATC3
  Gene Name: nuclear factor of activated T-cells, cytoplasmic, calcineurin-dependent 3
  ENSP ID: ENSP00000456120
  MOD_RES (1)..(1): Any amino acid
XLDDRRPITLCVCVRARVCDLEPDDCASIYIFNVDPPPSTLTTPLCLPHHGLPSHSSVLSPSFQLQSHKNYEGTCEIPESKYSPLGGPKPFECPSIQITSISPNCHQELDAHEDDLQINDPEREFLERPSRDHLYLPLEPSYRESSLSPSPASSISSRSWFSDASSCESLSHIYDDVDSELNEAAARFTLGSPLTSPGGSPGGCPGEETWHQQYGLGHSLSPRQSPCHSPRSSVTDENWLSPRPASGPSSRPTSPCGKRRHSSAEVCYAGSLSPHHSPVPSPGHSPRGSVTEDTWLNASVHGGSGLGPAVFPFQYCVETDIPLKTRKTSEDQAAILPGKLELCSDDQGSLSPARETSIDDGLGSQYPLKKDSCGDQFLSVPSPFTWSKPKPGHTPIFRTSSLPPLDWPLPAHFGQCELKIEVQPKTHHRAHYETEGSRGAVKASTGGHPVVKLLGYNEKPINLQMFIGTADDRYLRPHAFYQVHRITGKTVATASQEIIIASTKVLEIPLLPENNMSASIDCAGILKLRNSDIELRKGETDIGRKNTRVRLVFRVHIPQPSGKVLSLQIASIPVECSQRSAQELPHIEKYSINSCSVNGGHEMVVTGSNFLPESKIIFLEKGQDGRPQWEVEGKIIREKCQGAHIVLEVPPYHNPAVTAAVQVHFYLCNGKRKKSQSQRFTYTPVLMKQEHREEIDLSSVPSLPVPHPAQTQRPSSDSGCSHDSVLSGQRSLICSIPQTYASMVTSSHLPQLQCRDESVSKEQHMIPSPIVHQPFQVTPTPPVGSSYQPMQTNVVYNGPTCLPINAASSQEFDSVLFQQDATLSGLVNLGCQPLSSIPFHSSNSGSTGHLLAHTPHSVHTLPHLQSMGYHCSNTGQRSLSSPVADQITGQPSSQLQPITYGPSHSGSATTASPAASHPLASSPLSGPPSPQLQPMPYQSPSSGTASSPSPATRMHSGQHSTQAQSTGQGGLSAPSSLICHSLCDPASFPPDGATVSIKPEPEDREPNFATIGLQDITLDDDQFISDLEHQPSGSAEKWPNHSVLSCPAPFWRI

SEQ ID NO: 57981 - protein, 41 aa, Homo sapiens
  Payload ID: 11368
  Gene Symbol: NFATC3
  Gene Name: nuclear factor of activated T-cells, cytoplasmic, calcineurin-dependent 3
  ENSP ID: ENSP00000456307
MTTANCGAHDELDFKLVFGEDGAPAPPPPGSRPAAHLHYLH

SEQ ID NO: 57982 - protein, 1060 aa, Homo sapiens
  Payload ID: 11368
  Gene Symbol: NFATC3
  Gene Name: nuclear factor of activated T-cells, cytoplasmic, calcineurin-dependent 3
  ENSP ID: ENSP00000456379
  MOD_RES (1)..(1): Any amino acid
XLDDRRPITLCVCVRARVCDLEPDDCASIYIFNVDPPPSTLTTPLCLPHHGLPSHSSVLSPSFQLQSHKNYEGTCEIPESKYSPLGGPKPFECPSIQITSISPNCHQELDAHEDDLQINDPEREFLERPSRDHLYLPLEPSYRESSLSPSPASSISSRSWFSDASSCESLSHIYDDVDSELNEAAARFTLGSPLTSPGGSPGGCPGEETWHQQYGLGHSLSPRQSPCHSPRSSVTDENWLSPRPASGPSSRPTSPCGKRRHSSAEVCYAGSLSPHHSPVPSPGHSPRGSVTEDTWLNASVHGGSGLGPAVFPFQYCVETDIPLKTRKTSEDQAAILPGKLELCSDDQGSLSPARETSIDDGLGSQYPLKKDSCGDQFLSVPSPFTWSKPKPGHTPIFRTSSLPPLDWPLPAHFGQCELKIEVQPKTHHRAHYETEGSRGAVKASTGGHPVVKLLGYNEKPINLQMFIGTADDRYLRPHAFYQVHRITGKTVATASQEIIIASTKVLEIPLLPENNMSASIDCAGILKLRNSDIELRKGETDIGRKNTRVRLVFRVHIPQPSGKVLSLQIASIPVECSQRSAQELPHIEKYSINSCSVNGGHEMVVTGSNFLPESKIIFLEKGQDGRPQWEVEGKIIREKCQGAHIVLEVPPYHNPAVTAAVQVHFYLCNGKRKKSQSQRFTYTPVLMKQEHREEIDLSSVPSLPVPHPAQTQRPSSDSGCSHDSVLSGQRSLICSIPQTYASMVTSSHLPQLQCRDESVSKEQHMIPSPIVHQPFQVTPTPPVGSSYQPMQTNVVYNGPTCLPINAASSQEFDSVLFQQDATLSGLVNLGCQPLSSIPFHSSNSGSTGHLLAHTPHSVHTLPHLQSMGYHCSNTGQRSLSSPVADQITGQPSSQLQPITYGPSHSGSATTASPAASHPLASSPLSGPPSPQLQPMPYQSPSSGTASSPSPATRMHSGQHSTQAQSTGQGGLSAPSSLICHSLCDPASFPPDGATVSIKPEPEDREPNFATIGLQDITLDDVNEIIGRDMSQISVSQGAGVSRQAPLPSPESLDLGRSDGL

SEQ ID NO: 57983 - protein, 167 aa, Homo sapiens
  Payload ID: 11368
  Gene Symbol: NFATC3
  Gene Name: nuclear factor of activated T-cells, cytoplasmic, calcineurin-dependent 3
  ENSP ID: ENSP00000457441
LKKDSCGDQFLSVPSPFTWSKPKPGHTPIFRTSSLPPLDWPLPAHFGQCELKIEVQPKTHHRAHYETEGSRGAVKASTGGHPVVKESKIRSSFDVVFDAQLLLSMGKKKVYGKHSRYLTTLTWKLLSIITTYNFLATSSHMALLTCRSTGKSSPWLGSLSSSKLCIL

SEQ ID NO: 57984 - protein, 1047 aa, Homo sapiens
  Payload ID: 11368
  Gene Symbol: NFATC3
  Gene Name: nuclear factor of activated T-cells, cytoplasmic, calcineurin-dependent 3
  ENSP ID: ENSP00000460533
MTTANCGAHDELDFKLVFGEDGAPAPPPPGSRPADLEPDDCASIYIFNVDPPPSTLTTPLCLPHHGLPSHSSVLSPSFQLQSHKNYEGTCEIPESKYSPLGGPKPFECPSIQITSISPNCHQELDAHEDDLQINDPEREFLERPSRDHLYLPLEPSYRESSLSPSPASSISSRSWFSDASSCESLSHIYDDVDSELNEAAARFTLGSPLTSPGGSPGGCPGEETWHQQYGLGHSLSPRQSPCHSPRSSVTDENWLSPRPASGPSSRPTSPCGKRRHSSAEVCYAGSLSPHHSPVPSPGHSPRGSVTEDTWLNASVHGGSGLGPAVFPFQYCVETDIPLKTRKTSEDQAAILPGKLELCSDDQGSLSPARETSIDDGLGSQYPLKKDSCGDQFLSVPSPFTWSKPKPGHTPIFRTSSLPPLDWPLPAHFGQCELKIEVQPKTHHRAHYETEGSRGAVKASTGGHPVVKLLGYNEKPINLQMFIGTADDRYLRPHAFYQVHRITGKTVATASQEIIIASTKVLEIPLLPENNMSASIDCAGILKLRNSDIELRKGETDIGRKNTRVRLVFRVHIPQPSGKVLSLQIASIPVECSQRSAQELPHIEKYSINSCSVNGGHEMVVTGSNFLPESKIIFLEKGQDGRPQWEVEGKIIREKCQGAHIVLEVPPYHNPAVTAAVQVHFYLCNGKRKKSQSQRFTYTPVLMKQEHREEIDLSSVPSLPVPHPAQTQRPSSDSGCSHDSVLSGQRSLICSIPQTYASMVTSSHLPQLQCRDESVSKEQHMIPSPIVHQPFQVTPTPPVGSSYQPMQTNVVYNGPTCLPINAASSQEFDSVLFQQDATLSGLVNLGCQPLSSIPFHSSNSGSTGHLLAHTPHSVHTLPHLQSMGYHCSNTGQRSLSSPVADQITGQPSSQLQPITYGPSHSGSATTASPAASHPLASSPLSGPPSPQLQPMPYQSPSSGTASSPSPATRMHSGQHSTQAQSTGQGGLSAPSSLICHSLCDPASFPPDGATVSIKPEPEDREPNFATIGLQDITLDDGFVKAEKPLSHD

SEQ ID NO: 57985 - protein, 902 aa, Homo sapiens
  Payload ID: 11369
  Gene Symbol: NFATC4
  Gene Name: nuclear factor of activated T-cells, cytoplasmic, calcineurin-dependent 4
  Uniprot ID: Q14934
  ENSP ID: ENSP00000250373
MGAASCEDEELEFKLVFGEEKEAPPLGAGGLGEELDSEDAPPCCRLALGEPPPYGAAPIGIPRPPPPRPGMHSPPPRPAPSPGTWESQPARSVRLGGPGGGAGGAGGGRVLECPSIRITSISPTPEPPAALEDNPDAWGDGSPRDYPPPEGFGGYREAGGQGGGAFFSPSPGSSSLSSWSFFSDASDEAALYAACDEVESELNEAASRFGLGSPLPSPRASPRPWTPEDPWSLYGPSPGGRGPEDSWLLLSAPGPTPASPRPASPCGKRRYSSSGTPSSASPALSRRGSLGEEGSEPPPPPPLPLARDPGSPGPFDYVGAPPAESIPQKTRRTSSEQAVALPRSEEPASCNGKLPLGAEESVAPPGGSRKEVAGMDYLAVPSPLAWSKARIGGHSPIFRTSALPPLDWPLPSQYEQLELRIEVQPRAHHRAHYETEGSRGAVKAAPGGHPVVKLLGYSEKPLTLQMFIGTADERNLRPHAFYQVHRITGKMVATASYEAVVSGTKVLEMTLLPENNMAANIDCAGILKLRNSDIELRKGETDIGRKNTRVRLVFRVHVPQGGGKVVSVQAASVPIECSQRSAQELPQVEAYSPSACSVRGGEELVLTGSNFLPDSKVVFIERGPDGKLQWEEEATVNRLQSNEVTLTLTVPEYSNKRVSRPVQVYFYVSNGRRKRSPTQSFRFLPVICKEEPLPDSSLRGFPSASATPFGTDMDFSPPRPPYPSYPHEDPACETPYLSEGFGYGMPPLYPQTGPPPSYRPGLRMFPETRGTTGCAQPPAVSFLPRPFPSDPYGGRGSSFSLGLPFSPPAPFRPPPLPASPPLEGPFPSQSDVHPLPAEGYNKVGPGYGPGEGAPEQEKSRGGYSSGFRDSVPIQGITLEEVSEIIGRDLSGFPAPPGEEPPA
